United States Patent Application Publication US 2013/0034624 A1 - sequence listing, part 11

SEQ ID NO: 39847 - DNA, 1043 bp, Bovine  19866880968298
  misc_feature (1)..(1): n is a, c, g, or t
nattctaaagagagctaatagagaaaacaaaacaaaacaacaacaacaacaacaaaaaaatactaccgcattctcttcctaactgttgtaatgtttaatcctaggggcatggggcaggaaccacagaatgccattatccctttcaaatcctgtatgaaataaggtgaaggagcaaacaaacaaaattaataaaattacctttctatgcagttgaagcaaaaagatcattgatcagttagatggtttaggttgaaccatatgaaactgctatttttgtagatccagagtggtcaaatacaggcagttcctaatggttcagtgttttctattctgtctacacaatagaaaccattgaccttaaaactaacactatttgaacttattccttagcagcatgtctttactgtaaaagcatttggttatttggtgatatttttaaattcaaggaaatacatatttattattgatattaaattaatgtaattttaaaaatccatccaaaaccccactattcttacacaattattttattttctgtttctttcccagctctattcatatattataacatatcttccaaggtgaagcatttaaaaatttaaatcatattttcaaaaagactgcatagattaaaaaagtccaaagaaatcttcccttatccttaaattttgaatctataagtggacacacaatatagtggagctgaaacaaagccctttcataatgaaacctgtgagaaactttagggtggaaaatgacaccctctgatagcctccagtactctccaaaggcaaaaatatattttacaaattatcttaacgagctgagggacatacgtttccattaggaatgattgaatatccacatagtcaagcctgagtgattcaggaggaaacgagatttcttccccctctctgcttggaggtgaccccctctagtgcccttgttcatggtcttgaagtcctctagcaattcttcaggctgggtcccctctctccaggatcaagggaagataagggacatagtataaaaagttagagtag

SEQ ID NO: 39848 - DNA, 1161 bp, Bovine  19866880969026
  misc_feature (1)..(1): n is a, c, g, or t
nagggcagggaccggatcccagcatctgcttatttctggcctttagcacagagcctgcaggtgctaggtagatggaaatgatctgtattaaaaccttctgggacccttctgtcgtcttgttctatccctcctcaggaggccaaccaggaatagtttcctaggaaccagcaagcacggagaagggatctagagagtcggagggaaacacacacaggagcagccaggagcagaaaagaggcagagtcatcatactcctaaactgactagggccatgagagagccacagacaagccacgaggcagtgccggccgctgaaaggcaggcagctcatgtccaggaggccatgccatcagcacccagggaatggacctggtcctcgtttcgtgccatcaccttccatggagtttggccgacaccaccaccttccttttctgcttcaggtcatcatactcatagagcccgagcaccgctccttccgcagccgcctgggcatctccgcaggggtccacctccaccgacgggatctccaggtcctgaatctgtctgcaccccgcttcacagggcagaggaaccagaaaaccagagtcagtcagggacccctcagagggcagaaggcagagacttagggtgcggtcctgagaaaacatcaagattggggttcaaatcccggccctgacactgatctttctgagctttcacttcttccctttccatacagtgaggacatgcacacacctcacatagtagtgggaggacagaatgatggataaatgattggtctacctcacatggtagtggggggaaagaatgatggattaaatgattggtctaccctggtggctcagacggtaaagcgcctgtctataatgcaggagacccgggttcgatccctgggttgggaagatcccctggagaaggaaatggcaatccactccaggactattgcctggaaaatcccatggacagaggagcctgctaggctacaggccatggggtcgcaaagagtcggacacgacggagcgacttcactttcacttcacctcacgtggtagtgggaggaaagaatgatggattaaatgactggtctcactcacaagggaagtgaacgctattactaataccacttctgaaacactagggttccctgaggaagcgtcccag

SEQ ID NO: 39849 - DNA, 1103 bp, Bovine  19866881017120
  misc_feature (1)..(1): n is a, c, g, or t
ntaggcgtttccaataagaattaaaacgtgttttccacagacttatgcataaattcccaggaatacacagtacttctcagcaaacttgggggtcttggtttcggttcagcaccttgcacatatacagaaacacatgcacaatcactgtggtgcaaaagtaaaaactgtcattggagttcatatttaattaaaagctttctctgtgtgtgaagaaatactttctctagagcagcgcagaatttattccaaacgtttaagtgctaaatccgtaccgcgcactgtaccaggattaggcaagtgaaagatgacacggaacacaagactcaatgggttgctgtccaggagcttacattttgccgagcataagtttctccttttagagtttttacccagccacatctaatccttggccccgtaaacgatttccggtgaagtcccacttcttttccctaattttacaaatattctcgctttctgagatgtcatcgccctggaaactgaagtcactgtgggctctgtctttggacatttggcagatctcggatgcagctgaatcaccggcttgttctttccctacagtggcgagatgacagtgaccccaaaagtttccagcacttagagcataaacttaaagcagcccgaaccttcaagggacccacaactctagcggcttccactgcccttctatcacggatcctaaggaagttaaggcggttgggtcagaccctgcaacactcgcagcgcattgttctgggcgctaaacccataagcagcgcagaactgagaaatctaaggcccggcagctatcccaagtgtgcaaagaccgaaaagtgcccatctctactggactccaagcaccggcatgcatcgcgccgaaacggcaatctccgcttaggaatcccagcgcaaaggggcctgggaagtgaagtctccgggcgtccggagtcgcggtgcgaaggcagaaggaaggcattgctagtctgctccattagcgcgccggttcctggccaagctccgagcctctcgctgctgctcagggttttcgcgggcggcgggagcagtatggcttgcttgagtaaactccggggggaggggagagaggg

SEQ ID NO: 39850 - DNA, 1763 bp, Bovine  19866881024967
  misc_feature (1)..(1): n is a, c, g, or t
nccccatcccacccctctaggttgttacgagccccttcccaagattaacaacacctctttttttattatctgctccaacatatacagcttattaaaagttgatcaacttttatcgacttcttgagctaattattttggccaggggaatagaatattctgattaggtaggcctgggtcacatgaccaaccctagaaccatgggtcagcctcatccaaacaaagatggactcaaaatcagagagttcctcaaagggcactattaccagaaaaaggaaatgtagatatctagacaggcaaaaccaaatagcactttattgaaaaaaattcacttagtttaccctgacctctactagagacatgcatattcctccaaataagtctttcaaaacagaaaatagcatttgagatttcttgttaaatatgacttcatatatcttcttatagctcatctccagtctttctaacttctcaacatgtagatggtagaccagctttgttcaatagaagtataatgtgagacataaatgtaagccacatttccaattttaaattttctagtagtcataattaaaaagtaaaagtgaaattcatttttaaaatatattttatttaatccaatactgcttcaacatataatcaatataaaagtttcgatgaactattttatattattttttctatattctttgaaattccatgtgtattttacacttgcagcacatttcaattcagattagccacatatggatgaagactaccatattggacaaagcatttatggacagtgaaagcttttatattctattaagtgaaggctttatccttacccacctcccaaccaatttcctctcttaaaaaacttctatttccattctaatcatctttctccctccaatcaaataggacaatgttaactaattcacagtcttatgattttgaaaaaggaataaaaagaagtgttcacatattttatacttttcatgaatgagagctgaaataaaatggcaaatcactctggtgcttttattcagcatgagttaaagcaatgtgaaacagatgatcacatcttgatgacaattatggtactactcggcaggaaaaaatgaaggaatttggcctggtactattaaatagctgcccagataagttctacaaggaatagaaagagtgagaagaatcaaattacccatacacagctaatgaaataattgcatcatgttgttgggggaatctcaactgctaaaggtagaatatctgttagtgcacctttattccttaaagaagtctgctttgctcatgcttttgaggataaatcttcatatgtacttttttgtgtgtttaaaaagcaggctctttttctattatgaatcacttgatccgagggtttattttggcaccttgaggattatgtaaaacttattgctgaagcagcattttcttttaaagagttggtgtttaaggactctttaagaaagatgaaaaataaaataaaaagccctccaaaatgtcaactactttgggatagattttgtattattttctcaattcaaacaaaactgcagtatatataaacatgtgacagaattttattctgcaaatttagtatgattataatttatatgctgctataaaatactgttcattttcacagaaatatcttaaacaatttgtgtttgtatatgagttaattttaaaatgtcattacttaagatatacactttatcataaaaatcttttagccagaaaacaatactctgcacata

SEQ ID NO: 39851 - DNA, 744 bp, Bovine  19866881033449
  misc_feature (1)..(1): n is a, c, g, or t
ntattgcatataatcctgctcaagtcttttattagattcttgcttgactacttagggccacttctgaatttgttatttagaatactgactaaatttattctttatagaactcagcaacattccattctccatggctacacgtcttcagcatccattatctataattttctttttctgtcttcctagaagtgttcttattggcaatggttactagctgggccttcttttctctataattacttctttagaaaaatattcttattttgcttacaaattattctccctatgtgcagtcagagttctttcaactattgacactcttcttgccctaacccaggacagccacccagtatgcccgcttggtaattatttcgttaggcccactatttcaaggaaatctttctttccagcactatatatggacttagagcatgagtgttagataaacaaagcataatgaaaacacttaagaggcagaagaaaataacagagtttcttttaagtgaattaatgtcataaatttaaggtaaacatatttttagggattattccaggtgcaagaaacagaatttttatgtctttattaatctcctgcactatgccaagtacccaaataagtgctgagacccccaactgtaaacaagacaaatgtggtctctgcccccacagagcttggagtacaagggataagcagaaaagacaaatgccaaacaaataatcgtataataaggaagaaggcagggg

SEQ ID NO: 39852 - DNA, 4705 bp, Bovine  19866881129742
  misc_feature (1)..(1): n is a, c, g, or t
ntgccttagtagtgctgtaaattctacctataggtaagtctgccatgggtcacccctaaaatatcttgaaaacatgctcacaaggaacaaattattgagcagacagcataattgctcgctgcaacaaaattcaaaactctctcacagactacaccaaaatttaacactcaaccatataacattcacaatgtctggcatccagtcaagaagtatgagacatatgaagaagcaagaaattgtgacccataactagaaagaaaaataagagacgatagaaaaataggcccataaataacagagatgaaacaagtagtatacagagatcttaaaagaccttttataaatatgctcaagcttttaaagaaacatgaacctaaagaggaaagacatgggagaaagatttaaaaagcagagactctaaagatggaaaataagatatctgaaataaaattttcactgactgctcttaaatacttcagaagaaaaggtcaataaacttgaaacacaacatcaaaaactattcaaaataaataggagggaaataatagacaaaaacaaagtctaagtcactggagaatagtatcaactgtctaacacacatattctgtaactggagtcccagaatctaattttttcctgtaaagctagaactattccaagaataaagtatttctaaaaaaataattaaaggatgaagtaagatattccatgataccactaactataagaaagctgtgatgggctacattaataccagacagagtaaatttctgggcactgactactgtcagagataaaagtgacattttataatgataaaaacatgaccttttatgaacacatgacaaatctaagtgtgtacgtatctcacagcagatattcaaaatacacaaagcaaaaattagcagaaatatagatataaaagaatagagaatagagaaatagaagaaataaatagagaaaggagaaatttacaaatgtagttggaaatgtcaacactttttttcattaactgatataatgtgtgcatgcatgtgtgctcaatccctcagttctgtccaattctttgtgaccccatggactgcatccagccaggctccactgtccatagaattttccaggcaagaacactggagtgagttgccatttcctactccaggggatcttcctgaccccagggatcaaaccttggtctcctgcgtctcctgcattggcgggtggattctttaccattgaaccacctagaaagtatgaactgatacaatgatacaatagtcacaaagtcagtagagatatagaagaaactatcaaccagcttaaccaaatagatacttatagaatttgccacctatctgctgaaaagcacattcttttatttaccaatgtagatcattttttgttctataagacgtctcagttctttggtccacagtggacttgacttataaatcaatagtaaaaaaatatctggaaaattccaacaaaactgaaaatcaaataaccaatgggtcaaaagagaaatcacaagagaaattaaaagtatttaactgaaataaaatgaaagctagaaaactgtgggatgcggatgcaatgttttaatgtccttggctactgtaacaaaataccacagtctcggtgtcttaaataacagagatttatttctcaagttctggaggttgggaattccaagatcaatgtgcagccgagttagtttttggtgagaagtttcttccttgcttgcagaaggccaaatcctcacatgtcctcacatggcctttttgtggtatgtgcaggaggtctcctgcattgcaggcagattctttactgtctgagccatcagggaagcccagttttcctattttgtatgatttatttcacttagaataatgtctttaaggttcatccatgttgtatcagaatcccattcatttttaaagctgagtaatatttcattgcatgtacacactgccttttgtttatctgttcatctatcagtggaaatttgaactatgtccactttttggcggttgtgatattggtaatttgaacattgaagtataaatacctgtttgagtctctgatttcagttcttttgggtacacacccagatgtggaattgctggatcacgtttcatatgtttaattttttgagaaaatatcttactgttttccatagtagcagcaacattttacattctcaccaacagtgcaccagcatcccaatttcttgctaacatttttttttttaataaccaaactaatgggtatgaagtagtgtctcactggagttttgatttgcatgtctataatttttgagtagcatttcatgtgctttttggccatttgtacgtcatttgagaaatgtttattcaagtcttttgcttatttttcaatttttaaatgctcagattagaaataagaaaaggttgtattcaatcatcttacgtgaacttaagtttatatggagggaaataaaaagtgtggaaatcaatgaaataaaaaccagaaaaaaagagaaagttgattaaatttccagtcaattagcatgtcttattgattcctacctcctgagtatttctttagtctattactcttccagaatctaggttcttaaatatcatgttataatgccctgtgtaatatgaagtttgtttatctgttattcaaaattgaggagaaggatgaactgtgttgttttcatcttgatatcctcagtgcctggcatagtaccttaataatatgtgttgaaagattatttgacttattaattcacaatttctcctcacaaatttaaattgataagatggtgaggacatggccaacatgcatagacaacttagaacaatgtcagaaagcacagtggaaagggcacaacatttagaataagagaagtcatctcttaatagtgttactctatatacatcctgtggttctttggatcctcatctataaatgggtgcaattcaaataataaatattataagatgtttgggatttccattcactaaaaatgatttcattgatccagattgatggttaagctccatttggtccaatcaatcctattctattctgtgttagaattgtgcagttgtctccatgtatgcctcttcatgcactatctcaaaagtcatccttcttttgtgctatcttctttgaacagtaatcccagcctaaatcagtagacacaagactgctgaggtcaggtacaatgactttcatctttatctcccttgaaccttaaaagttcctggccagagaagggcataaaaaatcattgctgaataatggagtagaagagtaggaaagatctcagagcctgaagaaaagaaaattactaataccttatttctgaaagcagctaacatgggctccactgcccaacagctctaatttccccatgtaatacttgtcatttgaaatgccaaggatgagggtgaatacttgtttcagtgcagacttttgccaggaccccactgatataaaattccaaattgttttcagactatttggcaaacctctgttcttttctataagcatcagagaacttttccctctggcacaggatttccatatagcactttcttcgtcaactgagacttgtgaaatttgtctgtgctctggaagcagagtacaaacagtgaacagataaaagaacactgtaaatttgactgcaaacctgcacaaggtggaaaactttgatgctggaaatttctgtaagtcaatccacaatcaagtcacaagactgttgtaagagataactctcacctctctctgtgcgaactatatccatccttacaggtaccattctaatcccacttccctttctgatcagactgttactccctctgcatgctttgtatttctatagcatttatgaagccacaaaacctgctgctgctgctaagtcgtttcagtcctgtctgactctgtgcgaccccatagacggcagcccaccaggctcccccctccctggcaaagaacactggagtgggttgccacttccttctccaatgcgtgaaagtgaaacgtgaaaatgaagttgctcagtcatgtccgactcctagcaacccccatggactacagcctaccaggctcctctgtccatgggatttgccaggcaagagtactggaatgagttgccattgccttatcctcacaaaacctagcacctatttaaagtctgttctgtaaaaataattaagtttgtactgcatcatatttttgaagtgcttttacatttatctcttttggtttttgtaattatttggagagggtatttgtgttaatgcacccattttacaggtcagattcagagtactccagaaatttacatgaggttatgtatctaaatgtaagttttccgatttcaaacatatttactgaccttactggtttatacttgctaccgtatgtcttcccaacagagcttagtgggtcacaaggcacaaagcaatgagcttaatgattgctgtttgttcacttcagagcatatgttggtacaaagctcccatttgtcctaaaacatcctatttctgctcttttgtggtgttaaacattccttgcttcagattttagcatagcttctcaggtacttatttgcagtgaggcctagaatagtagaaaatagaaaaaattagctgtgaagaaactcaagatcatataagttaccagccttcttttcagtccaacatcaattcctttt

SEQ ID NO: 39853 - DNA, 2060 bp, Bovine  19866881246752
  misc_feature (1)..(1): n is a, c, g, or t
ngaagtcgctcagtcgtgtccgactcctagcgaccccatggactgcagcctaccaggctcctccgtccatgggattttccaggcaagggtactggagtggggtgccattgctagacatccctaaagacatggatgtcagctacctacaaactctttcttctactattcttccctttgctcagtctgccctagccatatgaggtcctgctccttgaacatgtaaagcaaagtcgtactgcagggcccccgcactgctcttccctctctttggaaacttcttaacccagatctacacagttcattctcactcctctctggtaatggcccaaatttcgacttattagtgatgtctttctggatcaaactactcccactccctattcccagtcttgatttccttcctctgctttttttccatctgacatactatttactgtttattttccactgtgtatttcctctgaaacttttatcttgtgtttttcattacctattttattttttcctaagttagaataatgcagggcatattatatgcactcaatataatttgctgtatgattaattttaaaataaccttaaataattgacatttcatcctctacaaaagattttaataacagaaaaatcaaaagattaaaaactgagttcctaaaagtcatccatcatcatcaacatcaataagccctggaatagattaaacttataatactagcacattcagacatattgagtatttatttcagtaagtataatcaagattttaatcacgtgataaatcttacctgcaagagtaatacaaagtgtttacttgcaaaatcctgattctgcagtccacagcatcccaaacacagtacagccaaatttcttactacaggatgaacatttattattccaggaagaatctaaaatgaattagaaattaaaataattttgactagaggaaaaaatttaaaacagtatattaaaaaggtggtcaaaatgaaaatttctgtaagacctcatacatctactttttcctcatagatctacatttccatatatagtctattaactcaaaaaagtaaatagtaaattgctaaaacataagaatacagtcagagcaaaatatagtccttatattccctccacctgacaaaactgattcaatggcttcctagtgctcaaagagacatattgtgtctctgtgtgtagtccatattgtgtagtctttcccagtatcatcccataacacactatcccttgctcttgtttattcaattgatctgatttcaatgtctcccaattggtgctatccactagggacataatgcaagtcacatatgtcattttaaattttctaatagccacattacattttattccaaaataaataaactattatcaacacacgtaaccaatattttaaaatcaagataatatttttagctgtggtttcaaaaatattttataaaagtgagataacttatgttgcttgtactaagtctttgaaacccaatgtatttttacatttataaatatatatatatttagaatagtttttaacagtcacaggtttttaatatccacatgttgctggtggctacagtattcacaagagtaaatctaccattcttcccttcctttttcacatacttaatgtgcccactcaaatatcacctcaaggtcaccctccatgaacagatgaaactcattatcttaagttaacatacgaccataaagcttttcttcatagcaattatcaatggcataagctttcacttgtttatttgattcatgtcccctctcacttgaccaaaagatctaccaagggcagtctacatgtgttttgtaaatcatgtatactctgtccccaatactgaatgtatagtacataatacactataataaacaatattatttatatttattataaaattaatattcactcactttcatttttaaagcacagtaattccattaaaatattattactcctatatctaaataccttactcttccaatctttagacagattacttttatatatttaaaatcattagaccattcaattttgcatt

SEQ ID NO: 39854 - DNA, 1253 bp, Bovine  19866881351307
  misc_feature (1)..(1): n is a, c, g, or t
natagagcctggcaggctacagtccatgagtcgcaaagtcagacttgactaagcgactaacacacaataaggaattgtttgttaagtgtgacagaagcatcatggttatgttttgtaaagagtccttatctcttagaaatacttatcaatgtttttacagatgaaattttacaactggaccttattttaaaaacaagacatctggaaagaaaaaccgtggaaaatgacacagataaaagattgaccatatagcaattgtgttattgtttagtcaaagtcatgtccaactcttttagactgtctaaccccatggactgtaggccaccaggctcctctgtccatggaatttcccacgcaagaataatggagtcggttgcatttccttctgagatcttcctgacttagggatcgaatccacatctttggcattggtaggcagattctttaccactgagccgccaagaagacccagagaacaattgtacctgggtgtttttttattttgccttagctaataactttctgcagtagacttttctcagatgctaagagtacctggatctctgatttccctaaggcattccaaataagcttgccctttcctttacaagaggggctggggatacaaaggccccagaaataaaggtgcttcctcaaagcctcagtggattgtaatttgattcccactgacttccccttttccctgatctttcttcctctctgtaatctgcccccacacagacatcttccttcaaatcaaactcagcgtgctgtgtagttaggctcatttagactcagtcgtattggtttttccaggaggagagaagatttcactatgcagcgttccccagcgcaatgtcccatcggaatcgatccttctctttcaatcctcacccagggtatttgaccccttccatgaaggtaaattggtcctactggttccaatgcatcacagaattctgctggcttcattttccccaaagataatggtagcttatttatcaacagtctagcattcatttagagaaatattcattgaaaataagaccctcaggagatagtacaaaattactagcaaactgtttatatctgacaaggcagattatgtataatttttatgagttttttacattttccaaactttttatatatgtgtcactactaatagtggctatatcttggtgataggaaaggagaagggcaagaatccttcacttcaccttttttttccttttatatttttgcaatgtatt

SEQ ID NO: 39855 - DNA, 868 bp, Bovine  19866881410102
  misc_feature (1)..(1): n is a, c, g, or t
naactttagactaaaatcttgacggagacacacaacaatgttattttcttagctcctaggacttaacttcttttcatgaaccatagaatatttttaaatctacaataaacatttctagtgttggtggtatgacattatgttaatttggctgtaaatcactcacacatattgtaaaataataagaaatgttagggctgatcatgaatacactggttgtcttattatctgcactgtaggataatgtctcaataaggattttaaattttttgaaaggagcttttaagtactcacatagtgctggccctatttcacatacagaaaggggcacacaagacatgcagatggcttttaattatgcactgcttctaattataccatttagggttagcttattggcctctctcctctgtcagaaaggatcagctcagaggatttggatcttcaatgccttgcatttaaggcttttcaattctttaagctgctgatacattgtcagggcaatgctgaaaataaaaagtttgctgttgcagagaacctttcagaaggtgttattaaaatctataaagacacctttcagaaggtgtcttagataaagtcatgttgtctagactggttcctataatattatcttggattctctaattagaaaactaaaatggtttctctgtgaattgctcccaatgcttttccaaaatttaagcttttttgggtagcttccaagcaaaacatacatttttgaagggtcagaagctttcaaaatttccatgatgagtgagcatactttacaagtgttttgacagaactgctgttgcaaatattactagaactctactcaatacataaaagagttttctagcagcacaaaagt

SEQ ID NO: 39856 - DNA, 1651 bp, Bovine  19866881500783
  misc_feature (1)..(1): n is a, c, g, or t
ncatttttaaccagtttaggtgatgctgcagactccagtttgagatggcctttaggattctcagggctctctcttttacctccccccgatttgaacttctagcagcttctagcatagtgccctgctctcaatattaataatatgagttgagttactttgaactgttaaacccttgatgacaaggacctcgccttataccttttaaatatatcttatcacctccattaatgccaagacagagggggtgccagtaggagacatactaaagggcgggtgtgccagtaaaactttcatccataaatgatgcaaatgcatcactgggtgccagcacatcacaggaaatgcagaaggatgccaaaatggtgggaacgcccccgcccccacccccacccttaagggaggtattgcacaatcctcactggctgtttccagttgcagggtgacttggaaggggttgtgaaattaatgaatgaacaataaactgctttgtgaaggagggcaccactggttgatgtcaaggctttggttttacagatttggggccagagctgaattgctccagacagaaaaagaaagattaatcttccctcagcagtgctgctccatctttctcctcatgtttcattcagtctcttaaataggcattgaccaattataagtttgaaggagtgacagatgttaacctgctaggttatccacgtgtcttggtctagctttgcggtctgctgatgattttgttatgattagaattacagaagcatttgtgggtagagtaaggatttatgcagataggatatggggggtgggtagcatgaggagtgatagctttatattttgaagacaaagtttatttaaatcatagttttgggtaaatcaaaccagtttcaaggacatgaaaaagaacctgttactagtttttgtccattttctttccagggtggtctgcccttgaagcatacccgcccccaaacatctgcttttccctgcacttgcaggctcattaatgggaacttcccagagaaagatccagaaatagcaaattccactaaaaggcttatcattaagtacaatacagctctttatgtgggggaaggatggcttctgaatacgagtccattagggctgtgggctggaaaaaatgggtcagttttcttttaagggagaaattaatacagcaagcaagagccagcaatactgtgacattcatcctgcacagcttttcctcttcacgctgccaagtgcgtctgtccagacttgctattcctgtcctcaggcccctagggcagggcctatttgtcctgaagaagcctatcaaattatctggcaacagcctaaataaacatgagcaaggagattagaactgagtagagggtgtgtgtgtgtgtatgtgtgcgcgcatccatgcacgcatcctgaatgaaccagaaaagcaaaagttaatcagtaactctttcactgacctttttcccctttgttgggtccaaatgtcaattccacaggaggtagcttctagccaagtccatgtggtgctgtccccagagaagagctgataaaagaagcttgcttcagaaagtgtaagggtgagtgcttgaaaggaccgtccagtgtccagtctcctcctggcaaactgatacacagggctgggtgggct

SEQ ID NO: 39857 - DNA, 1110 bp, Bovine  19866881513178
  misc_feature (1)..(1): n is a, c, g, or t
naaaaacctacaaatttgagaacatggaatgctgtccaagaaaatttaatagaaatccactactaaaaagtcagatcagatttttttattacattgctaaaggatttgttgtaaaagttagggtaaaaaacaagtaaacaagttacattattcattacgaaacatggatttttttcataagaatgttccttataatccaactactggaatatattagagagtttgtggaaaacattttcaaatgaaggaattttatgaagaaattataactttgccatcctaactatacttggtatagacagagattttcaaacttactccttgcaacagaaactccctccaatttcttttcccaaataagttaatacacagaacctcaaatacagaaaccatcatcatctgaggcagctacattagaactaatttgaaaagcactggtgtaccacagtaatttcttatacttttgaaatgtttaatgaaattaaatacttgttttctgctaaacaacaaaggaaataaactcatctttctggaatgataatgaataaatactagataggttcagcctcttgcattaattcagatacacaggtcagaatagaagatatataatttgttggaatataaagagtacagtgatagattcctttcatttctggtagtggtccagaaatattcccattatttatttaaacttggaaagaatagggaatgggaacgtaagatccagtatgaaataatggaaagatgactgggatttgaagtctccaaaaatctggaatggaacctactagttatagccttgccaagccaggcttttaatttccatatctgtaaaataaggattctgtcacctaacttatttgtgatcaaatttttaaaatattaaaatattttataaactacaaaacatcatgcaaaggctaattattagtcaggtagaatcactagtcattgttttttaaattctgtactatgacacatgtatttaataaagttagtttgcagaagacagataactttaattgaatatctgcttaagaaaactgatcaatttgtgtaaacaatctgaccaatcaaaaggtttacataatctataccattaaaaac

SEQ ID NO: 39858 - DNA, 936 bp, Bovine  19866881561577
  misc_feature (1)..(1): n is a, c, g, or t
nataattctgttgcatattcaagtttgagaactactctcacgtgtatgtgtcctcaagtacaagatgtccataaagtcctagctcagtctgaatagtaaacaaatcatgtattttgtatataaaataatttgcaagctgcaacagagggtaattatttaagatttaaagaaactgttaatttgttttaatatttatactccactttctcggtaataaacactgcataataacggccatatcctaatttacccaacatgatggtagacttgttgaacattagcatttcaacattttaaatctagataaatcctctcctgtcacattttgcagattatttatatcatatgtagaagcaaatttattacaatttcaacctacataagaactttatggataccttcatatataatgtaaatttatgggagtaataaatatatatttatataaggaagtatataatgatttttcaaagtaggtgttcctcatggcgtattttgtggaacaaatgtgctgtgattttatgagtgtagagctttggatacagccagattcatttattttctacttccaggacaaatctctgactttccccacctttgttcatgcattttatccagcctaaaattcccttcccactctctttataggttcttggacccaatttcaatgtgtagggggaggaaagcttcttctatgccaacaagcaatcctctggacaccagatgggtatcttgcagttcaactcaactaagatgctgtccatccaaagatagcattagaacctgcaggttaagggctcagtcatataagactcttcctatcaacttcagatgccagtcccaagcccagttttcacctgtgcttctaaacaaccagctatagattggaggcccaaggaccccctcctgaacctcagatgcccatcacaaccccag

SEQ ID NO: 39859 - DNA, 1268 bp, Bovine  19866881604221
  misc_feature (1)..(1): n is a, c, g, or t
nttaggaagtaatttagaccttagtactcattaagttactaaattttgtactctaaagaaattgtttggttgaagtctacaaacatttaataaatccctatgatggatccagcatggtatggatgaagatatcctttctactttatgaacatgcctttggaatttgattaatgacatggccaaaaaaccaaaaactcgaaagggccaaaaaccaaaccaaaagaaagagtatccttcagaacaaaatgcagaacacatgaggcaaatgagacagtcattccccgagattgcaaagagtgactgctttgaaaaaaactttcatgaaatctgtctctaaaactcaggcccacctatctaagaagaaactcatgaaaactagaaattgtatagaattaacttgaattctagcatcaactcttctaaaagtagtctgtatatttttatcaattcactttaaatctctattccttcacctttaaaatgaagggccaggccagggttatcttcagagttccttgcagtattttaggattgcattgtctgtggacaaactcacatacacaatctttaattataagtttgtaaaaacatctagggggccaactccatctgctcctgaagtcttaaacctttattaattacttatttcccaaagccatctctgttggtaggagtgggcagagaagcagagaaaccccttggaccacaagcttttcacttctggtttctcaccacaaaatattccccaggacttgggggccagatggcaacgtttttgaagatgcaccaaggatttgaattctggttcgtattaaatatcacatgtaaattattaatctgtggcagctgtaacttgcatattattacactacattaaacattgatgttgcaaagaccagcctatgggccacatggagctgctgggggaccgccattggtcctccaattaaaactcggatatggaatccaggtaaattaggctccagtctttagaaggaatatttattactaatgaaagaacatgagcagtgtttcaaagtaaatgataatatctagcattcattgaggtcttactatgtgctaagttgtcttctaagtgcttaacacatactgataactttggttttcctgacacctctctcaggtaagcattattacttaccattgttatagagcaacctttactaagtaccaaccctctactggggagttgttttagttagtccagatacagaggtgagataaaacattgtcatggctttatggag

SEQ ID NO: 39860 - DNA, 911 bp, Bovine  19866881660478
  misc_feature (1)..(1): n is a, c, g, or t
natacagcttttatagaaggaggaaatggaaggatagttatgcaattatgactttagacatttgactagggcaactacagtactcaatttcctgtcaggaaagcaatagtaatatttgatccacatatgccctcatactaatggtaaaatagctgctttaaaagggagtaaatttcatggggcatttatagcttaatagttcaaggccgaggcattcttgtcagtgggctaaagcttcagggctgacacttcacaattgcatgatcttggacaagttacttcacccccttgtatttatttccttgttggtaaaagagaattgacaacagcccatacctctacagggatgttaaacaaagtgcctacaaaacacacggcacctggtgaaaagtaagaatgtagaagtgttagctgttcagttgtgcccaacctttagtgtccccatggattgtaacccaccaggctcctctgtctatggaattctctaggccagaatactggagtgggtagccatacccttcaggggatcttctggaccctgggatcaaagccatgtctcttgcaatgaaggtagattctttaccatatgagccacctttattttatttttcttgcgtgaacatgaatatcaagcataacatacagacttttaaaatacagcgggtattggccaaagattattagagtctgagcactttaaagaaacatttctttcctctaagcaattgagtaaacatttaactcagtcagtagacagaacgcaatttgcaattcaacatcaattaagagctctgaacagggaagagatgtgatcaaagtgaacatgaaaatagctatgcaatagtttgaaaagcaaaatctcaattcactataaactggaagaagatttgccagcaggagccaggaagcac

SEQ ID NO: 39861 - DNA, 1944 bp, Bovine  19866880347635
  misc_feature (1)..(1): n is a, c, g, or t
ncgttatgtattcaagctgaacaaaagctctttgctatccctgctgaaatctgttttcacagaagtccagtccccctgcattcctcgtcagtctgcatcttatcacaccagccaggcgaatctccctcagcaagtcctcctccttgggagacatgacacagttcccagcaggacaggctggtggcacaggaggggtttcttctcccaaactgttggttcccaacgtaagctccagacagcagggagtcccctccgccctgaccacctccctcatagctgtcacccccttgacacctggagcctggcctggccagcgtgctccagacagtcttgtcttcaggaaaatgctggggtgtgagatcccaggaagccaggggacacaggctggtctcccacctactgcccccgactctatcagcacccagatgcagagtgaggctccagggtccctccttacacacggggctggggtggggacctcagccctgcgggaccactgacctgcggcagctgagcagatggccagcctggcctaccatccagctgtgcctctgttcaccgagacaccctccttcagaaacggaagctctgtgggccacctatcatgccacgtgggtggccatcgtgggaggggtggggacggtgggcgggcatccacatggcaccgggggccctgcagagggctgggggcacgttcccaagtggaagatccaccagcactggcaacaacacctcttggccacactcctgacacggcaggtgcatcgccaagctctccccttgattccgcgtcaccaccatgcccaccctgtgtggacaggggaccatggtctgcgtggtggccccatttctccccctgctccaggactgacaacttgctggtcaccacattcactaggcctacctcagcatcagcgcttctcctgggaccacccgacccactgactctagtgaatccccttagccaaggcggtggatctggggccaggtgtccagagacagagcccccaccctaggcgcactcacccttcccgatctggatgaagccgagcaggatgatcaaggccagcgccagcagcttggcagcggcgaaggcgtcctggacgcgggtggcggccttcacgctgtaacagttcacggccgtgagtagcactgtggagagagggcagcgagtgagtgctgtggaaacgcgggcagaggggcaggcactccccagcccctttcccgggtctgaccatctggactctagaagggagggaaccccaggctacaggctgagcacaggtgcccccaggctgccataagggaaggtttcctgatggatagatttcaacctcccatggggaatcaaaacacctccacccgcacctgagtccctccagggggcgcccttgagaagcacaagctgccacgtgggggtgggggtggtgtgtgtgcacacagtcacttttctgctcccacctgacacttcagcacaatttatctgacaccctaacctctcaaggggggaaccctctcttcagagggtcctcgtaggatcccttggggacacagaggatgagacctaagcctgacaagtcggcaggggggagggtgcaagggaggggctgaaggagacctacagctgggggtcccagtggttagaccagagaaccagcccaactccgctgctggtgtcgaggcaggtacagaagaccccaccccaaggcagtccccacggtggggtggagatgtggggtggggacacagggcaggcaagctgggctccacaaactcaacaacacaggcaggccccacctgggacccggggagaccccagacctgagcaggggcaggggctgagtgctcaggggcctggcgagctggcatgaaggcagccaactctgtaaagtcaaaagcaaatagaatgagataaaaggaaggaaggaaccagccctaccggcg

SEQ ID NO: 39862 - DNA, 1820 bp, Bovine  19866880445171
  misc_feature (1)..(1): n is a, c, g, or t
ngagctggagcactcagacgagctgccttcccgggccgtctggtgaggggcctgctccaccttccaaccgcagcgctgcggagaagggacaggtgacagtccaaaggtggcactgaggtcctcgagctacaggacacgacgctggctgtgccctcctctcccgcccacaggcatgcctgtcgcgcttgtcttcgcatcagccccaaggaggcaggtcctaccctggccctatgcacacagggttgaggctcccacgctcggcagatgcacacacagccgtgctcagctccccaagcactcaccacagaccaggagaaggacccccccaccaccaggtgctacaaaagcagccctccaccaacacagagacctctgtgttctgaggcccagtgacacaagaccttttcggtcaaacaagtaccaaaaagatgcactgacagttttttcttcctggttcctgtcactcttgatgtttctagtgcataaggaaaacagcagaagggctgttaccgtggtcctccaccaccccctgaggagaggaaggcagggggaaggggagaaggctggtggtccggcatcaaggacttcagggtggacatgcagggcagcagcctagggccacctctctgcacccacgtgaaggggagagactggcatctattttcacatttcctgttctttccctctcaccagagcagttcctgggtctaaaccttttgcccaaacaacttcaggagagtcacctgtctccagctgcaaacctaaggtcccttctgtttgtctactgcagaaactataagagctaaaacgaggaaaagtaactctttaagtactaggagatggaaatggaaaagtggtgtgacctgaggtctgacccttgccagaagggtcccgggtccaggcgcacccggccccacccacctgcagcatggctgcctcgcactgtctgcacgggccccacgtggctggtggggggcacgcgggccactccgctgctgctgaccgggggaggggccgaggggttcaggcaccgtttctctgacttctccctgtgtgacaggaaagcacaccaacaacccgagtgttcagttctgctgaacaaactcccaatgcttcacagacgctacttaagtacacatgctccacagaagggtgatttccgtcaaaataatccccagggtagaagataactgacttgtcagattcactctaaagggtcgtttctagcaaaccaaagccacatttgtagagttttaagagtattaattaaggtttaagagtattaattaagccaccagcagtaacaagtcctagcatctgtccctcatgttagaaactaaaatgaacacatttcataaacaatctcacactcacttctccagctccagttgagtcttgagttttttctttgctcccatggtgagggattcaaatttatttagatcttcttccgtaaggctcagaaacttccacagaagaaacaaattacaaagttactgagaattaattaggattctgaaaacaaagaacttggagtttaacttaataaacatattcaacctctcagatacgtaaacccataaaacttaaccagataataaaagacagggaaacgctacaatatttacttgctaagtgacttggtgtccagagtccaaaatacaagacacccactttacacctgagagtcacgggctgtgtctcctgagccttcggcacaggcgtctggaccacagctgggtgaacgtggggccctggaaggtgcgtgctgtgcgggcaggtgactgggacagtggcctgcggtctcagctgctactggg

SEQ ID NO: 39863 - DNA, 1301 bp, Bovine  19866880543268
  misc_feature (1)..(1): n is a, c, g, or t
ncgggctggtcagcaggagtggggattcaggcttggcccagtccttctgggtgctgttgacgatgctaccctgcttcagagattcactggctggagccatccctgcttctgcctccacttagaaccatgtgtccttctaagcgaggttcttttctcctcctttggaagggtgtctgcttggaataagacattttactctcgggtgtgggcctggcagatagccacccgcgagcgagttagcgagcgggcatcctcgctgcctcagtaggagagtgcggctctaggacaccccctgggagcagcaatgccacctgcgctcaggggatccccagtgcccttctaggaccgcctgccatctggcggcctctggggcccccagatgatggggggcatgggagcgggagggcctggtgcacccctgctctgatggggccgctggggctcactggtgaccctctctccgtcttacggaacactcaagatcgtgaagaaggacgagttctccaccaagtgcaaccagacggaccaccacaggatgtctggcgggcggcaggaggtgaggccaaccctgctgtcccggggagtgacgtgagggtggacatgtgaagggaggccgcctcccggcctcatcctcacggtgtggatgtgtgtgccgggctgaggataaacacgctgagtagaggtggttctctgactgcttctccatcgcctctttgacaagaggcccgagggctgcggggtctcattgcaggtgtgagttgcagggagaccagaggctttatcagggcgaaccccttagagccagaggctgggctgcctgaggtgctggggggtccgccccagagtcctggggtggggagctcaccacctggcccatggtcactcggcccgtctcagctgcccggggtgtctctgctggctccttgtgctccatctctccacctctctttgtctctccctccaagtagagagttagaggatagggttcttttgtggattcacttgtcagctgagacatcccccactcttagctgtcttgctgacctagagagtggcttcaggctccagggggagaggaatcctgatggctctgaagataagatgaaagcctgagccaccctgtgctctgatggttgataatcacgtaaaattctggaccacagtggtgcttcccaagggagtagaggactcctggtggcctcagagggctggagggtaaacttatcactgtgcttatcactgtctccaggcggagacctgtcctcggctctagccccggctcctgcggctctcacccctcc

SEQ ID NO: 39864 - DNA, 1413 bp, Bovine  19866880708577
  misc_feature (1)..(1): n is a, c, g, or t
ntctttatcaccacttcacactggttctgctggactgacaatggcagggatttttcagaactggggttgatgatggctgaggtccccagatggactgtttgtggaacgcagaagccaccaagaggtctattcccatgagctaagggcttgctgacacaggctgcctccctggatgctgcctagctcaaccagacaccccaggatgggtggtaagggcaggaggagccatgcgctgctcctgtgatgggtgtccccacccagacgaaccacaccatcacacccgcgtctttcatcaattctggtaaacccccaagaaggcaaacagaccagcttctcattccatccaatgccaaggcctggcatcagtgggctctgaatcgtggtgctaggactgccccctggctgtctgtgcagttgtagaagcagcagtggggaatgagatcctgtcttgattaaagtggggtcagcctaaggcggcttgctgttcatcatcttgtttggctctgtggagcatgtgctgtgattaagaggcagccctggccacagcccacgtctctcacatctagatgaggcccgggcagatcacaactacagaaaactgactgttttcctttccagagcaagggctgaccactggcttagtgggggtggggcagagaggaaggagggggggtgcacctagtggcacacggataagaacgcagcaaggctgtacaggacctcagtgtgttcacagaggagcagaccacacacctctgtccatgtctcatctaaacaacagaaaagactcacgttaaactaacgtgcaatcttatttgaggttctcatcgttggcaagactgaaagcacagcagacagaagccccgctgtgtcccgcacgtcttacctgttttgagtagccaccatagatgatgatgttgccctgaggggtgatggtcatctggcagcccgaccggggtgtgggcccagtcccggatggggacagcttgctccatgtaaaagtgtccaggttgaaggcatacacatcattgtaatagatgtaatctctgttgtaacacagggacaaaacaaaggggtggcaacatgaaaacgtgaacttcacttaaaataaaggtgcctttcctacacactgtgccttctgaggcattccaaaaggcacagtggccctgctcacgccatgctcccgggacttcaggggcaaagcactcaaaacacagatggggccttgagaagaaagacgaacggggcagggtgggtctgcccaagtcacacacggggaatggtgccctgaaggcaggtcacaggcagccgtgggcaaggggctcgggtcagagtcacatgatgagaggtgggcctgcttccgcaggaaggacacacggacatgcggaaggagcaagcggctccaccgtcgga

SEQ ID NO: 39865 - DNA, 2239 bp, Bovine  19866880828724
  misc_feature (1)..(1): n is a, c, g, or t
ncctcggccaggcagctcagtgctgccccatgctattcagtcccccttgccccgcacacctgcctggcatggcagccttcttctgcccctcttcttttggcagaagacaagctctaggagagcagggctttagggggtcatttgtgatcttgaatgaaccccaagcacctggaatcacacgcttggttatcaccagtcatcgaccgaactcagtccctcgtccagatcagaaggtgttcatgcactgatcaaggtgcccttggggaaggcgccctgagccctggtctgtggaggggacagcgtggacgcccagccctcaccttgatgggccgctccagctccggtttctggtagcgaagccagagcatgccagcaatggccagggccacgcagagccagttgaagaagctgaagaagttgatgacggagaagatatctttggagaaggcatagagcagggtcatgatgcactgcaagcagagggcaggccatgagcctcaggatgagccagggggagggatgaccgcacgcaccccttcttagcagaagaagtggtccgcaccacgcgagggccctcagagcaaagggacgtgctgatggcaggtggctgaggtcctgggcttcatggaggtggcagaggccatgtctaccctggtcgagaggtttggcttcaagtgcctctatgctgattttagatttttttttttaacaactaccgtgtattaattctggagaaacaaaaaactgtcttatgctctctggcatccaggggcgcatgtgatgaagggtactacacttgtgataacctatctacatctcatctcagcctctgatccccagcctggctgacaccaggtggaaccagcaaaaggggtccccagacagggcatgcaccaccatctcaaagcccccgtgatccccaagggacacacctgtcctccacctgccagtgaccccctacgtggagggcggggactcaccgtgaacaccagtgagggtacgggcgtcagcagccgtgggtggatcatggagaggatggagggcagatggccctcccgggcccccacgaagaacagcctgtggacaagggggttggcggtcagcctcggccaagggacccaggcaggtgggggtggaggggcctgtgccgtgggcctcagtgtccctcgtggacggctgctgaggggtcccatcagccctggcccagcaaggtccagatgaacccacgagggtctggatggacagggtagctgtgtcacctctaggcagggatttgcgttatttccaagtcacgtgaacatcctgacggctacattgttactcaaagtaacaagaaagagaaccctcagaactcacgtgaggaagccatgtgcagtgtcgacccacaccctgtcctgctctggccccacggggcccgcacgacagagccgccctggccgggctcacctggaggacgtgaagagggacccattgaccgagccgaagcaggacaggcccacgaacacggggatgatccaggacatgacgcccaagtggtagttcccgaagtcctggatggacacggaccgtgagccctgcctccgagacacccccgccctgcagtcccttcccgagacacccccggccccaaagtcccctttctcatccacacgaccctccctgaggagctcagtatttattcagatggtggaccagcctctgaggtggggctggaggtgtgtaatggactcagcccctcagctccagcaccgctgagccaatctaaaaccgtccgggcagcctgagcaccagcgccgttaaagcctcctgtggtccccacgcgcagccagtaccctgcacgcccagcaggcctggcaaagcaccggctcaacccctcctggtaggaggatggtttgcaaaggaggagccccctctgctcctgtctgagctcggagggcagggctggcatcttaccacggccacggcctccgacgtgagcatctgttcgggggtcagtgtggtgaagtaggccaggttcgtcagcacgtacaccagggtgacgattgggagcgagatgataatggccaggggcaggtttctgagaggaccgggcgggcatgtcaacaaaacaaggcccagcacggggccagccgacccctcagtggctgagcccacatttcactgcagggggagcggcacgtggctggaaggcggtgcatggggcagggcagctgtgcaaacatggccagcaacccagccc

SEQ ID NO: 39866 - DNA, 1190 bp, Bovine  19866880936906
  misc_feature (1)..(1): n is a, c, g, or t
ntcatccccagccagcaagtgcaaatcactgcagccgtgtgtctgtaacaaacttcactgtctctagacccctgggcccactcatgcactgggaggaagctgtcctaaaaagataaccagtgatacaaggatttgtgtgcaagaacgttcatttaagcttcaaaagaagaaaaacaggcaagtccctggtggtgcagtgggtgggactccgggctttcaccactgagggcatgggtttgatctctggtcagggaactgagatcccacaagccgtgcagtgtggccaaaaggaggaaaaaaaatatccagcaaggttaatatttaaatacgtaaatgtacatccatatgattaaatatcatgcagcctttaaaaaacaacttcagaaaatgaaaggcatggggaacactcacatttaggtatgtgaatgtgtaacatagaaattgtacagacacatacattataggcattggaaaaagaagaaaatatgccataattttaatagtattttttatctgagtgagtaaaatatattttttgttttctaattttttagaaattcatgcaaacaacatgaaaaggtcaaacagaagcaacttctaaaaaacggcagctgctcatcccagtggctgccctgtctcctagcaggccagtgctgtcacggagctgtcagaggtgctgagaagcgccgacaggaaaccccgccactgggggcaggccggtggagctgaagcctggcgggagaggagccagccaagcaaacacctgcgggaggggcttccaggagcaggaacagaccctcaactccagcatctaccgacagagtccctgatttccaacttgtcctccaagtgccgcctctatagcgggaagaacaacgtgctgaatgttgatacttgtaagtcaatgggaaaaaacacataaaatctgaacgaaaagtgatttgtaagcattttactaaagcagtgattacgtgtctctaaaaaaccagaacaagaaaatagatagtttaatagtgaaagctatttgctgacttaggacaagtgaaagccagagctaaccaaaaaccgttttccacataaaaacattccttttaatattccctaccctagagctctgctcattaaaaagagagaaaagatgggagaaaaaatgattactgctcaaaaatctcagcacgagataccaagta

SEQ ID NO: 39867 - DNA, 1548 bp, Bovine  19866880968485
  misc_feature (1)..(1): n is a, c, g, or t
nctgcagcgtaggacatgtcccccgactttgtcctcgattggtcctctcagactgtctgccccctgtccacctagcctgagagggcctctccctttcctccacttggtagtgggggcagctccccaagggcaaccgtttttttgcacaaagggggccacatacctgccaaggccctggtgaacacattggctctgtcccccaacagtggtgttggatcgaaggcggagcccctctgcagctgacacaggcctcttgcctgcttccccacctagcagtcctgcagaggccaggcccggccttcctgccttggacaggttccccaggcgccagggcgacctcagtgccctggtccacctggctccctgcttatggggggtgctgtccccgtgaggccaggcgtggtgtaggcagtctgggctgaccttatgggacccttgctctccccaggtctcttgccagtgtgtagacagagggtggagtccgtgtgtagacagactgcctggcaggaggcacagtgtttgcagagggggacgagtgtccctgggcccctggctgtgtgtgggtggggctctctgcccagcggctgtgtacctgtggtccagcctgtccacaagggccctctgagaaggcaggcacatcttgcttgttagtggtggccatggtcttcctagaggcgtcaccccccatcagccgaccgtgggtggggggcagggttccctccttgtaatgtgggaacctgggagtccaccctcctctgaccttgagaagcctgcttgttcctgctcacccgccggctcccgctggtctttgggtaattactgcctgctgcccggtgctgagctgggtcagtggagaacgcagcagggtcccgtttctcaagaggccggtgtggctcagggaggccagcctgggggaacctcaggccctggcagacagcagaaatgctgctcaggcagcatggtgggccttttggatcaagaaggctcagctaggcacagggctgtctgggggtctgtgggagaggccgggtgggccccagggaaggccagctccagcaggggcggagggagggctccaggggtgcccgggtcgtgtcaggtgtggacgggaggagacacatggaggagactccaggctccctggcgtcagctgcagccccccccggcaggttcatctggccctcccagtgttcttcatcctggcctgcctcttcctgatcgccgtctccttctggaagacccccgtggagtgtggcatcggcttcaccatcatcctcagcggcctgcccgtctacttccttggggtctggtggagagacaagcccaagtggctgctccagagcatctgtgagtccctccctgcctgctgggcctcctctgtcccccaggggtctgttccgcccacctggctgtgctcctctgacctcagtccagtggccaggagcagcacagtggggcagtgccccccgccgtgggtcactggcagggttggggggcggtcagcatcaggatgtgcgaggtcctggctgagaggcccgcagtggccaa

SEQ ID NO: 39868 - DNA, 1115 bp, Bovine  19866881138949
  misc_feature (1)..(1): n is a, c, g, or t
ncctgttagcttctgatttcctgactgtcaggtggagacgccaaagctacctaactcaactggctgtgagaaagcccagggagcacaaagcctggaggcagcaaacactcattaaccattataaactgtcctgggttagggaatccctgagcaatagtcaattaggaacagagcgctcgcctctaagtttagtactgagtcatctgcagaccctgctaaagacgtgaaaagataaagagggtaggagaggaaggagggagggagaggaagggagagacagagggaaacagggacagacacagagaaatatccctggtcaccatcaacagttacggaacttcccacagtcccactccctccaccgatgctcactgctcagggctgccctgagggtcacgtgccccgtttaaagcggaggattgaggcttgcagaggtgccccggatcagcccggccgccgccagcgccccgcaagggggggcccggatacgcccgcgaccccggacgaaagaagcctgcccgccccccgggcccgcacacctcctccttccgcgagcgcttggacactttcttctccatcttagcggccgtcttctccgccccgcggcccttcttctctttcttgccctttttgcccatcgcgccggatccaaggaggcttctgaaccgcctgtgagactctagcggcgcgccgcgcgcggcgcgcaggaaatacgtgctggggggcgcgtagagagtgcgtcacttccggttcgcctctcgcgcgtttccgggcgaatggtggggcctgttcctggggatggctgcttccgtagtccttcatggtccgtttatacaaaccggcctgggccttcgggctcggggtggtgtccgcctagaagcagcgaggccgcgccccgtcctgttcccccttcagctgtgccggggacgcggcgcctgtccctccgccgtgtttgttcaacagtgctgagccccgtgcacggtggcttagttggcttactcggtagcacgaacccttgagcaaattaaatggttgctgtggcttcctgccctggagagacggtcatgctcttaaaggattcgcagaccccgagcgaaggtgtaaaacgcactaga

SEQ ID NO: 39869 - DNA, 1075 bp, Bovine  19866881273449
  misc_feature (1)..(1): n is a, c, g, or t
nctgacctttgtgattattgaaaacatagatggtgtctttatggcctcttggttttttggttactgatctgtgagattttattatacaccaggattattgatgctatctatcttcttgattggtaatttgtttttaatattcattttgggggggttttgttcttgtttttctttttttgatgcccaaagtttcaaattatggtgtcattagatctgttaactttcatgtgttttagtgtttatttttctgttgagtctctgcatacattgagatcagatacttactgatattttctgttagtttgtaccttctcttttcttaaacatttaatgatctttggatttattttcatttttttgtgagtaagaagtctaattttgtgcctgctcaggcccacacaaaataatcaacttattgtctccactcaatttattgaataactcattctttccagtgtttttagaaatgaaatatgtggataattaaaaaataagactgtttgaacttgtgttgaaggtttgaaaaggcctctgtggagtaccaggagcacctgtgtgccatgacaggtgtcgattgctgcatctctagcttcgacaaatccgttctcacattggctaatactgggcgtaatagtgccagccccaagcattctttgaatggtgagcattccaagtttaaacaaacagttgtagtcaaataatttgtactcatgatcttactatacatttttagatatctctgctctttgaaatatttataactgctttggatctctcttgctgtctctttattttatgaaatgttttcacttaggtgaatccagaaaaactgtgctttccaaaccaactgattcttctcctgaggttataaattatttgggaaataaagcatgtgagtgctacatttcaatagctgattgggctgctgtacaggagtggcagaatgctgtccatgacttgaaaaagagtaccagtagtacttctctcaacctaaaggctgatttcaactacataaagtaaggatttcttttcagttatgaattatacttaaccccattaaaatttttttcagtaa

SEQ ID NO: 39870 - DNA, 887 bp, Bovine  19866881476798
  misc_feature (1)..(1): n is a, c, g, or t
nctttgactcacagacctttgttggcaaactgatgtctctgctttttaatatgctgtctagattggtcatagcttttcttacaaggagcaaacatcttaatttcgtggctgcagtcaccatcagcagtgattcatgaagacgaaccgtaaactgtagactgaagctcagttccctgaaggaaacacacaggcttctgtggaggtgaaatggggccattctttagatagggaaaccaagaagcctttctgaagccaaaatcagaaaacttcttggtcataggaagagggagtgggcagggaaatgggggctctcagtcctggaggctggaaaactggacagctttggctggaatcctgctcagtcattatttttcctttggccaggcacttcacagagagagctccaagctggtgtttttttttgtttttgtttttttaatttagtatttatttggctgtgttgggtcttagttgcagtatgggagatctttagctgcagcatgtgggatctagttctctgaccagggatggagcccaggccccctgcattgggagtatggagtcctagccactggatcaccagagaagtcccctccaagctggcctttggggaagctgagtgggtaagcccaggtcacctgaggagttccctgaggtcactaccatgagctgttcaccctatagcctggtgcacagagtcgtgaaattccacatgggggtctggctttttgttttttctccctggcctgtgttttgaaattgctgggtggtactacgtttataaacttaaggagtttcctccaaaatgaaatcaatactgtcagccctactttatgggagaatgatttccaaattgcacaaaatgaatccctctaatatctgcattt

SEQ ID NO: 39871 - DNA, 1090 bp, Bovine  19866881724879
  misc_feature (1)..(1): n is a, c, g, or t
nggaaagaaaactaaaacaagaaaaaaaaaaaaaacatttgttttctttggcacttttaaagcatttcttcctagttttccaaaagttcacttctttcaacccagccctctatctttgttctggtcctttgtttacattgaaagctgtcttcacttgtgcttcccagaaatgctgttttttggggttatttttggtgaagctaatttgccccatgtgacccacacagctcaaccgagcgctgtctgactcacgctcacaagcagagccgtcagcagcctgacggactcagaactgagccctgcttggtgccggggtcgcttctgctgctgccgggaggctctgggaagacgtggtccagccaccagcccagcgcaggcctgacggatgttttccattaggctcacagccccacttcctgccagtgcccgccgactgacgccctctgggccagtcagctccttttccaccttcccagccgcccctcctacgacccacggggtctggctcctgacatctcccacggcccttggctccatccactgggcctccagggcaggaagatggtcaggatacactggaggcctctgtcctggctgtgccctgggccagggccccctcaaccatgtctcatacacagctcgggctctgcagccgtggccctgccgactgagccaccaaggccaagacctctttccggcacacgttcagcttcctccactgcactcacctcgcagggtttttgtgagatttaaatggaaagctttagaagtagcgcgctggaaagacagtcaggactcagtgaagtggcagttgtagcgacaaccagggcacgtgcaggccagtcgggaaggcaatcacacaggttcacgtgctgacacacggcacggcggggacactggaggggacgcacacccacagggtcccgcagagaagctcccctgggcggccgctcgaccgcaccccgagaggagcacacaaagctgcaccactgacctcacccagggatgcagtccaggcaggccccggattccacatccccgtcttgggaacctgggggctgccttctcctctaaagacactccacccaca

SEQ ID NO: 39872 - DNA, 782 bp, Bovine  19866881764041
  misc_feature (1)..(1): n is a, c, g, or t
ncctcttcagttacagagaatttgaagggtcttaacctaggcatgcttttgaggatatacaagtgaaggaattctgaagtatatgccaacatgtactgtaattttgacagtcttatgaaataaaatctggttatcctttctcttctgtagtagaaaggatgaaacgaagacctaataaaacgtctcctgggtccagagactctggacccagaagggtgtcctgcatgctgtcctgtacacatttacagagggagccctgctgccagggcccgggactgggcccgccgttggagtgccccctggcagctgagaccacaggccccgtgttgtgggcccagagagactctgttcatacagtgtagtacagtgtgaatgtgggaaggggctccaggaaacccacgaatcctgccaagaactaaactgaataaagcaggaagatgagaggttaaggtgcttctgtttagtttttcctgatacaaatgtctcttaattgaaaattaaaatttctctcccagttactttttggtaataatacattttaatgctgaaaaaaccactctgtttgttttttaggtatttggcttcgttaccttctcatgtgttaaaaaatgaccatgttaagaaatttttcagcacttcttctcccacccaacagcttcaaagtccaagtgagtttgtaaaatgtaattcagtaaaagtagaaatatttttacggtctgtgaatgaattattctcattttaacttgtaggtcctggcaacccttccctttctaaagtcggta

SEQ ID NO: 39873 - DNA, 2964 bp, Bovine  19866880506510
  misc_feature (1)..(1): n is a, c, g, or t
nctgctgagggtttaattctacattatttataaagcagaagcgaagtccaactgctctgaggaaggcatcacagtggtgagacgccagaacttcttaatcctgtgcagccaactgtaccctccagatggactattggaatcaattgctgcttctttgggtgagcaccagatgaaagcaggggctacatttagaggccaggttttaagagaaatactcacttttttgcctggaacaccactccatgcgggaaggcaagaggcaggctgggaaccgggataagcagagccacgtcacccgtctcacattcactcactctgcagtcgcgccgtacaataacgccactgtcactagctatccaaatctgaatgagctcggtccctcagtcacaccagccacaatgcaaggactcaactgccacctgtgcctcctggctactatcctggacagcacagacccagagcactcccatcatgcagaacgtctactgtctagcagacggcactgggaaacaagcactcgctgagctgaattcgcctctgctccataggtacagacctccacaacattattatggtctccgcggaaagacagccctgaagaatttacatgatagaaagtgacagaactggaactagggcctcaagcacctgattcagtaacattatagacccaaagatcaagaaaatacagaatggtatgaacaggaggagggagaacaggggatctggctgatcagcagaaagatcctgtctgtgaagaactgaggggttcagataccagattagctttcccagagacacaccacaatcatgaggtagaaaatccagtacaggtcagccatgacccctctctgcttttcagaggactccagacaaggattttgaagcctggtaacaaaaggaggtacaaggaaaatgagtttcagatctgcctatgctgcccagggttttacaacctcagggcaatcccttcctctttctttcttctacattcaaccttcatggcaattatctctgtaataccctcactgttctgaagccttcagagtctaccaaaggtataagcttttaacttgttctgcaagtttaaaatagtctgtttcagccttcagctatttctaaatagagttgatgatggccctcaaaccgtcagggttgagtttggaggaaagttggaagtgtttgtaggttgatgacaaaatgatgctctcatcacagaaaacctaagacaacaagagctgatctgctgtgtgacctggagtaagacacttgccctctctggggtctggatctctctgcctaatgtttaaccacacagtggtggctccagatgtttcagttcaggtgagcaatgggatggaaacagctgaggcagtcatcagatctgggccttggaaaggctggtataaggggtgtggttaagggtcgggactcaaaatctaggctccaacccaccactgaccagtcagttacttaacctagttaagacatcttccctactgctaaatagggatggtcaaatgagatcattcaggtaaagaatttggagtactacacacataacaaaggcctcataaatgttagctaacagcattatccatccctgctcaggagcaggctgcgtgtgacttggggtgtggaatcagctcccattctgagcctaacttcatttacccatggagtaaggtgacttcattaacactggataacttgcattgcacttgactctgaaattttaagcaactgcacaatgcagatttagtcacttgggaatgtgttctggaatatgtccctcaattcactgtctgggaagtaccatgtgctgctcccgagtgatacagctgactgacaggattccatcttagaagacatggtcgggccaaaaatgtaacttctagcccccctgcccccgactagggcttccctggtggctcagttggtaacaaatccgtctgcaatgcaggagacccaggttcaatccctgggttgggaagatcccctggagaaggaaagggcaacctactccagtattcttgcctggagaattcaatggacagagaagcctggcgggctacagtccatggtgtcacagagtcagacacgactcggctactaaaccaccgagtcgctctggttttgtactataaaaggaagtgtgagttattcctcctggtccccgggatgctccaaccactgaagagaaagcaggcgtttatgctgagacaataagtccctggaggagacaagtcagaggacctgcccggcccctcccagtgctgagggtctgtcctctcctttcctcttgcatactagcctggaggacagatgggtacttcatgatatgagctaaatggagtcatgtgctccactctgataagaattaagtgaaaacagaaagaaacagaagcttgcgagatcagaatcttttctcagactggatggaaatgttccatttcatcatgactttaaaatagcaacctgaaaacttgttcttgacttgactactgatatacaagataagtatgtttaacacaaatgtccttaatagaggtattttttaaagggcaaaactttaaaaagccaggaccacagggctgcaaagggaggaccctcttcctgtcctagcttgaccagatacacagttgaaccctaaatgcagcccgacactggagaaacataatgaggggagaaggcaggaagaatgaacttcccattagttaatatgctgggggaggaggaagggagagggacccaaacggaggacctaataaccaaggcctctgtttaccaaacaccaggcaaactcagttcaattcagtcgctcagtcatgtccaactccttgcgaccccatggactgcagcacaccaggcttccctgtccaggcaaactagatttcactaattccagagatgggaatcaggtactcaggaaagatatggaagcaactaaaacctcttctaaca

SEQ ID NO: 39874 - DNA, 3063 bp, Bovine  19866880601471
  misc_feature (1)..(1): n is a, c, g, or t
nctctttgcgaccccatggactgtagccctccaggcccctctgcctgtggaattcttcaggcaagaatactggagtgggttgccgtgccctcctccagggcatcttcccgacccaggtatcaaatgcacatctcctgcgtctcctgcattacaggtggattctttaccagtgagccaccggagaagcccattttgccagctgctaccccgcatagtattttgaaataaatcctagatatcaattcatttcatctgtaaatatttcagcacgtatctggatatatacttctttttttaacaaaaagcccaaacctgaataatttcatcatgcttcaaacaataaaaatttcttaatatcataaaatatccagtgttcaaatttccagttgtcccataaatgtcataaataatataattatctctttttcctcctctccttcgtttttttttttttttttttgctagcaactaaaatacacagagtgcttcctagactcttgatactattctaagcgcgttacatgtttattttctacaatgatcttaggcaaaattgcttagcttcaacaagtgcctgtattctcatttacaaatgatgttaatacctcatatacaaggagacgatgaaatctgagagataatggagcttaatttatctctttttcttttttccagtttgtttgcaaactgtattcaaagaaggccccggcaaatgactggtgtctttttttttggtggggggagagttgagcaggttttagctgtgacatgagaactctcagttgtggcatgtgggatccagtgggctccagttccctgaccagggatagaacctgggacccctgcattgggagcgtggagtcttggtcactggaccaccagggaagtcctgattggtgtctgttaaatcttttgaatttgagaatccagctccatgtagtacgtgccctttctctgtctctctttccctctctttctttctctctctctctccttgttgaaatcattcattgaagaaaccaggttgcttgtcctgtagagttttctaccatattaatctgcgtgcgctgccataacaaagtattccagactgggtggcttaaacaacagagatttatttttccagtcctggggaccagaagtttcagatcatgttgccagcagggttggcttctggtgagaactcttccagacttgtggacagctaccttatcgtgggtcatcatatggcctttcctctgtgtgtacacgccagaagcaagggagagcactggtgtcttttcctcttataaggataccagtcctaatggagtagggctccactcttatgatgtcatttagcctgaatcacctccttatggtcctgccttcaaatgcagccacattggggtttagggcttcaatatgataacagagggagaagggaaggagaggactcagttcaatccatttcacacacggtctggattttgttcattgcatccccatgatgtcatttaacctattcttctgtcctctgcatgtttggtagctttgtaactaggtctagatgcttgatcagataaagatttagtttttgataaaagataatttcataatagaactttgtatctccatctatattactttatatacacgaatttcacatttactgaaagtcttatagtttaattatccaaacacagaactcaattcctcaaagtagccaaaatacagagtatattttcttgtataaccctgtcacatttttcaacggtaaaatcacaaaatacgatactgagagctcgtgtttaatgagcgtcatgcaccagacctgtttgttcttcagaacaagcctgtcatgcaggactgttgtttcctaattttgtcaatggataaaataagatggtaggaaatcttattaaactgacttttaaaaacatctcctcaaatatttcgtcaagtgttaagtgaagtcaattctctttgggaagagcttcgatgggaattgggtggggcattaaatcaggagacaatctccgtaggagagagagagcaggtcgtcaataaatattcacccaacctagtgacatgaagtctcaccacagcagtttggttcctggtgagactgaaatacaaaatacgtgcggagagatactttccccacacccttttatatgtttgagttcctactacctgcctatgtctccttttacttttaagtattttcaccgatttttagcaaaaatccttatttgattggacttattaaactgacttttaaaaatatctcctcaaatatttcgtcaaatgctaagtgaagcccttcgtggttataagtttagtttttagacagtgattactgtatatgggattctaaaatccactttgtggattaactccattaattctcacaacatccctcacaggtgggtactattattctccccattttgtagatgagaaaaatgaggtcagagaaggggatgaacttgcccaaggtcagccagccagtgagtgctggcatctagatttggcttcaagccgactgactccagagtctgctctcacaacctcaggggcctcacgcgccgttcgcacccaggggcctgacgtgcggagcccacagcccactgctcctcaggaggccctgcggccacgaggccgcatctggctcccacggccccctcagtctgtaacttctcatgctcgtcacccagcatggttcccggccggctccacaccagagccacgcacattcacacatccagacggctggcctctcagacataccaggaccctgccattcgccagtcttccgtattcctcacagcagggaagcctctttggaaaaagtcctttgggtcggaaaactcagagccaaggacatgaatgacgcgggatcggagaatgcagcccggctggtggactggagggcggggagggcggggagggcgggggcgggagaaccagctagtgatccgcgccggtccttcggtgtccggccccctctcctgcacacgctccccgccttcctctgcccggctctgcgctcaggaggctgatcccagggcaccgcatcag

SEQ ID NO: 39875 - DNA, 777 bp, Bovine  19866880647518
  misc_feature (1)..(1): n is a, c, g, or t
nttgggaaggtctagaggcagcttgtgcaaaggccctgaagcaggagctaaataataagcacctgaggccctggggatcagaaaagtgtgtttggaacttaggaagccaggatgatggcaagacatgaaattggacaggaaaattgggttgaattttgagtgtaagcaataatcattagagttctttcaacattaaaaagtcatgctgggacttccctgatggtccaatggctaggacgccaccctcccagtacaaggggcctaggttcaatttcttggttagggaactagattccacatactgcaactaagacccagtgcagccaaatattaataactaaacaaattttctttttaaaacgtcatcctggctgctgtatcattgccattagcactgctgtgaacttctgcagggcaccatgcactgcgtggtcagtgtagcagagccccctggagttgtgcaaagtgcagcagccctgtctgtcctcctccatccccatgagcgttggaggatcctgaggctaaatgactttggggtagaaagtttttcttggggctttgatgatgtcaatcctctgtcatctttgagaagcccaaggggaactctggcccctccagggtgtctgcactgatccccataaacacttccttctccctttcatctgaaaggctgagcgtggcggcagacgcttcctcactctctcctcccttcaaactgacactctctaagcctttaagcagcttgaactccatcatctcagcgcccctggaagggag

SEQ ID NO: 39876 - DNA, 1203 bp, Bovine  19866880752237
  misc_feature (1)..(1): n is a, c, g, or t
nttcaaaaggaagtaggacaaggtgtcattcaaaatgatttgccttgggcaccaagaatcaccaatgcctttctctccagtaaattctccttcactgttgccctgtagacatcccggtcaaactgtaaggttgtgttaggagcttgtgtccaagaaatctttactagtgcagtatcttgatacaggccatcagaagctctgacgataagctcccgagagagtcccaggagagaaggatccaacacagatatgcgaccagtaatgggatgcacggcaatagcttcgtcagcattgccagttttgatgctataagtgacttctgagtcatcgtcactggcctgcagcataaggagctccataccccggtggattggcttcattattgctacttcatatatctggtccaagaacctgggaggacagtcattaacatttctgacgttgattatgacttgggcagccctgggtgcaaataagatggggcttccttggtcatggacatagatgtcgaatcggaaagagggcatgctttcataatccatctctaatacggtggttagagttcccatgctgggatcgatttttaaaaacttcagagtctctggttccaaaattttatagaccaacaaggaatttgcttctttgtcactgtcagaggctcggatcacgagggggtttggttgttttcatccatgatcatgctattcagtggagctgcttcactaatttggcccacaaaagtcgattttgagaacacaggagcattgtcattttcatcaatgatgtaaacaagaaccatgacatcagtaaatgtgcccgccatattgctgcctcgaattttcagctggtaagatgaaattttctcatgatccagtttcttctgagtggagatgagtccagaatatgagttcatggagaatacaccattcttgtttccctctcttaactcataggtaacttctgagaagcttgtagctgagatgaggaggattggggaacccacagggattgattcagggatctctacaaagtactcagagtttgaaaagatgggggcactgctgtcggaggggtagacgtgaatgatcactgtagccaggtcatgcccttgtggggagccttgatcttctgccttcactgttagagtataccgggcatgatttgcctgatcaagtttctgtgctagagtgatgatgcctagca

SEQ ID NO: 39877 - DNA, 1212 bp, Bovine  19866880816370
  misc_feature (1)..(1): n is a, c, g, or t
ntattggtttgaaatctttcaagagaaacctactatagagattagtagtaggtctcttttttgtcctccgatgttattctgtcacactgttagaacaggctccatatttatctagatactctatagttaaatcaggtttaaaacattgtaaaaggcagttttaaagacatttttaaatctaaaagtcaaattctgaaagaatggcagcttttgtctcttgagtcctgctccttcgatactggccatcactggggaatcttgccattggtcagctagctaggtacattgtacctgccgttatcagttgccttggtttttatttgccttctttttaaaatgctgtttttgctatttccccccctttgtaccaatagtgctgtcatgtgcctgtcaataatattttccaagtactgattcacagaatttttgaaaaaagaaagagaggaaggtagagataaaagagaagagtactcatctaaaaacctaccaccttttcttccagctgtatctgtgtggaatgtttatgtaattgtatcatagtaaatatataaaattttaaaatatttttctcactattatttcattagcagtttttcatgtactacttatcctgcattgtactttttagacagtgcataatagtgcaatagtgtggtttagttgatgtgcagtacactaacagacagatgttcaggaacatttaggcttgctgctgcttaccattcaaaggctttgctcaattttcttcatattttaatcatcttttccttgtcagattatatttctggggatgggatcacctagtgaaagaatgtgattctttttatatagtctctaacatttgagtttccccaaagcaagtagacttttcttggcttgaaggaaaaatagaaaggctacacacaaccccaaattatctctgagatgtcatagtgtcatactttttcccttaagagaatattagatttaggaaaggtttgaccggtctgatgctggggttgaaatcatgcatctctgtatagcctttgctctattttgttttctctctttcagaatatcccagaccccagccacctccccttggtggcttcctggaagacctaccctctgttctttggcacggccatttttgcatttgaaggcatcgggatggtaagagatgcatcgtgattctctggtgcccttggtgttcttaaggtccattttaaggaa

SEQ ID NO: 39878 - DNA, 1154 bp, Bovine  19866880828787
  misc_feature (1)..(1): n is a, c, g, or t
natgtggtttaataaaaagatgaatgaaattaaagttggacagcaaaggaatgagccctctgtatacataaggaaaaaggctggatcaggcagattgccattgaactcctttcatgtgaagtccactgttctgtatcacatgagccaactttgcagggaagagggcagccctgacagtcacatgttcttcatactttgggcaaaggaagaataagataccttccccagtgtgcgtggtttcggagccaggcgctggggttggcttctagtccatgcatcactgtatccccataatccataaagggcttattgaacctgcagaagagagtgcatacagttagcgggaggcagtttaacctaagatcacatactgaaaagtcaggagacacatagcaaggcagaacccagctggaatggaaagaacactggggcaggcacccaagttctagttcagacttttgacacctggtggtatttccctgatggcttgttttccttacctgtcaatcggggcggtgactacataacaagggtaataacacacatattgcataggtacaggtgttctcatatccatgattctattggatcctcacgacaattctctgaggcacagttaggcacggattgtttatgtccaatttacagatgagccagctggataagcacaatggtctgactgagatcagctaatgagtcacggaagagcctccttaggtccctgccccaaatgcttttctgtttttctgggccttgttgaaggacattaagaagtgaaatcttattacctgggatgtttctgggatgtctctgagacccaagtactgagggagttgacaagatgctgttttcctcacctgtggcagaagcgccgggcacacctgatcaggatgtgcatagagtggcaggagatgaagccaatggccagcaaactgagtgggcccatctggaggacgggccaaggggcaagggaagagaggagagaatgagtttgtgaataacatggagaggagagatttggtagcacagatattactcaggaatcagagaactttctagcaaactggtttgtgagccttttttagcagtaacatttattctttcttttcttttttctttcttggaagtatagttggcttacaatggtatgtatt

SEQ ID NO: 39879 - DNA, 1511 bp, Bovine  19866880845048
  misc_feature (1)..(1): n is a, c, g, or t
ncctggaggaagaaggcatggcaacccactccagtattcttgcctggagaatcccacaaacacaggagcctggcaagctatatactccactgggtcaaaaagagtcgaacatgactgaagtgacttagcatgcaggcagagcacattcacatcttaaaggctctgaggagtcctgtaatgaaaggacctgctcaatttgtttagctccatgttaagtatgagacataaacaattctattcctttttccttctgagtctgtggactttaagggacatatcaagcactaggagtactgataaaatacagctccctgggccccacctcaggcacaatgaaccagtgtctctgtgaaggaaggcccaggaagctgcattttgacacactccccagtcattctgattgagatggccccatgcctccacttctgtggatgagataatgctggtactcatctaaccacctccttccctcatttggtcttttttttccttgccactctgctcagcatgtgggatcttaggtccctgacagggatcaaatctgtgccccctgcagtggaagcacagtcttaacccctgggccaccttccctcattctgaaccctgactttggctggtctctgcctactctggcctcctgtcggggggaagggaccttgactggccccgacaacctcctggaccctttgtcacacagcatctctgctcccacaggtgaaaaagatccacgagaatgagaagcgcctggaggctggcgaccatcctgtggaactgctggcccgggacttcgagaagaactacaacatgtacatcttccctgtgcactggcagttcgggcagctggatcagcaccccattgacgggtaagaccccagaacctcatgatcacggaggggagctgcctctagcttggccctggagtgggcagtcgctggtcagggctgctaggtgcactagatgtggtcagaagacctctgctgctcccagccctggaggcccatagcttgcctaagggctgcgacaagagaggataggtgtaggagaaaggatgtagaaaggatttagtgccatgagacactccctccttactgcctaagaggcagaagccatcagaactgaaaacccctccttaaccccgtgagtgccagccttgggtatccattcagcaaggtagaaggagctgggaaggagcgccagactccgtgggctggcaaggctgaggtggggcagcaaggccctgagacccggccccaatggggcaaactggctctggaagttcttaagaccatcagagtgcccatcccgtctccatggcaagcctttggtttgatcactcctgccccatgttgaaatgagttaggaagtgctgtgtaaacgccctgtgggataggccaggagtggtcagccaaccaacatttattgagtgtctattacatgtcgagcacaattccaggcacgggatttaactgtagtgagaactaccacgtaggccctgcccccaggagctcacc

SEQ ID NO: 39880 - DNA, 1044 bp, Bovine  19866880862182
  misc_feature (1)..(1): n is a, c, g, or t
naggcacctcctgggggcctgaacccacactcgaagcccctcttcattcctgccctcctggaggatggggtggggaggacgcagggggctgtctgtgactgcttggacagctggaacgggcagaaaacaagcaagttcagcaagactttgatattctagctagagagctcagaactgaccacaccccgctccctgcagtcaacaactggaaacacctacaagaaactgaatgcaacaaataatgtcaccagtagaagtggacctgagcatcccctggttgggtccattcatcctcagctgctccagggagggaaatgaagccaggacctgctgccagagcttagtctgagggctaagtggctcctgaagcgcatgaagtttttccttctctccctattcaaagcctatctgttattaaaggctcaaataaagtcctttccagtccacagcagctctcttccctctggtcacccgtagctgttttcttcaccgggcattttgcacaggcagccccgtgtcactacagcttaccaatgcctgacatctctctgcagttcagagctgagcacacagtacgagaccctgataaaaaagcctggagctggatggaacctgaatcaccatggttgttcactctccccacccccatgttacagatggagaaactaaggcccagagagggcaaggggcttgcatgaatggcagctggggagggctggggtgttggctgaactaagaaacaagggtaagggttgtccctgtggtgtgtctgcactggcaggcatggaaggcagcatttcaactgatgaatctgagacgtccttcagcttcagcataattgcattttaagaaatcaaattctattttagctctctgggggcttttttttccccaaaccttaaacttcttattttgtattggggtatagctgattaacagtgttgtggtagtttcaggtcaacagtgaagggatttagccatacatacacatttatcaattctcccccaacccccctggggactttgtgattaaagaaattatat

SEQ ID NO: 39881 - DNA, 3330 bp, Bovine  19866880897408
  misc_feature (1)..(1): n is a, c, g, or t
naccttgacgacaaggaccagatattagttcttacacttctccagatgtgagctgcgcactcataaatattcatacactcactgatattctcataaatatttaactaagacctgtcatatcaagagttcatccacatcaaagtgaaccaggttgggacttcctggtatctagaggctaatctacttgctaatgcaggggacacaggtttaatccctcatctgggaaggtcctgcatgctgtggagcggctaaacccgtgtgccacaactactgaacccatgcaccttggatcctgtgctccgcggctagagaagccaccacgatgagaagccaaagcaccacaatgatgagtacgcttcactcatcgccagccagagaaagcccacctgcagcaacaaagacccagggcagccaaaaataaatacctaatttaaaaaagaagtgacccggactgaatgtagaatccgcctgcctaccccacttctagacaggtgatcttgggcaagtaacagcttcttagcgcctctgtttcctgattagtaaaatcagcatagtaacagtatctatgtcaagggtttgccgagaaaattctaagtcccaagtaaaccttggtcattgttatctctgtgatcgtaatatgtatcagcaatcaccttatctattctatactgatgacacagatttccccagctagatggccaaccccttctgtgtctatcggtggcacagctaagagtttgagtggttatttttagacagtatcccgagccatcagtgatgacgccatcaatggcagcttcttcagtctgtacagaggcaagtcctggccttgcctttgccacagatacaaccccctcgcagggctctgccctcctcagcactgcatgatgccagggagctcttgtaaagatcatcggtcagacactccagacacttgggcctcgatattccccttgggaaccctgggtgggtgatcccttgtcccctctaggcctcagttcccctctgaatgaggaggggactgttctagatgattcccccagcctttccagtcccagcgctctgctcggtcagtctgtctaggcaagagctccagaacccatgtggcgggcggggttgggaggcgggtcaggacagcccaccgcgaggagaggaggaaaggcttggaagacagagacagctttggctgtggggagaaggggaggggaggggaggggaaggaggagacaggaggaggagggaccacggggtggagggggagacagacccagcccagagactctgagtggtttcctgttgccaggctctaagcccctcacattcctgcagacctccagactgcccggagcttgcctgctgcctgcctgcctgccactgaggtatgtccgacccctgccctgcctgtccctcttctaggcctgcaccccctgcaccctggcccactcctcactttgtgtacaaggaaaagaagctgtgttgggaggtctctgggcgagggactccatccttgctctcctgaagggcaagggacacagacttgctgcctgttaactcctcaggtgaaactgagatcatgtggtctcccctttggatttgcagaaagtaatccgactgtctctgagagagtattttctccctgtccctctctgcgcctgtctctcgggtttcagacgctgcctttacaaatgggggccacctcttcctttcctgggaatattatctgggcacagctgcaagagggatgggccaccagagtctgccctgcttcccattccaggaggagaaactttctaaacttggttcttgcactctgttttcccgaagggacttggcctgggtgataaactgatctttggagggataagagggggtcttcacctttcatcagcacctctgtgaaggctcctgttgccctggaatttctcccctctcaacctccaccctctccaacacacacccacaccaattccggtgccattcagcctgaaatagcactgtcagacaatcagcccggggttaggcattgttctcatcccgggctccccagggtgtaaacacaggaaactcagcagtagtagccctccgtgtgtctagatttgaagacccctgatatccgatagggtccagagaggcgcagggtccgatgggagactgggtgtggtggtggtgtgctgcaaagagtgggagggagaagacaagatggagagggtttcagggcgaccttctcacacctttgccatgagaagttcaaactctaggctgctgttaggtcttcaggtaaagcccttcctacctatggcttcactggctggttcatgagcaggcttcctgagtccctaagagcaccaagtggaaaggggggccttggggaacgcatgtcttccaggaagcccagtccacccaaaaagaaacagaggggcacatgttttcctccagaaaatgctattctatgcagaacacaaagagaaagggttttctctgcggttgaatttctgtgcaccccaagtgctgagagaggatgagaagcacatctgaagtaggggggcagactgaagacatacattttacatgtgatcttaggtaaatgtctcccctggacttagtctccctgtctgtaaagtaagaggaatggactcaatgatgtttgggatgcccgacgtcttctgaactttccaatgaaggtctcttaaagcagaattcatggactagcctttggctagttttcgaggaaattgcaagccccttaaaattgtatatacagttgtgtgtgtgtgagagagagatagacacagagagaaatagagacagagttagtggcaatatccaagagggtgttcacagccttcagtcttaaaaatattctcaaatggacacctgcccctccaagtagccagagggcatgatgtgggagatggagagggtggggactggaagtgaaggtgtatttgcaggaggatgaaaagctttgaaatgggagtggttggggggaagagagagttaacttgcagccatcagctgccacatcgacaaagccgggagctggagttgagggagggagggggagggaagggagggtgcctgggagaaggaatcaacttttgaaactttctccaagtcccacccaccaaaaggctcttctttgctatgactcactctaggaggaatgcgagttgccacggtaacctttttttcagggtctctgcctgctggctgggaggggacactagaaacagaatatcaggctctgtaggtctgaatgtcccccactccactccatcccaagagggcaaattataggtcctgccctcccgatctcccaatctcccggga

SEQ ID NO: 39882 - DNA, 1904 bp, Bovine  19866881024475
  misc_feature (1)..(1): n is a, c, g, or t
naccagactagtgttcatttttctagaatttccatagatgaaagcatacagtacgtttccttttcttggcttctttcactcacttcttttatatgtgagattcactgaagttgttgcgtggacaatagtattcaattacatggctattccacagtttgtttactcacctagtgatggccactgagttgtttccagctttgggctattacaagtcaagccattaccagtatttacaagtctttgtatggacagtgcttcccatttctcttgggtaaatactaggcaaggaatggctgggtcatatagtaagctttaagaagctaccaaactgatcacacttgtttttgcaccagtctgggaaaagggcgtgtttgggaagctgataacagttctaagtggggatggaagccaaggtgaattcacttacctggtcagtgagcaaagcttagggagtaagtgaagtataatacctctgaagggaccattatattaccaaagtaaaaggcacactgcccagggccagatgcttacatttaaaccctgttgatcacaaactatagcccaaagtcatagaggggtctccgggatacatcaagcagtgctctttctgctcgcaggagactggaaggagtccctgagcttgtggtttgcattaggtaatgatatacttggtggccatgtcggggccttacccacctgcccacgttggtccatcctgcaggctgctggacggggcctctctatttggggccaaggtaggagacagcctttcctgttttccccagggtctccagcaaagtgtccacgctgtgctcagagttgatacagacctttttgttgggcaggtcaatgtcaaattgaactcctgcaggaagtggggtggggaagacagacatatacccagtcaggctcctaaattgttcaccccactctttccctctcctctagaccagggattggcaaacttctgaatggggccagagagcccatggtttaggaactgtgagctgcatggactcagccccatcatcttctgtagattgttttgtgttgttgtggcttccctgctggctcagctggcagggaatccacctgcaatgtggaagacctgggtttgattcctgggttgggaagatcctctggagaagggaaaggctacccgtattctggcctggagaattccatgactcgaatagtccatggggtcacagagttggacatgactgagcgactttcgcttttgtgtccgcactcttttgcgaatgcatgtattgcagcttgccaggctcctctgctcatgggatttcccaggcaagaatctggagtgggttgccatttccttctccaggggatctttctgacccagggatcgaacccatttctcttgtggttcctgaattggtaggcagatctttaccacgtgagccacctggaaagccccatattgttttacacgcctgaaaaaatgtaaaaaccattctcagctatgcagtaacagactgtgggcccaaaggctataatttgtctatctctcctctaaataagggttgtaaaaaaattttttttcttaattgcaaaagtaatacagacatgccaattttttttttggccacattctgtggtttgtgggatcttagttccctgaccagggatcgaccctgtgccccctgcagtggaagcatgaagtcttaaccactgaactgcctgggaagtccccagacacaccattaaaaaaaaaaagacaagcatttttgaataaaatttgaaagtgtaaggcccccgactatttcctgcctataagaatcactgaataatagggacccatccagtgtttctcctgatggacaaatgaaaagtcattttccaaagtagcatcatactctgtaaacaagttacttatatgt

SEQ ID NO: 39883 - DNA, 1852 bp, Bovine  19866881047081
  misc_feature (1)..(1): n is a, c, g, or t
ntggggaggtgtgtgtgggctaacaccagtaatttccccgcctcccagagctgtctggagttgagccagttgcttgtagacctctctctcagggctggtgtgcaggccaagacttggggccccactgtcggggggaggcagggtgggtgtgtgtggacattggactggacaaccagccaggtcttcttccccaaagccctgcaatgatgataacagtagtcaggctgagcacccaccgtgtgcctgcatcatctcatttcactgtgagaaaaaggcatagttattattttacagatgagaaaactgagatcctgaggacagttaagcaacctcccaagctcgtgccaccaggcaacagccaggctggcactgaacccatctgtttgtctacagagcctgcattctcatctaagatccagctggcttctagctgcctggggatttttagtcctaaaaggactaggatgctaggagcccaggatgagcagaccagtgagggatggcatccttgtttccagaggctttgatattctctttcaaagttctgactggcagtctgagatctgtagacctatcccttcctggggagcagataggctccccaagctctctcatccacttaaactaagtgaccacagcccctaaagacatggaaacctaaaagcagctctgcgggacactccccagaaattacaggcttgtgtttttgaagagaccatccctaattaaaggagaatgccacggagagggctgtgacctgaacaaccaccgctctcctcccactcagcgccatgcttgagggtccatttttccttctcatagtctgcagggttgaaaggacccagacctgtagatctgcaaattctagttttcaaacttcaaattgtataatggtgaaactttttgttcaaaagacttgatttgtggaatgccactatcaagcattagacactcctatttcagtctcagagtcttacgtaagccaccttgtatcatctcacaatagccagctgaggtagatatatcatgatccgtgttctacagatgaggaagtgagttgcacaaaagaatccattacttttccctcaaggccatgcagttagtaggtagtggatgtagaatttgcacccagatctgctcaagtcctgagtgtggctcaatacctctgggctctaggagggagctgggtaggtaaaactatgttaagctgccttggtttggcttctgccttggtttggcatctgccttggtttggcacactcctgtgccctgtggagccactgtggaaccggaccggcaccagagagtagtttaaaaaactggaaacaagtccagtgtccatcaatgttgaatgaataatactttgtggtatggccatacaatggcatactactcagtgataggaagaaataaactactgagacctcaataacatgagtgaatttcaaagtcactgtggtgagtgggaaaagccagacagaaatgagtctattctgtatgactgtatttatagaaaagtctaggaactgaaaacagattgatagcggcagaaagcagattggtggttacttgggggtggagggagggatgggaggattactaaggggtctgatgagagtttcccaggtgatgaacatcactctcttgattgtggtgatagtttcatgagtgtgtctgtatatcctttaatattatatataggcttaagttgtgtgccatttatcaaatgaagttatacctcattaaagttgtttaaaaaaaaagtcaaaaacttgtgtttagcaggagacatggataggagatgacttgctcaagctgctcagggtcgaggggctccctctgggaccctctg

SEQ ID NO: 39884 - DNA, 2751 bp, Bovine  19866881103899
  misc_feature (1)..(1): n is a, c, g, or t
nttggacatttgtcttttattcctgagacctagtcctctctcctataaaatggggctgtaacctctaccttgctttcctgccttgtgggggttgctatgacatccctctgaatatgaaggacgctctttaaagggagagtaatgtttccaccataccagtgttcatccagagaaggcaatggtgacccactccagtactcttgcctggaaaatcccatggatggaggggcctgatgggctgcagtccatggggttgctaagagtcaggcacgactgagcgacttcactttcacttttcactttcatgcattggagaaggaaatggcaacccactccagtattcttgcctggagaatcccagggatagaggagcctagtgggctgccatctatggggttgcacagagtcggacatgactgaagcaacttagcagcagcagcagtgttcatcatggtggatcctgtgtccctggggttttgagagggaaggggggaccctgggcccctccatctaacctaagtagccctattttatattaggtaaaagattgtgtttatacaagtctctattgcaaggatggatggaggaagggaaaagttactcagtggctccacacatgtgggagccccagtgtagacacactgaattggaaactcctgactgagcatgtaaattttaactaaaaaattaatacctagacttccctggtggtccagtggttcagtggctaacactctgcacgcccaattcaaggggcccgagttcaatccctcatcagggaactagatcccgcatgctgcaaccaagacccaacacaggcaaatgaataaatttaaaaaaaaaatatatatatatatatataaagtaaaacctgccaattgtaaaccatgtatagcttaatgtgtgttttttctcatagtaggctcttccttttaaactgaggtgaaattctcataacgttcagctcaccgttcctcacatgtgccgcgcgtgggcctgtatagtgtgttcacagtgttgtgcctccactccagtttcaaaactttcatcacactgggaagactccctgtacccactgaagctcacactcattccccgatgcctcctctctccatcccctggcaaccacaaatctgctttctgcccttctggacgcacctattctggatgtttcctacaaaaggaaacattatatgaccttttgtgtctggcttctttcactcagcataatgttttcaggattcactcaagcttagcatgtaccagtgcttcattcctttcaatggctagatagaacattctcatagtagttttcataatttatctattttagattttttttttttaattataggaactgtcaaaactatgcaagtgtaggcgtaaaatgaatctccacatgcccgtcacccagatccaacattatcgagtcattgccatcatctcatccatggcccactctcaccacccccatattcacagcaaattcaggcatcatagtgtttggtctgcacacctgtcagtaacgatgtgtagtatgaagaggctcctggaggttcataccacagcactgggtgagaatcactgatcaagccagttttactcccacacaccaggcagcatctgtctctgagtctgttttaagaggctcctcagtgactgattcgaagccaggttcaggaaccagaggatgaatatttattggttattaggtctccttgatcatctggctcttagcagatttgtttgctcatggctttttttttttgttgccatcccagttaagttgaaacagggcagaggaagagctccagcagccctgcgagagcctggaagagggcttcagcagtgatcggcttagcaaggtcaaggcattcttgtaggagcagcgtgcagggctgaacatggggttctagtcctactcggcacctgggtttcccacttcaccccctgcgactgcctcttcgtgaatctttactgcgtttgtaatgtctccatgtgcacagcagatggcatcagtgttccacctcacttctcatttcttccaggatgctgatcctctcctgccctccagacagatctaggacctggcaatcctgctcagcaatggtagttcctgcggagaccctcatttgtcctgctcctctgtagcttccctgcaataaagtcaagccaattttgctggtgatactgtctcttgcctggtcttgtcacttgcttacatgcgtgtgcatgctcacatgttgctgtgaaggaaataactacagtgcttccttgggttggcgttctgacagctcccaggtccagtggatcctgaatcttggctgtgtgagcttttgcagatcactcaccctctctgggcctcacttttcctcatctataagtgaaggtgttgggtttggttggtgatcctctttcttttcactactttcttagactccatatgttgaaaaacttgtctgtcaagtgaatgcatttaagggatgtaaaattgtatggtaatgggaataatgatgggaagatgtgcttgtatatcagaataatgggaagagagagactgtctggggtagagtccaagctccacatctcccagctgggccacgtaatttcttggtgtccacaggcataaaatgtggtaacagcatctcttgcaaatggtggttgtggggattaaatgagatgactcatgtaaatcacttagagagtgcttgccagttagaaatcactcagtgaacattctctattcatgta

SEQ ID NO: 39885 - DNA, 1106 bp, Bovine  19866881118011
  misc_feature (1)..(1): n is a, c, g, or t
ncaagctgtttatgatctgcccccactctcctgtcagccccaatctttctttccagtcttaatttccacaatctcccctcaaccttaggtctcagtcatggcttcccaagtggcactagtggtaaggaatccacctgccaatgcaggagacataagatcccttggagaaggaaaaggccaccactcccaatattcttgtctggagtatcccatggacagaggagcctggtgggttacagttcagagggtcgcagagagtcagacacaaccaaaacaacttagcatgcatgcatgtgacttactatgtaaagcacagggcccctcccatagtttcctgaagccccctggtttcctccgttgtcccatagctactgtggagaggctcacagaagaagagatgcacaagttcaccggcatagaggaaacttcatctaaaaagtgatatttgaccctggccttgaaaggtaaccctctaaccaggctgagactgtgaggggtggagtagaaaagaacaaagggagaaaaggcatttcaggcagagagaatggtcagcaaaagctcaaggtagaaccgactgaaattcttggcaatgtggccacctcgctccagcattttccaggcaaagtactggagtagggtgccattgccttctccaattatgggggtagcagaaggattggcaggggctggaagaaaacttgaatctagtatcattttagagaaaataagtagtaatatcatgagcagtagagatactaagatgtgatctttccttttaaagagaccattgtgtaactgagcgtgggaccttgcctttctcggtcctcagtttcctgatcttccggatgaatgttttggatgagatgaaacttccatctctttccagctctgaagtcctgtgactgaaactgaagtcttctcttggctcctaattcctgttctgggccaggactggtgaccagatatgagatcagtcttgcagatttcaagacaaatgagggctctgtctgtgcagctggtgtccacttcccgtgcccggggttttgctcttatgctgtgtgcggccggctgtcaccacatccatggggtcaccagctcctactggt

SEQ ID NO: 39886 - DNA, 1537 bp, Bovine  19866881425864
  misc_feature (1)..(1): n is a, c, g, or t
naccaccttctacatgacataagaatgtaaacccagccacaggaacgcaaacttggaatgcccaaatgaaatccccttctcctttcatccttcatgttccctgtattagtgaatggcaccatctgagaatcttcattgccaattccctttctcactcatcctacaaaaagcagcttgtattgttagttgttagttggactgcgtcttatcgttccttcagagatctcctttcctccagtcccattctactgccttggttcaggcatcatcccttctccccgatggtcctatttctgttcatgatccaagcagtccatatactgcagccagagtgatggtgtgttggggggacatgggttctgaactggtcatgagctactgcttatggcacacttcttaaactctgtgtctcattttccttgtaaatgaaataaaaataacaggaactacttggtaaggttgttatgtgaatttacagaatggtaagtgggaaggatgtagaaaaggctctgactcgtaataaacacccaatgacattagctaacattattagtaggtaatgctaatgttattattggtaggtagacttgatgatgcctactgttgctcacatctttttgtttgttttgatggtttttcatttcctccagaatgaagtttaagctcattattaagcctttttttttttttttaatatcaggactctgagtatctatcttgcgtcctgatatctggaactctccctgtgtgtgtgctaagttgcttcagttgtgttcagctctttgtgaccccacgggctgtagtccaccaggctcctctgtccatgggattttccaggtgaaaatactggagtgggttgccatgttcctcctccagggcatcttcctgacccagggatcgaatatctcttgcatcccctgcattggcaggaagattctttaccactgcatggcctaggaaaccccatatgaaggcttcctaaccctaaatcaaccttgtctttccttctgttaatctgcctgttgtcagttaaattcaaagacccccaaacactgaacctaaatgagaagagggaaagtttttcttttcaatactattaatgtctgtatttgaaagatgattgaaaggagacacactataattttaatgtgtaacctttagtgactgtggttggtggtattataggagtttcagcttttctttatgtagctgtatgtgtaagaaacaattggtatatgttttaattagaggatttttaaagcaaaatttaagactttggctaagcccagaaagttccatctatcctgtatcatctcctgcaggcatcttggctatcctcatcccccgcctggacctggtcctctccctggtgggctccctgagtggcagtgccctggccttcatcatcccacccctcctggagatcagcacctactactcagagggcctgagccccatcaccatcatcaaggacaccctgatcagcatcctgggcttcgtgggctttgtgatggggacctaccaggccctagatgag

SEQ ID NO: 39887 - DNA, 2630 bp, Bovine  19866881432418
  misc_feature (1)..(1): n is a, c, g, or t
naatagtgagccccaagaggggctccagacttctgtattcacacaggggaccttttacaaaaatataaacctgctaaaaggattggaccaggtaatttctgcctctgtaaggttaactcaaagggatgcctcctacacatctaccatgtctgagtctgtcctggtccactgtcttacagggaccagatacaaatgaatgtcatattattagagaaatgcaaatcaaaaactacaaagaaatatcacctcacaccagtcagaatggccatcatcaaaaagtctacaaacaataaatgctggagagggtgtggagaaaaggggacattcttgcaccattggtgcgaatgtaaattgatacagccactatggaagacggtatggagattccttaaaaaactaggaataaaaccaccatgtgacccagcaatcccactcctaggcatataccctgaggaaaccaaaattgaaaaagacacatgtaccccaatgtttattgtagtactatttacaatagctagaacatggaagcaacctagatgtccattgacagatgaatcgataaagatggtgtgggatatatacacaatggaatattactcagccataaaaaggaatgcatttgagtcagttctaatgaggtggatgaacctagagcctatcctacagagtgaattaagtcggaaagagaaggataaaaattgtaaactaacacatatatatggaatctagaaagatggtacagattaatgtatttatggggcagcagtggagatacagagaacaatctatgaacatggggagaggggaggggagggcgaggtgtttggagagagtaacatggaaaatcacattaccttatgcaaaatagatagccaatgggaatttgctgtatgtctcaggaaacaaacaggggctctggggtgggatgggacgggagatgggtgggaggttcaaaagggaggggacctatgtacatctgtgactgattcatgctaatgtttgacagaaaacaacaaaattctgtaaagcaattatccttcaattaaaagataaaaaaaaaaaaaaaaaaagactgacataaacataagggcaggatgcacaataaaaagcccccaaatagcagccattacacatccaatcaaatatccccactgtgcctgctttctgcactgagggaacagatgtgtggcctgatcttgaggacaggaaagacacgtggatgaaaagctttgcctcagccctgaagctaggaggataaatgctgggagggccaagaggagatataaattacttccagttgtggaggtttcctggaggctgtggtatgcaagggagggaaaggaatttgtacatggagacaggcggtggtggggaggcgggcgagatcattccatcttgaggcagtgtgaacaaaagcaaggcagctgggagatgcagctggctgcagagagggctgggaaggctgggcaggtgggctggggtcaggcactggggcaagcaccggggtgacatgtggacacatttgctccccccacaacacacacacacatcctgctgtgggatctcattggctcctgctgcttggggcattaaagaccaaaacctagggcctcagctggaaacctggattccagcagggagtggtagggtgggagaagagtcaaagcaaaggaactcctccaaggaccacttgccccaagaggcaccagtgtctccatccttgggcgttcccagtgggccagccagcatcaaccaggtctcctgggaaactgtgaaaatggaaaaactcaagtttgtactcccagagtccacagaaacggtcttcaacatctctgtggatggtcaaagccaaagaatagcaccatcttgtggccaagacacctagataccgggaaggctgggagaggccctgtgcccctgagggaccacaaaggcagaattggatgagacttgttttaatactatcataatgggccagaattacactagcacacagtttagagctgggagagttttacttaaggccccgggggtgcagatactgtgcgctgtacagatgaggaaactacttctgggacagatggagtgactgctccaagatcacaggtggccgaaggcagagccaggtctcatctcaggtcactgatcaaagcagtgatgtggttcccaagacctttcagtaggaatgccaggtcaaaactgctcccacaagatgccttttttcccctttctcttacaatcatgcagtgaaatttccaggatctaaatgctgtgcgatgacctcatctcgccccagtggcccatgggagatgtgcttatatattcttctgtttcaaacattcctgttttaatttctaccatggcataacccacataaccataaactctttgagacactcagaaatgttcaagcgtgtaaaagggtcctgagataaaacagtttgagagctgctgccttaaagtattttttaaaaagtaaataaagctatacaaacgaaaacattccctttgttttgatataactgaatcaactctgtgaggcactaactttttaagttgactgggattctaattgccatctctatagatatttgattaattaaatacacatcaaaaaaatgtacgtgaat

SEQ ID NO: 39888 - DNA, 916 bp, Bovine  19866882178851
  misc_feature (1)..(1): n is a, c, g, or t
naggaaaagtctgagccgtcttggaagaaactgctcctgaggatgttcagaagagttcttctccagcaccagcagacatagcccagacagtgcaggaggacttgagagtatgcagcatgtcttcagttttattctgcttctttctgttgtaaaaaatctcttctgtgtttttgttgctaggatgacttttgcaggtgaatttttgtattcatttggggaaattcttccatattgaaccatacctcagataagatgcatattgcattataaagtcaaaaggaatttttttccctcctctaaggaaatttgaatactttcagacaagttttgggtgctatattgttgccatatcaacaaaccttctttttaatactgcattcaaattgcatgttactatgtgcttgttacacaaaaaaaggatagtgtatcttcaaaaaaattacatggcacagcagacttttccctgaaatctaattgaggacaactttacagtagaagtagaaactaattgtaatatgttctaattagaataactgatttcaaaagtttgaagcttttcagttacctttcatgagtcacaccaggatgatactggctgaattcacaggacctttacagcagatgctctgtgaaggagtatgttttagggctgtatttatgcagccagggttcttaaattgttatttgtctaagagttattaagtgtcttgaaattttctgagcattattctatgggaactgtcagtaacctctctggtttgtagtttgctgttctgtataaaataggtttgtaggtgagtagtaaagagaaatggtgacatgactgtagcttgcaggtggaaaattatgtttattggagtgagagtagatgacaagttaggtggtttaactgtagtcctggagagaggtaatgaca

SEQ ID NO: 39889 - DNA, 1517 bp, Bovine  19866880442569
  misc_feature (1)..(1): n is a, c, g, or t
ntgctcagccctcgcttccctttatccgcgtttctcatgttggggtcctgtgctccttcagacactgaccctgttcttcctcatccgtgttgttcagctccccctttatcaccaaggtaaaatattagcaaagtcattcacccacaatcttacccactttctccccttttgtttcaacccctcctgtcacttctgtttccctcacttaactcctcccagggccctccacatcagcaattccgcagcgaaggattctcagagcagaagtcaaattcctggtgaaagagaattccccaaagagaagcctcatggagacatacaaagtcaggtcctggttagcagaaacgaaaggtattgtgtggaaagagtgacctagtgctgggtgcttcctgcaaagtagttcccatgaaattgaaatatggtcagaatctcggttccaattttatttctattaggtgctcagtggctaaattaagaactttctggatccctcatttagataaaaccttaactattaacctctaataatgtcatcatttcactgagtagaaaagaaaacatctgggtgagttcaatgagccaagggtgtggacagaaggcctcagcattctaattgtatctcgctgaccttgatggagggtgtgagccaggagggagggtgcgtgctagtggtgacctcctgccgtgggagtggatggaaactctgtgctgggcacgcaggcgaggggagcagagggccccttcctcaccatgagaggggctcctcatgttgaactccatcctcagctctgtgcccacttttcttctgcccttaaaaactggtgatgatttgtctccttttgtctggtctcctgtgtatatcaggctttctcagtctcggggacgagtgtccctaaggtctctgccccccctgctctcccctgcctagatgtggccttgcactttgcaatcatggccaaggggttggcgctgcagatggctccgtcctggtggccacacctctggtcactctttcaggctggtgggttccctgccgccctaggggtggggcctcatgtttctgaccctgcctttattgggcatttctggttcttccctagtttgaatttgatctctaaggggactgaacaagaacccagggtcatacgtttccccaaaagtgaattctgtggatctgtgtgcaggtggatttattctagaggtgctccctggagccctgacccctgacccctgaagcagaggtggagaaggccctgggctcagccctggggaccccgggagatgacctacaacctgctccctagtcccaaggacagataggaagttaggggttccttaacagtggtgtaggagttggggtgcttggctgttgccagataagttcccactgagtcagatgctcccacagaagaggttatagggtgctgagaaagaggaggggctgacagtgtctgctgtgtgttcttaagaatctgtcctagaaaagcaaaagcataaaaaaagcctgttgtcaaagt

SEQ ID NO: 39890 - DNA, 1082 bp, Bovine  19866880736742
  misc_feature (1)..(1): n is a, c, g, or t
ntttctggacactgttggttgtaggtctttgggctaaccactcagctgcctcgttctcatgtggttgcaagtctttgggatctaagtatccccatcattgaaacaacaggatcccaaaggtttcataagttgaggcatcctgagtgacacttacaatcccacagtaattccaagaaaagtgtagtcattttgtcttagcaatgcaagtatttgcagagaacactacccaatgctctagacagcaagtaatttcaacagcactttgcttgagaagaaacgaaggtctgcctggaaaactcagagacctctgtacttcccaccctgagatgctgcttttctgatctctgaatggtatgctttacagggtaacagccagaaagtcattttgactgttacgtgataaccaataaatctttaaaaagtgacctgccttcttccatctctaacatggagaaactaatgaccaaacagaacaaaggagaacaccacgcagcactcagcagctgcctctgctggcatcactgtgacctgcggtgactcgaggacaccggtgctgtccctgccatccaggagttgggcgttctttctcaccttctcatctgcatatgtgagaaggcggccatgatgcagtgtcatctaagagggccgagcggagcttgttccaacaggcccggtgcactgagtttacggttggacgccatgggaagtgctggtcctcccgtctcagccacgatgcagaagtaacatgatgggaacacgtcttccctccctctgggtacccgtccgcctcctcctgatcagaggagctctcagctctgacgacatatcgcacatcacggccgctccagatctgtctccgcgttactctgcctgcctgtttccacacccagtatttctcgtttaacaaattgttcttgatgtgatgtgttcacaataagcccataagcacagccgaagcacaatttcctgctcacttcagtcaaaatacattaatcctctggatatttcccggggacaatgctatctcttttgtgcagacttaatttctatctttcagctgcaaaggaaacaaatcctcaaaa

SEQ ID NO: 39891 - DNA, 653 bp, Bovine  19866880803080
  misc_feature (1)..(1): n is a, c, g, or t
nccccaactccccgggcctcccgggtcctcccggcaccgcccccagatcctcccgggcccccgtgcggatcgtgggggatgtggttgtggtgccctctggtggcggagggtcccagcccgctctccttacctccaagacagggtcagtgatcccttctccaagtgctgctctccaagaacacgcatgcactaaagctagcagttgataataaagtttaacataaattattttgttttaaaatgcctaaattctttctttacgtattctaagcagcagacattaaagtatttcctgctaaatgtaaccatacagtttattccacaaaacgttatttaataagactgagggttttttttttttttaaagagattatttccatccaatatttaaagacttgaattttatttaaacttgaaaatgactttgccttaacttttgtataggacagcttaagagttctgagatgggcctgggttggcatgagtggggtctgctgtcacggtgtcactgggtgagcactgtagggaggactagcagccgtgtttgtaatttacctggaagatcttacacaattgatcttttttcagattgttgaaaaatcctgtaaatgcaaatagtcgatactgtattaaatatgtgcacttgggagtgt

SEQ ID NO: 39892 - DNA, 1416 bp, Bovine  19866880829282
  misc_feature (1)..(1): n is a, c, g, or t
ngctattattatttcaatctccttgctctgtcctctcctccagttcccaaatgtggacatcacacctttctgtaactgtccctggatgttctattctgacttttttgttttttcctccttggattcctgtttgggatgattctattgacccatgtttagacactcagtccagtctactgaacggtcctcagaggcgttctgcatgtctgccccagggttttggtctttcttatggttttcacatcactcccatcagctctcgcacactgtccaccattcccactaaagcccttagcgtgttaaccaaagtagttttgaaaccctggctccgtaacctccagcatctctgccccatccatacctattttacacttcatatatgatcagtgtatttcacacgttcaattagaccccaataaaactgtgtctaaaaaaaggaaaatcaggttcctatttacaatagagagaactagttacagaacatacacaaataattgtatcactgaaaaagcagaaaaagttcaccagcaggacatttttatattatttgttgagaatcaattcagaggtagaagacattagtaatacatatgcattgtagaaaatgattttattttagcaaatatatgagaacttacccacttagccaaataaatgctgttttccccaaaacaagactgtgagaataaaaagtcttattctgacacgtggcccccgctcaacacaatttttggactgtctcctggatttgaaattgccttcagtccccacttatgaggaacataagaaaactacttttattgttttatgatcacacctggtaaatgaaatccgtattacatttcccactttaaagccaggatttataaaatatatctgaccaacaacccaattttgccagtataaacttctgccttttgacaactgccttcatgactatttttttttaaagccaaccactgttattatcattcttgtattttataggacaaaaaagaaagaaagaaagggatgtaacaaacatgtcaggttgcattttttaaaacctgcacgtttgtacatgttgttctgtttacactggagagcaggccctccctgccttcaggcgcagcgggtgcacgtgtctgaggcccttctgcagctgcagccctggcacacatggcacggcccatgtggccacaggcgcagcagctcttcctgcaggaggtgccttgcaatctctgcatttgcaagagccggcacatgtgcaggacccacctgcggtgcaggagcggttgggatccacggcgaactgaagcagggctggggtccagagacgactgcacaaaggatggcgaggatggcaacggggcgtgtgctcagtgactgcttttctcaagaacatgatcttggaacaaaattggctttgcgtttcct

SEQ ID NO: 39893 - DNA, 1030 bp, Bovine  19866881205751
  misc_feature (1)..(1): n is a, c, g, or t
nttgcacacagtcctgctgcctggagccagccccctcactaggtagacagtggctccaacactggaaatgtcagtgtgtttgatttccagtctgaaatattttgaacacatgatacattttaatagatttaattatttaaacttttaaggatcactgaaacagatttaatagcagaagtttttcttattattttattcccactttcattgtttggaacgcctggatttccatttagaaatagtctgacagcttttacatctcaactggcagcaggctcagaacgcgaggtggctgccaagggctctgtgtcatgctgaaatgcaatattgtggcgttttgctaaactctttctctacaaagctgccagcggctgcaagcctgcgagtgtgaactttgtgctgaatctgagaacccgccgagccctatcggtcatgaattaggaaagatggccctctgcagtccctgccctggggctgtctcttgatgaacaaagttaagggagagtttcagcgtggagctcctggggtaggtttgacacacacactgctgggaggtggcaggatatctccccgtgttacagaccatcgaggggctgggccctgctctgggaagatctacaaaaaagcatgataacagcaacactgaaacccgtgacatggtttgaactgttcaacaacaaaacagggagagcactggctggtgtggaggtgaggggccgagccctgcgtggtttgttccatgagcgggtggaatgcaggccttgctcttgtgatgccccagctactgaaagggcacagagggggccaggggtccacggattccctaacggagcacggcctggaatcttcttctgaggctgacgagtcctttctcattggggttactggcatccaccgtgacccgcacagacccccagggctcccgaccccaccccatggaagcaaacttacacccccaagggcttatctccacatccgcacaagtggtgtccacttttcacagttcctggactctgggtgcaggtcccca

SEQ ID NO: 39894 - DNA, 1118 bp, Bovine  19866881296773
  misc_feature (1)..(1): n is a, c, g, or t
nttgcagttcaatccacgtagcaggagtcgagtgtcccaggaccccttgcagcaggttccacccagccaacacacattggggtgagcctcccggaggagccgggctcacagtcttgaaatcctctgggcagatcggagttccggctgccgatggcctttctgatccggttgccatgggaacggcggtcagatggaagaggataaggtagggaagttataaaaagaagtctgtcattaaaacccgcaccttgtctcccaagcttgtgcgtttccatggaagcaggagcagatccactcacggcgccatcgggccgtggcctctgggctgtcagtcattcaggccttctctcaggagctgtttatgaggccttcatgaccagaccccgcaaaccgcccaggccaggcgaggagctctgcgtctggggccccacagggcctgaggtgccttcttggagggtcctactgagtggggcaccccaacaggcaggcagcctggctccctagggtgactgcccccctgaggctctgtcaccctcagtcccaggcccccacacgcttccatgaggccagcccctggggggccctgcccccgttgctggtctctcctgtgctgacctagctccccgcccaccctaggccacttctctgctgcagaagtcaggctccctcaagacacagttgatggcgtctcaccttcacctgcgactcttctgttggaggtgcatggcgccccctctgtcgtcagagcagcgtgtttaactgtctccaagacaaacgatttctcacctaggtttgagacgaaacaaaaactgtgtattttagacacaacagacattgatctctgttgcctgaaaattcatgcagcaacctcctcgtctgcctgggaaggcgtttctaagactcactccaggggcctttacgtcctgagatgaagcacaaatacacaatgatgcaccatcgtggcctcacccaccctctcacccgcgcatccgccctaccattgcactcacggtgctgttggatccactttctcaggtgtagacaccgaatctcgttcatctcagtggtctccttacctgtcacatgggagatgcccactatgtgtgtgagctcttaga

SEQ ID NO: 39895 - DNA, 1492 bp, Bovine  19866881528047
  misc_feature (1)..(1): n is a, c, g, or t
ncagctcttatcctttactgctgctttattggttgcatccaccgtacaagcttctcgtgtgaagaaaataaaactcagcaactgactagaattttctgatctcggctaccagagatagccgagacacgtgacaaatcaaatcaaagcacgtacacctgccaacaacacacaaagggtgagcacttgcctgggaaggtaatcttagcgtcagacctctgctgcagcagcagcttgttctcggtgttgaacaagaagacactgaaagctcggtgcaacagccctgacggcgagagagatgcgatgccctgagtctctgtctggggctcgcaagggctcgggcggccggagggggcgacgtggtattcccgccctccctgcgcccgaggaccccggcccgccgcccgccgccctcgcgggcacctctctcgatgttctcgttcaggtggcagttcttcttggtctctgccccgatcctccggtcgttctcgtcgacgaggatgcacatctccgccatgagctgcacctgccgctcgtccaggtcgtccgtgctcacctccggcatcgccgcccagcctccgcgccgccccgggaacctgggggcgtgggtcccaaagtcggaggacgcccccactgcctccccagtgccgggccccgggccgcgcttacagccacccgcgctacccacgcgccggggaccccgggcctccggctacttccccacacggttgggttagactacgggatacgatccggaagcgctcggcccgcccctcagcgcgcagagcccggacccccgcccgcctcccgacacctcacagactctctcctccgtacctgagacacgagccgtccactgtaggctgcaccgccgggggagtatccttcagactccgccccaaggcacgggccccgcctccgatccgggccccgccccccgaggccgcgcggccaattgcccgcgccggggccagggcgcgccacattgccgccggccaatggtgcgccggcccgcgacgtacgtcacggtcgcgcggtggtgccactccagatctccaggcgtctcctcccacggctctggggtgcggaaccttccccaggccgctgcgcgggtgctctcggtgccttcagtacacagctgaggtgacgctcctcgatggcggaacggcctgacggagggcactcgctgactagggtccgagtgaacgtccgcttacgtcttgccctcggccctggccgctctagccaatcgacgcgcccgaggctttgtgctcgcggcgcgttgacgtcaggcgtctccgcgcgctcggggtctgaggcgcggggaggcgcttgtgtgaagcggttctgtgagctaaacagacctgttggtgagcgtgagctgtccccgccgggtagtgtggcgacttcaaagtaactagacaggtttgtcactatttgtgaaggaaaggagttagaaaacgacctctgccagtcgggagttgctggcaaacca

SEQ ID NO: 39896 - DNA, 882 bp, Bovine  19866881591398
  misc_feature (1)..(1): n is a, c, g, or t
ngatgttccccgtcgtccggttctttgaaagcgcgcccagcagatggcacacctcagggtcagggtcatccagggagcagggagggacggcccaggggagtcgtgggcaccagagaagctgttactggaatggccatctcgaccatcactatccgagctctgtgccaagttcagagcttttccatggtgctaggaaagggtgacaaaggccttccatctttcataccttctttcagattcgttataggcattcagtaattcaagatatagaataattgaatcgttgcacacgtgttcaccagtccctgactttgaaatgaatgaggctttattgccattgtcagtaaacaggagccatgaccaaggcccagagaccagcttttcctcagacccagaagaacgttgagagggaggcgggggaagatcctcgcctgttcgtgttcatggggccccctctgagccatgcccgccctctggtggcctgatgaccatccccgcagcttttctccagccttcccagttccggccgcatggacggccaagagaggacacaagtcagccccactgtctcgaccgctggcagcctgcctccgcctccggatgcccactcacctcatgtgctgtggacaaggtggacaggagggcgagggtgccccatcctgccctgcccatatgcaaatctaacctttctgatattccagcagcataaacccgaaggcaggatttcagcaggaaaatatttacccacagctctctccctcataatctatcgattttaatatcctccccactttggctgaatgtcaattttaccccaaggactgctcctgcaactcattttatttacttaggcctttcaaaatattagtgttggaaataagt

SEQ ID NO: 39897 - DNA, 1073 bp, Bovine  19866881665789
  misc_feature (1)..(1): n is a, c, g, or t
naaaactaacttatggttgctaggcgtggaatggctagttatggactttgggatggacatgtatgtactgcttcatttaaaatggataaccaacaagcacctactgtgtaatatgtggaactctgttcaatgttatgtgccaactcggatagaaagaaggtttgggggaaatggatacatgtatatgtttggctgagtccctttgctgttcagctgcaactacacaacattgttaatcagctataccccaatacaaaataaaaagttcaaagttttggaaaaaataaaagaaattcattttttaagaacagaaaattaccgaattaatagaactctaatttgggactgatgaatcccaaatttatgcatatacagtttttgaccagcccatttcattttcttctaggaaagcagtagtctggagaaataaacaagtttgttttaaaggaatcccttcacagtcttgaagcaaagaaaccaaaagcaatatgaacacagggcaaagcatgccaagcagcctgcatacagcttttgcttggctcaacaggtggacactgaacttcatgtaattttcccaaatggatcatgaagtaacactggcttagaagggatatcagttaatcatgattttgtattacgagtgtcagaaccacggttctcagacatccaggtgtgacttaagcgttccctctcttcactgtaagctatgactcctcacaagataaagttgatttaacacagatttttcaagctcttctaaaaacacacagcatccaagtggcagataaatttaaaagctgtttttgtcactaggtaaaccatgtaggtttttaagtttctatgatggcactttctattctcaataacctgcttatgataaattctcaaaaccctttataatgaaataatctgatgatcaaaggtaaactagtcctactgttaaatgtatcagcaaccacagaagcacagaatcactgaaacgctgtacgatagacttggaaatgtaaactactaacagaggagaaaggcctgaaacaaatcagtttcagagatccatgttttccacaatgcag

SEQ ID NO: 39898 - DNA, 890 bp, Bovine  19866882177429
  misc_feature (1)..(1): n is a, c, g, or t
nctccagggctgcatgggggccgctgtctgtactcagggtgaacttgggacacagcggctcccagtgtggcgtatgtgctctgcttacagcaggacttctgattgatgcatcctcagaaacccagaaagggtggcacagcctgtgtccacagttgaatgtgatattgtaaacagtggtgttgttctgagcactcgggggcatgctggttaatccagggctcatagaaagagcagtcctctttccacccagccctcagtgttgctggttaatccagggctcatggaaagagcagtcctctttccacccagccctcagcatcactggtgagcttgttcctcagtgaggacccctcccccggtcttcacttgtcctttcccactgccttgttccttcaccgtggtcagtggggagctccatcagggctggtataggtctgtgggcaccctcggcctgtgtgctgggctgacttgtctgcccacaggtggtggacacccctgggatcctggaccaccctctggaggaccgcaaacaccatcgagatgcaggccatcacggcgctggcccacctgcgagccgcggtgctgtacgtgatggacctgtcagagcagtgtggccatgggctcgcggagcagctggaactcttccggaacctcaggccactctttgtcaacaaggtgggtatgggccgttgtggtcttatgtgagtaatggcgaaggtgatgatttcattagttttcttccttgctgcagcctcttatcgtcgtagcaaacaaatgtgatgtgaagaagatctctgagctttctgaggacaatcaggtaaatcacctcgatgttttcaaaatttcctgctattcggaacctcgtctcccacaaccggagtgacaaggaa

SEQ ID NO: 39899 - DNA, 1959 bp, Bovine  19866880400797
  misc_feature (1)..(1): n is a, c, g, or t
ntagaaaactgcatcctgctttgatgggcaggaaaaggaggtactaagtaagtgtatttgaaatgtcagacccttttgcctaagcacaaagaatacaatcaggtcagaaaatctaaactctgaataaatgtaagctctttacaccatgtctgaaacatgaaatactaagttcaattatgactggttgaaatgttgtaggtgttaataagcctctaccaaataagagaggattttcaagctacattcactgaaatcaatgtcaagccctttctgtgtactttaatctgaatgcttataatttttcctaaacataccctccattctgaagttaattttgcatgtgacatgtaaatataagccttcctatgaatggagaagcaaagacgtgaagttcaactctgataaatttctacaacttctttgctctatttttgcagctactgttcagttcaattcatcttcttactcatggaagccagaatttgcagcatgtgctgagtttttctctgctatttagttaggcatttccttctacttttaaaaatgtcattttcagccaaaattcacgcttgcagacctcctctttcacgttcctcctcataacagcattgcagaactttcattatcttcagggttttcaaatcacctttgtcccccactttacctcctctctggcctccgcagtactactccccccggctaaagtcccagtgacacaaatatccaaaacccaactactgaaccctcctcaatacccctgcacctaaccaagtctccatagtctgctagccagcgtatgattcagactacactttctgatactgggggtaagtctgaaagaactgatggaaaagatacttgggttttagtggctcagtggtaaagaatccgcctgcaatgcaggagacacaggtttgatctctggatcgggagatccccaggagaaagaaacggcaacccactccagtactcttgcctgagaaatcccctggacagaagcctggcaggcacaagccaggggtctcaaaagagttgcacgtgacttagtgactaaataacaaaggtgaacgtcagaatttgacactactgaatgagctcactaaagacttttttctccgtgtgatcagcttggacatagagtatagaggatcctcttaggggttccttactaactttttgttaaatgctgtaagaacaagcaaaaaacttcccagcaggcctggggtgggtgctgtagtggctaaaagcctttcaggctggtgagaacccactactgcagcagctgagccccagcctctaaaggcaacaccaggtgctggggaacccagctgggggcctggcgacaaacaggagctcctgattagcttttccaaatccagccttacctcccctctgatccatgccctaactagtactacttttataccctcctttctccaaaatatgtatttaactcttaacatgtgttaagctctgtgcagctggcccaagctactagaacaaattacaaatctgtgttcctgctctgctaaaattcttcagtggtattcaagattcctcaagatttgcccactgattatctttccagcctgatctcccacctcttcctgggtccttgctttctaagtttcagtcctaatgaactattttcaggtttactatctgatgttatttccctaactttgtctgccatgacatggttcagatgtcttagtctaagagaaagcctcttgtcaatcagccccaggttaggtacaaaggaaaattctgtgtggcctgtaatttctattttctgaccgaacacttttcactccttccttccttccagtgtgtgaaaatacatatctaataatatcagctcataaaataactgtccttttcctcgtctcctctaaagccattttcgtgagggtgtgatacacaccctgttttttcaattcaagaaaaggataaggtagc

SEQ ID NO: 39900 - DNA, 874 bp, Bovine  19866880447920
  misc_feature (1)..(1): n is a, c, g, or t
ncgcactcccttaagggcacaaagacctcttctgctgcctcagaacacatctgataaagtaaaaagcctttaaaagctttcttcagtgctttgactgccaaccattcactgtcagtaactgacagacttggtatcttggacattaatcaactaccaaccatcttgagttgtgaaaaaagtcaatcaagagagtctgattcagccatgccaattagctccatttgttccataaacaagaaaagacactgaagagccctgggagaagacacactgcagagagaagtgaggactccggtgatagcactcacaaatgcccccttcctcttctctgggtacaagacctgctcaaaagtcacacttgccaccatctgttagccacttcctcctggtgcccccttcagctctgcacacacttccgtgatagcactaagcacatcactggtaccttgtttacacatctgtgttcctacgagacggtgcacttgagggcaggggactgtgtcttgttcatctctacagcctgcccacagcctggcacaatagacacttgttgaatgagtgactgaatgaactggtaaaatgaaagcacccagggaataataaatcagagacacacatgcttgggtggaaactgggagtgggaaaaaaagaggtctttacatttaggaggagctgaaatgcccagggagagaaatttagtgaaccaaaaagtttactgaaacctgacagctagaccttaaagctggccagagaagcaagagaggaataaataatacataaatcactgggcactgaagcagaaggaactctaccagaaagtgatgtatcccatagccagagagcaagaccagacagaaggaattcagttatccca

SEQ ID NO: 39901 - DNA, 1656 bp, Bovine  19866880499667
  misc_feature (1)..(1): n is a, c, g, or t
natggtatgaaagctgtgtaactctatgatatcatctatgaagaatgtgcaatgtaagaaaaggctcagaactcagtcctggagacgttaacaattagcagtcagaacatgaagaagaggttctcattctctgttagagaacagagaaaggaacagaggtaggagaaaaaacaagagacttccagagaaactaagggaagaaaaaatgtgggaaaaagtggcaaaaggccatctaagatgaaggctaacaaacatctcttcagtatgttttagataacttttctaagcaacacagaagtctttggtaaccctggcattcctcttccattataatttattaacccatagtccttttaatggacatctggattgtttacagttatctatcattacaaatagtgctttggtgaatggccctgtgtattttttttccccacttgtactaatgtatctgaaagtgaaaagtgaaatgtatctgagagtccctaaaaatagaaatgcagaaacacagcagattagagctagaaaggaactaaaagttggccttgaacttgtgtttccacactccttgggtaatgatctacagtatattacagcaatataatacaatatatgaaagacggagcccaatcagcagacaggttgattcttggtcaattgttccccaaggcaaggagaacaatttacaccgtggttagttgggtaaataagctcagcggttcccttccttttactgtcttaatagaaacacagatttaaagaaagatcaaaatagtcttcatctttagtcctattcttttagcactgaggcatctgtaagatacaggtgtacacgccaatggcagtcttgaattgtgttttgaaactcccactcaaatatcaccaccctttatttgtaatgaagtacttgctaaacagtggaaactcagggagaaaggttccacaccactgttttcttccaagtaaggtccttggtacttttacattttgacactttgaatactaagagatattgaggtacaatacttctgaattcaatgttagattaggactcaggctttagattttcttcaaatatgctcagagtaactagcattattctgacacaaaatgtgaaggtctctgatggggagggaaaaggcattttaaaagattccaatctgagggaaaaaatatttgtcatgagatttctataattaaaagcttatccctcttcccttcctagattttcttgtcctccagtctcctcttcacatacagaatttaatcttgcaactgcttattaatgctcagctgtgaggcaggcagctgatggaggatgctaaaattatctggggagtaataactgtctcaaacttttctaaggccagagaacggagttcctgagccatgactcttgcttgtatgccctcaaatagagggaaggtctcactgagccaaaaaaaaaaaaaaaggaaaatggaaattcccaagttttaggcaatgcattttcttctggaacaatttcaccactaaaatagtacagagaagcaatgaagtagagatctgagggtcaaagtttttcttaatgatggaaggacagtcacagaaaactaaatataaacctgctctttcttgggtctatggaatggggtaaagttataacaagagtgggag

SEQ ID NO: 39902 - DNA, 1340 bp, Bovine  19866880644668
  misc_feature (1)..(1): n is a, c, g, or t
nattgaatatctagaggatgagatggctgatggcatcaccgactcaatgcacgtgagtttgggtgaactctggaatttggtgatggacagggaggcctggcatgctgcgattcatgggggctgcaacgagttggacatgactgagcgactgaactgaactgatggaatatctcatataatttattgaatattacactaaaagtgaaaaacaaaatggttccaagtaccagatatttatcttagtgattagatgactgcctaagacgaatgactcactgctactgcccagcatcacaggagtatgataccagatatggccagccaaggaaaaggtcaaaattcaaagaacagtttctactacatgtatattgcttttgcaccattgtaaagtcataagtcagaccatcataagttaggaatcatctatacaaaagtagccagcacccaacaaagtaaagcttacaatgtctaggatccaataagaaaataccaggtatctaaaaccaggaagatgctacccataatgacatgatataacaatcaaaattgactcagaactgacatatacatgagaattagcaaacaaggagatcaacacagttataatatacacgtaccttatgttcaaaaagctaaaaacaaaaaagatatttttaaaaaacacccacatgatagtactacagatgaaaactaacatgaatgtataagctaaaaaaaatacctaaatgggactaagagcaattttaactttgtaaaagaaaggattagtgaacttgaagatataagaagagcaagtatcacgacttagcgaatgaacaacaacaaggtgaaaagaagaaaatttttaaaaatgaacaatgcatgagtgagcctaataaaagtttaaatggagttcctgtaaaggaaacggtggaacacaaaaatatttgaagaaataatgtcaaaatttccaaatctgacaaaaactataaacataactagacaagcacaaccattaaaaaatatacatgcacaaacataagaaacatgaagagagctacacaaaggtacatcgtaatcaaatgatcaacagaaagttttaagagcagccatagaaagtaaaaaaaaaaaaaaaaccaaaaaaaaacccacagaggaaccaagataagggtaagatcacatttaaacatcagaacagaattctatacctgacctcaggtttaaccttaggggactagagaaagaggtgaaactgaaagtagaaaggagtaataaatatcagagcagaaatcaataaaatagaaaataaataaaaccaaaaaaaatgttgagatcaataaaattaacaaaatgctaattcg

SEQ ID NO: 39903 - DNA, 1255 bp, Bovine  19866880781344
  misc_feature (1)..(1): n is a, c, g, or t
naagaagtctcaaattgttgcacaagaatgtaaaatggtgtaggcactttggaatacagtttgacagttctttaaaatgttaagaattgactcagcagttccactcctatgtagaatttccaagagaaagaaaaacatacttacacataaaaacatgtacacaaatatttatagccatgttatttgtaatagccaaaaaagcagaaatagcttaaatatccatctacaaatggatggatgaataaaatgtgacatatccaaaccatggtatattatttggcaataaaatgaataaggtattaatacatgctataatggagacaaaccttgaaaacattatgctaagtaaaagaacctagtcacaaaagaccacaaattgaatgatcctgttcataggaaatttccagaataggcaaatctctacaggctaatggttgccttaatgggaagagtttttttttttttttttttttgaggggggtgacaaaagtgttctaaaaattagattatggtaatggttcactactctaaatataaaaccccccacttttaaatgggtgaattataaattataaattgtaccacctttaaaaaggtggtaatgaaaaaaaaaagattcaaggcaaatatctcttaaggttgatcatgattgtagaaaccaaggaatcaggcaagcatgatgatttggattgttggaatacttaaaaaggagaaaaataatttagacttgagaattaagacttcacccagaaagtgatcaaagacttgttcagttcctttctgtctttagaaaatattgctaatgaaaattatttggtcttaccctgcaagaatcaaaaattccatcttcatcacctgcacaaattgaggtgttaggaactatacccccatagctcctctcagaattacagaaacttcgagaaatataatgcacttctgcttcatgtaactctttggtaacattacctattaacaacaacaacaaaaaaataccagttaaattattttggagagcagacattttgatagcaatatgaaatgttcatgttcaacaggttttctttccatagtgactgattgaacaattatgtaaaattgtatccagatatgtatgcatgtatgaatgcctggagatatggtgaaagaaagtctaccaagtcttaacgatagttatctctagatagtaggaatttcaggttactttttttttttaatgtttgctctcttgtgtttcttggaggtctcacagaaggat

SEQ ID NO: 39904 - DNA, 1064 bp, Bovine  19866880782420
  misc_feature (1)..(1): n is a, c, g, or t
nacttcgatgatacttagaaggagcagaagttgtagctgcagatggagcaggtgtttggtttctgtgttctttctgtactgatgattcagtttctaaaaaaggaagttttggaagatggttatcacgataacaataataactaacattttctgagcacttaacagcatttccacaacactttgaggtaggtaatactacccatctacagtaaagggttagagagctttaatacgttaaaaaaaaaaaaatacaaaggcatccagactaaaacaaaacaaaacagaacattatcttgacaatgtaattgccaacaggtgatgggagatataagtaggtgaaaagaagagactccacaaactgggaagatgggggatacggtggggtgtacatgatcccctaatcctgtacagttgcagaaaacatagcttgggaagcgttagtctccctaccataagttactcccaataaacatgtcattaaaacaaaactagagtgcttactctgcaaacatagcttcaagtcaagtcttactagcccctcttccaaccggaggcatcaccgaacttaaccctttccagtccctgccctgtccccacattctgtcctcccaacatttactgtttctcatcaagaatatggggaagactgcaatcctattcctgggcatatatctggagaaaaacatgattcaaaaggatacatgcaccccaatgttcatagcagcactgtttacaatagccaagacatggaagcaacctaatgtccatcagaagaggaacagctaaagaagatgtggtacatatatatgatggaatattactcagccaataaaaggaataaaataatgccactgccatttgcaacaacatggatggacctagagagtgtcttttgaagtcagacagagaaggagaaataccatatgacatcccttatatgtggagtcaataaagaaatgataacaaataaacttatttacaaaacactctcacagacttagaaaatgaacttacagctactggggggaaaggatgggaacttggggatggtcatgcacacactg

SEQ ID NO: 39905 - DNA, 2234 bp, Bovine  19866880829540
  misc_feature (1)..(1): n is a, c, g, or t
ntcccctcttgcccagtacccctggcccgctttctctctctatatatatgtatagtgttcaacatgtattccttgtatcaattaatatttgagcacccactaagttcaaacattgttctgcctgagacagttgctgactgtataaatgcataaggataaaggcagaccaatgtgtggatgtatgaggcttaaacagttttttcagtaccttgggttacttgaggacttcctttcagtgagcagccttaaatatgtaaaacaatagtctcagaagttttgatttcattctttcaacagaagttttattaactaactgctttactatttagtagattctggggatagcaaagtgactctgacccagttcctgtccacaaagggctcacagtctaatcaggaactgatttgtaatgaaaaggaagttaaaggttgattatatgctgaggtaaacgataatagaggtatgaaaagaaaaatgccatggcaacacagggcaggggttgaggaatgggcttgccaggaaaagcctcacagagaatatattattgttggcagccccttgaacgactttggctgtgagaagatgggagttcagttctctgtgacccttggaacctaggccttttaattattcataaataacttaaaacatacttctaggactgggagtttatttaaaagatgcacctgcatttctagtttaacctttagtttaactagtcctttaggaaaaggtgtttatggatgcagctgtatggcagcgttacagatgtttgctctttagagttccttacagcacagttacagatatactgctttacttaggttgccctttcctttttaacacaaaatgtttctcatttatagtatatggctcctttttaaaagaaatgcacctttacaaaggagattctaggtttttcatttctatgttgtgaagtaagatacatttcttggaaaaaaatgtttgctgtaagtggaactgaaagcatttgctaggagagagttaagagttgctaaactcgtgacatgctggatctgtggtgagctgagaatgctttcacaacaatttgattcagcactcactcactgagtgctgtggtcaaagcactgctgctagactcggatggaaaagaaaatgaacaaaacataggctctgttttaaaggatcttccaatttactgcactgagtctcttttcttctcttctccatttttgtcatttcccagataatgaaaagtagagctgtaatttatcgattctgtaagctgaaaagggtataaaattagtttgcttaaaatgttgggctggttctccttactgctgccaggatttaaaataacagaaaatatttggtgcctccttccacaaattaacatttccatgagtggctgcttttcatggagcatcttgagccagcccctctcgtgctgtgagtcttcgttgacagtattaaatcagatctgagcagctctaggagacagttgagagtttgagaatatgcccagtgtcagcatcttggctagagtgctgttaaacaaagaacactcttggcacccaacaactgattagacatgtaccattcaatgtgtgagctccaataaataaagccacgcagggcattcagtgctttcatttgggcagaactaaatggttaagtgtccgcttaggcttccccctaagtctgttcgaggcaatcagcacataatccagaagatgtaaaatctccaagtatagccacttacctttactatgtaaagctctgtgctgggtgcttcacactgtaaagagacaagactgagtaccagtcaggtagtttacagattgagtggcaccctactctaactcttctacctgccatcccattgcaggtccatttcttcctggcctgccctggtctgtagccacctaccacgtggtgttgaccctgactcgttcagtatggttcttctaacacagtctctataaccttatcctgaatgtagagtggatattggaaacagtagaagagatgggcctagatctctggacagtgtctgcagtgactgatgaagcccattgtagcactaatcacttgaggtattgcttcagggctgttgtatttttgtgatcaggtctcatgaacaggcggaacccagataggaagcagtctttaaaaaggttagcccattttgttcatgtttcctttttctacagagtgtgtattttcctgtcctcagactaaaaacggcaca

SEQ ID NO: 39906 - DNA, 1195 bp, Bovine  19866880829770
  misc_feature (1)..(1): n is a, c, g, or t
ntgtccctgagcctttcagactttcgcagcgtaagttgccctgcttccccgttgccacttaggatgcagcttgcttgggtctgcatcagtcacctatcatttatccacctgctttccaaatgtaaaaattttgttgctgctgtatcttcagtcgtttttttcccttgtgggttagagtttaatttttcccctgtcactgttacgtagtgaggtttgcaggggccaggcacccccattctgctgtctctgactggaagttcctgaactgtcctttatctcagcttttcttctcgtgctggtcttttttctgcttgtcgcctctgacttgtaactttaccctcacttgttccattgccagtcatcctttttctttttttaaagccttcctttgatgtagaccatttttaaagtcttcattgaatttgttacaatattgcttctgttttatgttttttggctgccagcacatgagatcttagttccctgaccagggatcaaaccccatgccttagaaggtgaagtcttaaccactggaccaccagggaagtccctctgtcatccttaatatttattttttccagcttatttgaccttttatcttttgttgtttctttttactctacgcttctttggcacctcttgatctcctccttttgtaggtgcctccaactaagcagagtaacccttctctccctttgcttcttggcaggttcccttctaagcagtatgcgtacgtgcatgctaagttgcttcagtcatatccaactctttgtgaccccatggactgtagcccgccaaggctcctctgtccatgggattctccaggcaaaaatactggagtggactgccatttcctcctccaggggatcttcccgaccccgtgatcgaacctgtatctcctgcattgcaggcggattctttaccactgagctacctaggaagccctctccccaatcaaagcctggttctagctgcattttattaactgttcaagaaattattctgaacaacagcagcgaccacacacacatctttagaaattaaatctttgttgatttagcgcatgtcctgactttgcttctctctcattcttggtaccttttattctgcttcacgtctctgactttcatctttatactatctactcatcttttgatatgtcttcctccctggagggtttaggcagacttacata

SEQ ID NO: 39907 - DNA, 1354 bp, Bovine  19866880979751
  misc_feature (1)..(1): n is a, c, g, or t
nctgtcctgttcctctaaagagtgctttgcaggttggaagtcttgattgttgtcggttgagtaagtgtttttcactctctttctaatagctgtttctctgtaatatatgaatttgtccatcttcaagatgtgcccatcactctcctggactctgtagcctcctatagatactgctccatatctcgtatactttataacaaagcgtattgaaagaaaaaaatcttgctagcctgacttcaccgctgatctcctctgtagtattctgaataaccgtcgtcctcaagttcctttaattaggccgctactggtgatctcgttgccaaatcgagcaagcgttttctgattctgtttttacctttgtgacactgtgcattattcatcgtctccttctcactttccctctccctcttctcccctccttcccccagttccttcctggcctccctgctgtgtcccagtatcatccctttcccctctacccattctttaaatgttcgttttctccaggattccttttttggccttctccgcttttcacgctgcactccctctcatggtatcattcacacccgcgctctcagctcccacctcctacaccaattgtgaggatgtatctgtcactcccagagctcatctgttctgttgcctactcgattccttccctcgttttgccttgtcacacatagcagtgccaggcaagtggcgttcatcgaatgttgaccaggctttagagcttgttttatgccttaattcctgcagacatggaaaccgaggcccagagaagtgtataatggcttgcgcaggatcagagagctagtttggaggaaaatataagccttctgacacctggaatctgagatcaaacaagctgcttattttattctctctacttgtatttttttctgtgcatctttggtttccagagcggtaggaactggctaccaacaaaattcttcctatttagaaattttcactgtatttctgtacttgcgagaggacatacttagatttttgattcattgttaatcttatctgcaccactgataaagaatacctggcaccatgcactgtttaatttagattcagtgaacagcatagctgttattacttactgcctagttttaaaagaagtcattttcatggatgctagaataaaggcaaagtaattgaatatgcctagctgttcttgtaagaaaccgttttctaattttctagggaaaattaaagataaaaatcagggaaaagaagaagctgtaaagaaaatatctttttttcctgtcttttcccccgctaggcatttgcagtttgaggcctaaattaaaatgacgacatccatagttggatgcatgtaatc

SEQ ID NO: 39908 - DNA, 1057 bp, Bovine  19866881020240
  misc_feature (1)..(1): n is a, c, g, or t
ncaagagcaaacgaaagaatatccagtgcaaaagaagccctctctcctttaaagggtcactgtcttaatggctaataactccctaagtatctttgactaacttgaaaagtcaagtcaatagacccacctggattaggcagagttttgaaagctggaattaagtgaaagataatattagctcaaatatctctcaccaggatcgtaagcaccagtaaggaagggtgcccagatggttagctcctagctcctacagcttcaggcttagtaggtgtagcccgaggtgtacaattaccttatattaacacccacgtattgacaggtgccagcgacttgtacacgatagcgattctggggtgacacatccagctgtaaggcctgctatagtatcaacgtatctcaaaagggtgtaagaatcttaaagggttcagctggcagaatggaaggggagaaatatcgaagaggaagagaatggctgaaaatgaagaatgaaaaacaacagttagattatcagaatatttctctgggagactattttgaattttgaactgccgctttcctccaccacacttatatagtgagaaaggagtgttccagagggaagaggagggggtccgatcagttcccgccctcagtcagcaaaggctccgctctacataattactcccaaccccattcttgcctggagaattccagggacgggggagcctggtgggcagcagtctatggggtcacacagagtcggacacgactgaagcgacttagcagcagcagcagccagcacagtacccagaagtgaagaaggagcaaaggatcagcagttcctccactccctttctcgagggggaggggttcacgctccttgtattcccctcacccgaagcagtcgcgggagaaaaagggtgtggagggaatccggggtctccgtggactctccggctgcggaggatgtggagagagaagacccttacctggctaaaagcggtctttcttctgcgctgctatcagccccgccacgggtccctggcgttctgcctcgcgcaccttcgcgacctagctc

SEQ ID NO: 39909 - DNA, 732 bp, Bovine  19866881077542
  misc_feature (1)..(1): n is a, c, g, or t
nagaatcaagagaaaaagaaaacccctatagtagaaatgttaggaggatgccaaatgttacaaaattaacctaactgaatatttttcttcatatttttctaggcaattgatagcattcatcaagtgggggtttattgtcttgctctggtgcctgccaatacactgcccaaaactccgctgggagggatccacatatctcagacgaaacagctctttctggagggatcgctacatccttgcaatatcctcatgtgcccacatacgtgcgtgaccaatttgccaaaaccccggcaaaagcaaccaggtaatatgctgactttaaagacatgatgtgaaaattgtaacttcaagaggctgaattctttcactgtgatttttttctctagaaagtaagtaacacgagaatagtatcagcagaccaaaagcatggaggattgagatttttgtaaactggcttgtccaggtttactattggctcagtcttctgaacaattctcagtagagtgccaccattttccatgatgtaaggcatgggatcgaggtgatcagattcccaccgggggaggtagaaaaaagcaagtcctaaaaaaaaaaaaaaaaaagaaaagaaagcaagtcctataaagcaaggttctgacaataagacagcttgtatttattgagtgcttactaagagctaaatactagttaacttttacattttataatgggatcctaaagctttgtcctcag

SEQ ID NO: 39910 - DNA, 1297 bp, Bovine  19866881091823
  misc_feature (1)..(1): n is a, c, g, or t
nctctttttttaatgtattctatctaacccaaaataaaggctgcagaaatgttgcctaatctttcctgtcttttgcttatagggaagcagcacgagagtgtcgtagaaagaagaaagaatatgtgaaatgtctagaaaacagagtggcagtgcttgaaaatcaaaacaagacactgattgaggagctaaaagcacttaaggacctttactgccacaaatcagattaatttgggatttcaattttcacctatgatggtgggaaaaggactggcttggccacaaccagaaagacaaaataaacattttattttctaaacatttctttttttctatgcgcaaaactgcctgaaagcaactacagaatttcattcatttgtgcttttgcattaaactgtgaatgctccaacacctgcctccacttctcccctcaagaaattttcagcaccaggaatcatgaagagacttctgctttgtatcccctgccctcttcaagaagtaataatttgtttacttgtaaattgatgggggaaatgaggaaaagaaaatctttttttaaatgatgtcaaggtttgtgctgagctccttgattgccttagggacagaattaccccagctccttgagttgacgtaatgtttgggccgcatgcttaaagtaagtaaggtgcaatgaagaagtgttgattgccaaattgacatgttttcacatttccattgtgaattatgtaaaatcgttgaagagacataccctgtgagaaaagaattttaggatggtgttgaagaaattaagaatgaattcagagtgctttctatgtatattctcttcaatactgaacacttgtccttggttcttaaaaatattctgtattaactatagctcttcaatagggcagttgttgcttcttaattcagttctgtatgtgttcaacatttttgaatacattaaaagaagtaaccaactgaatgaaaaagcatggtatttgattttaaattaaatcaaagtaagtaaaattacaaagcttcatttagtttagtactaaatttttagtacaaagatgctcattagtaaaccagttccttgagttatataacaaggtttttaaataaatgtttttgtcatcaccttcaaaaatatttatattgtcacacatttactttaaaaggtttttctaattaaactgctcctctttgcacttataccaccaacaggaaagccttcaagatgttgaagcaaagtgatatatttgtttataaaatgttatgtgttgtagaaaaatgctgattttaaattgtttccata

SEQ ID NO: 39911 - DNA, 896 bp, Bovine  19866881235143
  misc_feature (1)..(1): n is a, c, g, or t
ncttcaatttaagtctgagtttggcaataaggagttcttctcaggtacttgaatccgtttgagactttctgtcccaccgatctttttctcctttcaaaactacatcacagtagttaggtttttccttgatacgactttgtcagatgaaagtaggattaatttttttttgttattaatctaacatgagaaaaacaaaaactagtgggagaaaaagaatatttacttaaataaccatgtttataacaaaagcatttactttctttcagaaatcctgtaatatggagagctgtgattggaactaataatataaaagggagtgagccatacagcaagaagatcaaagttaatgcaatcattatccatccagacttcaacgtggaatcttatgataatgatattgcactttttcacttaaaaaaagcagtgcgttataataattacattcagcctatttgtctaccttttggtgttttccaaagactaaacaaaaacacaacatgttttataagtggctggggaagaacaaaagaagaaggtaattataatctgagttttgctgatacaggttttcctgataatcggcagagggtgaattcttttatgtatgtttttatatctctttatatcatgagtttaaacagtaggtctttataaaccagtgaaaagaaagtgtgttttaattttctatgtttttttcttccttgtgggagagagaaatttatcttccaaagcagaaatagagacttcttttgttatacatgcctacatgccaagacacttaaacttttagactatctcagagagaatgatgggtccaagtgtttctatagtttctgagactcctaggtgataaagcaagttctgtggcagatctgcttatcttaaatgataagctt

SEQ ID NO: 39912 - DNA, 1039 bp, Bovine  19866881380597
  misc_feature (1)..(1): n is a, c, g, or t
nttgctttttatttgtttgaacttgcacggtgccttaggtgaaataccatctgtaagaaggcatatatatttgacctagaaaacagccaaaacaattctatgatttgagttttgggagaaagcagtctgggcttattctcaagtttctgatgtggaaaatgtctagttactttcctaaatgaggtgagaggacatctactgagaatggaaatttgaatgtcctgaagctaaattcttttgaaaatcttttgtaagattagcaaagttaaaagaagagagaactaatctttgaatattttatcactgatttttttccccaaaagaaaaattattaaatagataaaataaaaattctcatcttccagcagattgaactattttacgagtttatttctggctagactatgaaaatattgtatcttttcaccctccttcaatgtaagaatagtcctccttatttgtaaaaagaaactttagagagttttaaaagtaatttagggtttcacattctttggagtcttcttggccacttggtaggggaagataaaggccaaaatgccctgtatttggcttaaggtttgtgaacctttatatattacctctgaaaggaggatgtttggaggatggtggctggtacatataattgattgaatggaattgtcattgtaagaagaacatggtaaaatttaataatagaaaactttctttgtcttctagccagtgtctcctggacatgatccaagcctctgcctttttcagttttgctaagattgacctcattcacattcttggctacattttggctctttctctctctgtgtgtgtgcttatatctctaatagccgtaaccccagtcccactccacatctccagtcacagccagcatatcccaccttcctggtcaaagatttacatgtagaggatagaataggttttagatacaggtatagatttgaaggtgatgactccagaacttttttctctcagtctctcatttctctccctcctaattactccttaacaaaacagagaggcccca

SEQ ID NO: 39913 - DNA, 1083 bp, Bovine  19866881388803
  misc_feature (1)..(1): n is a, c, g, or t
nactttcctggtagtccagtggttaagaatcccctgccaatgaaggcgacgtgagtttgatccctggttcgggaagattctacatgccattctaagcccaggagttgcaactactgagcccatgcaccctagagcccatgctctgcaacaagggaagccacgactatgaaaaacccaagcactgcaagtagagaaagcccatgtgctgcaatgaagacccagagtagccaaaattaattaattaatttataaagctcaaaccatgggacactgactagggtgtttccgtgaggactcttactttttaagagataaacaagaacactttctgcgtgccaggtgctggtctaagcactctataaacattaactcatttggttctcaccaacaatcctggggtagatactatgattactcaattttaaagagaaggaaagtaggcagagaggttaagcagttcacccagggctggctaggccgtggctctcagggctggagcccgagcaccccgcctctggagcacatactcccaactgctacatggtctatttcccatcagccagctcagcggccatagctgaccctacattctccccatgcaacgtgaacatcaagtacctcaaatgtgtttttggtcaccccagcaagcccaaagtacatcatgcctcctgtcctggagctgacacagatttctccaatttcatctgttttgcagagttgaggaggtccatcgggtttcacaatgcacatcatccctagggtacagaaaacacagtcaaggaacagcctggaaaaccttcacaaaaacagcctcatcctaatgaacccaggaaagtttcccatttattgagcagcattaagttagaataccaaacaggaatgttaaagagagacctgacactgtataggtatatcggaaatttccatcttttggtcctgaaggtaattttttaaattcagcaaacaaaacatacaatagatgcagactgaagcttttaaagactgacattaaaaatgactgcaaagtctgaagaaacgggttaaattaatttacccttacacagatcaaactcaaacacacag

SEQ ID NO: 39914 - DNA, 2766 bp, Bovine  19866880621716
  misc_feature (1)..(1): n is a, c, g, or t
ntgggtgcaaccgaattttttcttctggctgccatgtcctatgaccgctatgaggccatctgcaaacccctgcattacacgaccatcatgagtgacagagtgtgcaacttactggtctttgcgtcatggttggctggtttcataataatttttccaccactcctcgtgggtctccagcttgatttctgtgcagccaacactgtagatcatttcttctgtgatgtatctcctatattacaactctcctgcacagacacagataaagtagaaataatgatgcttctctcagccattttaactctcctggttactctggtgttagtgattttctcctacacaaacatcattaggactattctgaagataccttcttttcaaaagaggaggaaagccttttctacatgttcttctcatacggtggttgtgtccatttcttatggaagttgcatcttcatgtatgtgaaaccctctgccaagcaaagagtgtctttaaataaagggatagctctgctcagtacttctgttgcccccatgttgaatccttttatttatacactgagaaacagacaagtgaaatatgcttttaagctcatgatcaaaaatattgaggctttcttaatgaagtgaacaacattagtgacattcttgagtttataagtaaaataaatcaagaagtgtgaagtgtgttgtgcatctcttctatgtttgtgttttacataatattactatcttccatgacttacaatgttcattgtgacttgcctaaaaatcccagtctaactttcacttctattttctcctcatgctcagatcacatatacatttcttaatatgatcatattcatttgccttttgatttggtgactctgttgatttcctttaaaaattccctcagaggaagataaagtgagacttcaattatccatgttcctttccaccgttcagaaatttagatttcagtttggtgcatattctatgcagagtttagtaccccacctagatttgatcacctaatcagcttttctgcagtggattccaagtttgaattctgaatagaaatttggaacaaaccaatttaatgcatttcttaaactacacacattgatagtttcaaattttcaaccaggcttggactactggtatatgtttagaaacagattgaagaaaatctagagatgttaaggcaatactgccttgcaataaccagataaattattgctaacattaactaattatttacaatggccaggtttgtgaaatgtactagcctgcatcttgaaaacagcataagacatgtattatcatgctcacttaagaataacaatctgtagcctatttaaagcttaagtaactcgctggattagaataattaatattgtgaaagtgaccatagtacccagattcagtgattcggtattaaaaaagatcagttttcattccagtcccaaacaaaggcaatgccaaagagtgtttaaactactacacaattgcactcatttcacatcctagcatgtaatgctcaaaacccttcaagctaggtttcaatagtaggtgaactgagaagttccatatgtacaggctggatttagaaaaggcagaggaaccagggatcaaattgccaacagccattggatcatagaaaaagcaatggaatttcagaaagacatctgcttcatcaaatatgctaaagcctttgactgtgtggatcacaacaaactgtggaaaattctgaaaagagatgggaatagcagaccacctaacctgcctcctgaaaaacctgtactcaggtcaagaagcaatagttagaactaggcatggagcaaccaactgtttcaaaatcgggaaaggagtacatcaaggctgtatattgtcaccctacttatttaactattatgcagagttcatcatgcgaatgatgggctgaatcaatcacaagctggaatcaagattgccagaagaaatatcaataaccttagatatgcagataacatcacccttatggcagaaagtgaagaagaactaaagagcctcttgatgaaggtgaaagaagagagtgaaaagctggcttaaagctcaacagtcaaaacactaatatcatgtcattggatcctatcacttcatggcaaatagatggggaaaacaatggaaacagtgagagactttattttcttgcactccaaaatcattgaggatggtgactgcagccatcaaattaaaagacgcttattccttgggagaaaagctatgaaaacccagacagtgtattaaaaagcagagacatcactttgctgacaaaggtccatctaatcaaagctatggtttttccagtagcatgtacggatgtgagagttggaccataaagaatgctgagcactaaagaactgatgttttcaaactgtgtagtggagaagactcttgagagacccttagacagcaagctcaaaccagtcaatcttaaaggaaatcaaccctgaatattctttggaaggactgatgctgaagttaagttccaatactttggctacttgatgccaagcattggaaaagaccctgatgctgggaaagactgagggcacagggagaaaggggcagcagaggataagttggttggatggcatcatcaactcaatggacatgagtctgagcaaactccgggagataatgaaggacagaaacctggcatgctgcaatccatggggtcatgaagagttgaacatgactgagcaattgaaagacagaatcaaaatatccatatttttcacagaa

SEQ ID NO: 39915 - DNA, 819 bp, Bovine  19866880621720
  misc_feature (1)..(1): n is a, c, g, or t
ntgtgtagctttagaatctgtgacccaagaagatagttccatcactttgtattttcatccgtataaacataattgattcttttaacaaagaaagaagaagaaagttatgtaaataatttaatgtatactaaatagattggaaactttgaaaatacagaaaatacaagttaagatactattttttttctctttgtttctatttttataagattatcaatgtactatgttttcctttgggaacacatgaatttatgacacttaaggaaacaaacaaaaaaacctcatgaattgcactcagtgaaattttgaataaagattatatgagtacatttttataggctgttattcctttttgattcttctttctttctttttttaaatagaagtcagcgatgagaaaccacacaacagtaacaacctttattcttcttggactaagcaatgacccacaattacaggtggttatttttcttctcctttttttcacttacttattgagcatcactggaaatctaatcatcatcacccttaccctgctagattcacacctcaagacaaccatgtatttctttcttcgaaatttctcatttttagaaatctcattcacaactgtctgcatccccaaatttcttgtcagtatggcaacaggtgataagaccatttcttacaacaattgtgcagcacgctgttttttactattctcttgggtgcaaccgaattttttcttctggctgccatgtcctatgaccgctatgaggccatctgcaaacccctgcattacacgaccatcatgagtgacagagtgtgcaacttactggt

SEQ ID NO: 39916 - DNA, 772 bp, Bovine  19866880417044
  misc_feature (1)..(1): n is a, c, g, or t
nggagaggagcagtccagtacatgggcagatgcgcacagagcccgacagggatctacccccattgaagacagtggtctcattctcatttcaaacacacttgtgctttctgccaatggtgaaccaaaccatgaattttcactttgtcacataatgtgtgcaaagcacaagactgtaccacggagattgtcttcaacatggcaaagagaatcacagggaagacaagacatccatcttcaaaaaggtaaacaaatcctcacggtcattcttactgtgggggatggacttaggataacactggcttcaggcttggcctgtacctggtgggtaggtttggggggcatctcgtcactgtctccttgttaccagcctccatttcagtttctttacttgatagtggtccagtttgactcagaagaaaatataatatagctcaggttttaaggaactctggtaagccaaactaggtattacagttacaaagaactgaaaaaatgtatctgtattttcacactgtcagttgaagagcttggtgtctacttaaagggggcttcatgaatgctgagcatctcctgactgccctgcagatccactctccatgtctggggaccctcttggttcttttgagtgctgatgcccctgaccacatctcagggctccctttcctctggcttctgactggatttggtttcagaagactgagggaggaagaagagaaaggtcagggtatttctacccctagcttccttcttctgggtcagtgtgggctacctt

SEQ ID NO: 39917 - DNA, 1391 bp, Bovine  19866880468840
  misc_feature (1)..(1): n is a, c, g, or t
nctctaaggaacagctatcttagggcattaccgtgatgtgaccattggtcttccttattctccatctagaccatcacaatcaaaaccaagaatatccccatgcctagcacagtgtttaatgcttgctgaaaaaaaaatttaattgaatgagaatttctgattttttaatatagttttctgttttatattccagctatccaatttgatatcttgtcccaaagtattattcccatttcttttattctgttttctgttactttcatagtattgatgaatataaatttatttgacatgtatttgcgtattgattttctgtgtcagtaggataggaaatctctaaaggtgagaatgtcatctttttgggagtatactgtgtgcctgcttggtaaatatttattgaataaaacaattaataatttattgaataaaagaattaaaaattaataaaaaattaatgaattttccagcaaagatactgcagttacaaacacctccctctagtgtttttacataatgaccagacttactgtttttccctttattcactttcttcttgattttgatgattgttgtctacagttttcccactgtttaaaaaatctcatgacaaggatagaaaaaaatgagtgggaaatttacaaagagccccttttacgtgttgactagggaatccttttgtgaatggctgagttccctcgattcatgcaccactgattcccccttctccttcctctggcttcttctttttcctactcacaggtctgcccaaagctgctggctaagccgcctcaaatacaaaggggaattaatactgtaggatatttagaattcagtgcctacttcactgtgacatcttagaaaatcaaggcagggttttaaccctagtagcaagtggcaatcttagcatctatggacttaaactcaccaggagcagagcctgttttatgaattattatctgatactgctgtgcaaattgaaacttgagcaaacaggggacctgagtttttgctttccactttagctctccatcaaatcaattttagtggagagagttagggtataacagtgaggggggtgtgtgtgtgtgtgtgtgtgtgtgtgactgcatgcctgtcgaggttgcacctcaggtaggtgagtggctatagacacttaattgtaagagttaaggggctcctgtgagtgagtgtatcacccaccatcctcgcatccccaatgattctaccccctctagtttcacttgtcttctcaaggtgctctagatactggagttggccatcagcacgctgtcccatctcaacccagatgctaaaatgacccaaaaccaggaaatataagggaaaagatagatttcacttagtgttggtacaaattttttaatctttttatg

SEQ ID NO: 39918 - DNA, 825 bp, Bovine  19866880487465
  misc_feature (1)..(1): n is a, c, g, or t
natttattgagtataaaaataataatttgggaagcactctcaaaatctgtattataaaaataaagaatttgcaataatgcaataacagactgtatttctattttatgattctgataataaaacacttagattccactttcctggtttatgctgttatcaaacccccccctgatataattagatagccttgtttgaaatagttatttagattttattattgcatagcaaaaatccctttgttaaaaaaaaaatcttcaatatcttaaatctaagagctatgttgctgaaataagccttgagaaccccaaatcaagttccttcaaaataaaagagccagggatttctgtaaactgattaataatgataataccactaccttgcattttcaattattttaatagttaacaaatcaatttcactttcataatctctctcattttattctctgaatgcccctgtgaggtaggttctattattcccattttgcagatggagaaatttatagttgtattaaatggcaaagcagagactagactggctatcatgttattcaacaattccattctgctcaaaaccctgcaagttacacgcaaaaccatctagctaagaaacatcatgtgtgctatgtgctttgcaatattgtgttttaaagctgattattaaaacctgttccagaccctttctcagaaactccaatgtttcactttctaccttaaagctgggtgcctgagttttaagccaggtttttgttgttaagtggctttgactccttagctagacagcttgccatctcgaaaggagagggcgaagtcttctagatctaaa

SEQ ID NO: 39919 - DNA, 767 bp, Bovine  19866880752254
  misc_feature (1)..(1): n is a, c, g, or t
nccctaaaaagagaacgtacatgaagaaaatgcctacttctcaggtgcctcacctactgtgtgtatagaggcattattgtattgctgctgccttaaaaatccatacaccaattactacagaaaacgagagctctccccagtgtttccaaggaacaagtctgggagaatgatatgtgtcgatactctgaagcctcagaggagcacaaactgttttaactctcccaggacccacttccttgtctgcgctgccatggaaaccagtctcttgtccaactcgagttccccgataattagtcttgaacattcttgatttttaaatgaataaatcagtcccctgcatcaggtttgttacatacctcaaactctgcatattactctgacaaaatgctctctattcactcatttcttaaaaatacctatcgaacaactggtatacacaaaataccaaggaaggagaaggggagaggtcaaagtacctttaggacccagtttgataaaagcctgccatgtgccagcagaccaaactgtcaccactaaaccccagcaaaaagtttcctcagctgcccaaccccagcactgacacaggtgacccctagagtccatgtctgagctccctgattggctgacacatttagctaccgctgagtcactcaacagtttactaattttacacaacagtttacactacaacattacctctcagaactcagagaacatccattgggaatttatgagtatttttgtattagcttagcttttccttatta

SEQ ID NO: 39920 - DNA, 1472 bp, Bovine  19866880761594
  misc_feature (1)..(1): n is a, c, g, or t
nttcttagataaagcacagatcttaactcttggaagcataacagcctcatagaggggagagaatcacaacataatgttaataggttttgctaaccagagacagaatcaaaggaagagtgtgttaaaatacagcctttaaatattgtcaactttctcctactcatcaaaaaaaatttcaaaaacagaaagtgaattactgaggccaccaagattttatatattttttcacttataccattaataaaagcatcaacaaagttacattgtatttttatgttattataaatacatacttatatatcataacctgcaatcaagaactttaaaaaagtatcacttaaaaaaaaaagtatcacttataaaatggctatacattgctgaatagcataatactttattatttttattttggttgtacatataaatgaaagaacctgaaactgtcctgtccatcttcttttaaactgtacgaattttacttgagttgttaccttcgaggaaggtcatctcttcctgctttcagaaaaaatgagtttaatgtttaaactcataatgagtttaatgagcataaatgagatctctatcaggatataatggccataagcatagatcttagcccaaagtgctctagcgcagccaggaaactgttttcatttacaaaggtttctagtttgtttcagtgtttgtatcagtggcttttcttagtaggtatgagcaccatgaactcccatttaaacttagaattttttaatctggccctgatgctctgacaaataccccagatatgacttatacagtgtcctgtggggagcattgttaacattgcccaaatagccttcctactgatttatttgcttatagacaacttacatacctggcctcccgagggagctgcatgtctcaaatttgggcgccatgataataacaacagtttgagagaaaatgaaataggctgtaaagagagaggaaatggaatatacaaactattgtgtggtatcatgttcattttcagtactatataaaataatgaaaatgtttttcaataacctgtgtcgatttttataatgtgaaacatactttgtggaaaaagacaatgaatggacaaaaccaaaaaattagtagaaatatttttccttttgactcaaatttctgcattgttttcggtaagtccagactagagttgaattctgaaaaaagagtaactttgctataaaggatgttaatttctacctttggcaactttgaagttcctctttcagggttcacggacaaggattatccttgataaagaatctagtgtggtaggcagcaaaggttttatttttcgtattcccccttaaactgaactttcccatagtcactcaggttttcagttgcccatctgggattaaaatgggtgtgctttctggtatgtgcatggtcagtcagtcatgtctgactccttatgatcccatggactatagcccgtcagg

SEQ ID NO: 39921 - DNA, 1577 bp, Bovine  19866880815647
  misc_feature (1)..(1): n is a, c, g, or t
natccattaagaatccatacacaagaaaagacattcaaacaggaaattaatagaatcactgcaagaaacaaatctcatcaatgcaacatgcacaacaaatatgagaggtgtggagtatttcacattctcaaagtaaaaaccacttcccagtacactagggtgggaactgggtataagtatgtggtgctggccatgtgtgacaattgttagggggtacaggatttctgagggatgtatctgtgtatgcatgcatggattaactcatcataggtatctgaaaatttgcaagtacatctgatgtgactgctagtgagcttgagaatttcataggtgagaagccttcagcctaagagtggaaatattatagagattctttactgtgaaagaaaggtaaagcattttggaatctccttgtgtttctcacctataaacatagtcaaatattgcaacaacagtagaagcagctcaaagaaaaaaagatgcatatttgacaaagaagagaaaaaaaaaatcctgtgttctgcagatgtgcatttttaccttaggtaatccaattaaaatcatatttaaagctctgacaaaatatgataagggaaataagagtattttcccatcggaatatattttaggtgatagataataggagcacgcatacagtcattcatttgcacgagactattaaactaatgattataatttctgacctgcttgttataagattccatatactgaaagcatactgcctttctctatttctgacataaataaaactgataagcgaagatatgtgcatgcaattttaattcaacagagtgatgtgaagtgcagctcataaggcaaatagtataaaccctatcagttctgtttattgtaataacccaaacaatggcaattacaaactaccccacagatttttggcatggcaggaatgacagatctacaaaatccagctaatgctggtctttttgtagtactcagttaccaagccgcacatgtacaatacacaaatctcaaaagtaatgagatatttctttattatcaaatccgttccacagactggtgttaaagatcacatagctcatttctagaaatctcctttgtcaacctcttaggtatacttaagaaaaataaaactcacatgcattcacaaattttgagccagcctttaaggaaattcataaaggactactctgttactctaattatataaataataatatgttttaagattctgtatttggaactcagctaaaatataaaaactcttttgacatgggagaaaccaagctgattggtaacagatactatgaaatctcatagttcatagttaaaagatcgagtctattcctttatttgaaaatacatatgtatatcttttgtatacattacaatcataaaacatgctattagattttttacatacataatagtataaataaacttcaaaccttaccaacttcttagtttcatagaagatataactggtgctggaataaaatgactgcgttctgatggatatttgacttacaaattataaagataataatttggatattttgtttaccctaagttgctaa

SEQ ID NO: 39922 - DNA, 1930 bp, Bovine  19866880820798
  misc_feature (1)..(1): n is a, c, g, or t
nactgagtactggaaagtggctagtgtagctaaagaatagaagttttaattttaaaattttatggctactgtctatagtataggacagcacaacactaggaaataggccaaggaactgcttaaatttttcttttttttgtatttaattaactcttcagtggaataaactaaaagcaattttctcttttgctccattaatcatcaccacttaagactgacattctggagatgttctctcaaacagtgttcattcaagaaacagttttgaatacttaatagatgccatacactgtggcttcaaagagaaataaaacacatatttcttcattcaaagatgcagcaggaaaacatcaactggtaatggaatttgattttggaactgttgccatttgggggaaattttgaaggactgatttagataacagtggtgaagaatattttaaattattttttctctccttcctcccccatttagatttggaagtagcaaatgggagtggacttgtcaaaattatacttgtgatgatgacgggaaccattttggatcccactgtcaaccccacctgaaggtggtaatgaacttctgctggtttctttgacttacgtaattttcattacatctcctttcttttctactctttattttatacctgcttgatatctcaactgttttcagatttattaatttctttgcattttataatctgatgtcacagatgatccaatatcatccctctggctctaggcaatttcatcaaactgtgtcattcattataactggctgcttttgtggtatgctagcaaattttcaatcagtatgatagcatttatagccaagttaatttagattagttagcaaatattatgccatgagatcatgtataaaatgatatcactagggcccaaatatgtagtgtataatgtatttctttactcattaatttgaacacttcccacagaaaactgcaataagaagctcctggcataatttctttttaataaattctgaatgctgcctattacttttgattttcttattctccagatggctacacatctacactctattttttagttatctctctaagcacagatttcttactgggtgctattatttatttattttcatttatatctttggtttgtcttaaaacaaagagaaactgtttcaaattaactgataatttacaaataggaaattagtgaagagcttaattttccagtatgacttaatatctctcaagagctataccactcgatgaatttctgatttttacactaaacattaacaatttaaaatcatgtagtagtgaaaattatacaaatcctagaaaatatattaagtaatgcttgtattgagatctttgataaatcatagtaatttaaaaaatccaaacatttatatcttaaaacctttcaaaaatagcattacttactttctttcaaaatatttcaaaaatagcattacttactttctttctccccatggtataatgataacctcatagtaacatctactttgattttcttctttaaaagtataagaaagtacctttccatacaaagaaatcactcttgttgaattactggtcaatcatggagtgggaagctgttaaggtacattactgtttagaatgaaacgtgtaataggaaaccttagtatattattaaatttttcaactaatggcttacagctatagttagagggaaataaagcttcattatcaaacttcaccctattcttctttattttcttattagttttagtctcatattttccttccctttgaatgacttactgggttctggtaaagaaggtaagaagaagaacactgactgaatagaagatgacggggtggttgggaggtagtacattacctgttttcaattttcgtgtttcaggacctctaggaggaaaaataatgacctt

SEQ ID NO: 39923 - DNA, 1748 bp, Bovine  19866880830677
  misc_feature (1)..(1): n is a, c, g, or t
ncatccaactttctatcatacattgtttctatgtaagtagtttttacctattctttgaaatatagatgaaagttgagctcaaagtcagcttcatgaagaaaccctccatgggctgtattttgatatagatgcccttcttcttgaactattcaattctctcctcatttatcaccttgcatttgttggttttcctcattccacttttctcttccagtctatatttcaaggcagagacacagtggtaacaattttacatccacatttcagcacaacgtctggcacatgttagtcactcaagggatgtttgatgaatatattatttgatgaaaaactaaagcattaaataaaaatattgtttttagaaatacagagcaccatgaaaaatgatcttttgctaagtgaaaaaaaatgtattaaatgttaagtatacaatcattacagctttgtaaaatacagatgtagcaggaaaagaatataaagattcattcatacattagtggttagtgagttcactgatgacttcttttttcagagtaatttcagtaaagacttttattgtgtgctaacttgcttcagtcatgttcaactccttgcgaccctacgcattgtagcccacctggcttctctgtccatgggattttccaggcttaattcatataacaacaaactatggtttgtattctaattggcattatctgcttaacaaatttcacttgtatatcattcctctttgtcttctattttctgtcatcacacaaaggaaatatacacaagtatggatttataaagttaaaaaaaaaagtctctttttccccccaaagttttcaacacagaggtatagagcaatgtttaccaatcaaattgtttatgcaaataactgcatctagattggcctgtaactatgtgcagtggaaacgatcattcacctctgatgagccaagcagatagcatatgcaaatctcagagctgcataatagctttttctggacctctaactttggtttcctttcagaatattagttttaacaccactagtctacaaacttcatggatgttaactggtaagattttgttttgttgggcttttagtttttggttagtttttctggcagagtttttcagtatataaatgatcacaaacatattacacataagtacttgcttttttataatagcaaatatgaaatgtatagacatttgcttacagactattgaaattaaagtaggcaattttttttgttttagactatatatcaaatgacctttatagtaaacattaagaatatgaatttaaaataaatttatattaaaatttcactgaatccaccatttattttacattaaaacatcttttcctattgagttttgaaaattagtgttatcttttgtgtagtaatttattttgctgatttgttattagcagtttagatataaaaactgtatcccatatccacataggtactaattttcctattcatatatacaaggcccttctttatttctctttatccttaaagaaaagaaagaaaatcttatactaacattttctagtaactggattatgattattagtgatttttcactaatattataaatcagtcatttttatacatttaattagacccagcataatgcaccatgactcaaacagtatgctaatagtaaaatacaagccactgagagccatactaagtttctcaaagacagttggaagaaagcaaatttaaaattagaaattacaccttttt

SEQ ID NO: 39924 - DNA, 1163 bp, Bovine  19866880839896
  misc_feature (1)..(1): n is a, c, g, or t
naaaagttgaatattcatttccgctcatttctctgcgcctcgctcctcctcgtcgcctctgccctggttccctacagcgttcacaactccatctgcagtgcagaattgtgagcactatttcatcctcagggacagtccttctctaccgtctgcactagcagcaataattccagcaggacttgtttaaaacaacagtatgtcatctcgagacaggagtttctcaaaaggctcttttaaggtacaaaggctcctcctatgatctcctttccatttttatctctagactccctttttaaaaaataaactgtagtgtctcaaaaagataccacttattctttttgagacactctctaatatatgtaaacatataaagtatttatatatcatatgtaaacatatatataaagttaaatattttatatttatgtaaaaatttgtagtatagttttgaaaactaaattttagcctatagatgactacaacagaccctaaagaccctaaattttgccatccaacagtttaagaaaatgcatagactttaacttgagtgtattattagaatccttgttaatttcagattattatattctctaagataataaattcctttagtgaattagaagtactgtgttcaacttatcttgaaataatgtgactattgcataaaagaaaggaacccagtacaataatgattcttgatgaacaggttacagatgtaacagaaaatttactttgtgaaggtcacttagatgggcactgacaaaagaaattaatacagctgttaagcagaaacagtatatattggaaatcatctattgttaggcaccaagaataactgataagtgccaagttgtaccctaaaaaatgggaatgtgactttcctttgccactcaggtgtgtaatctctgctaagtcccctgctctgccagtggttctctcaggaggaaaacattcctgaagacctgacggatctctcaagactctggttcaacagctctgactcagctctgagggcagaatggaaaaatctgagggagggaaaagagaaagaaaatttgtctaattcaggtccgtagtgctgatggtaagtcacttgagtcatgtccgactctttacgacgctatggactgtagcctgccaggctcctctgtccatgagattct

SEQ ID NO: 39925 - DNA, 1739 bp, Bovine  19866880871579
  misc_feature (1)..(1): n is a, c, g, or t
ngggacgttgtattctaggctgctactaataatctcatcagaatgcaaaagcagcgactgtgttataaaaccaatgatctgttatattctgcaagaatttacaaaagcctaatgtcatttactacaccatgagaaccatacttggataaaaaaaataaaacacaacagaattcaaaaactgattacagctggcaaaaaaaaaaaaaaaaagctgtttgccaatgcaatgctttaaaggtaaaacatacaacagagaaagacgtggtatccggtgatgacttcagaagggaagaagtacgtgtttgggtatgtataggtgtcgtatgtcatttagggccgtgttgaatcagggcattccttcaagcccaggattctcgggtctgcagttaactgctgagtgtgtgttgccagttcaggctgcaaaagagtttgcttttttttttctttctcagcagcattttggacaaaagcgtatctctagcagtcttaaactgttgaagtccatgttgcggcaaatggatgctaaaaaaaaatccaagggtctactaatttgacaatttagcctaaaagagattggaattcatgggagatatttgagaagagaaatgacattcagatgtgagtttgtgaaacagtgctctagcaatcgttctgagatgatgttggaggagggtaagcgttagtgtggaaagtgaagaggaaaagaatggttcccattggtgttggtggtagttgaaataagtagagggaattggatgaatcagaggtagatttaaaaagaataatcaataaatatggggtgtgagcaagaggtagatgtcaagaaggattgtgaggtttctgtcctgcacatgcaagtagatatttggccaattattgaggcagaaaggcatgaggagaaaaggtttgtgtaagaaatatggtaagttaaatttctggagctctggtgttcaaggcacctatgaaatatctgtaaagttttaggaatccgaataggaatcatcatgaaaacaaaaatttagggatcaaagaagaaacagtgattgaaggcaggaggagaagggaatgacagaggacaagataattggatgggatcaccaactcaatggatatgagtttgagcaagatcctcgagttggtgatagacagggaagcctggggtgctgcagtccacggggtcacaaagagtcagacacagctgagcgactggattgagaagaaacatgtggactattggtaaagattagagtaatatagagcttcccttctggattgcaatataggtataatatagtgtaatatattgtgtagtgtaatattgtaatatagtgtaatataggggaagaaaagagtaacatcaaatgtactctaagaaatgataaaagaatttttctttgcttttatacatgaccatatatatactgttgaatttttgtaggaacttttttggggggctttttactatctattgttcgttacattatattgatatttactatgtgttttgcattgtactagactagtatgtatgagacctttcctatattctgaatatcatccaatacagaaattattagaaaattgtcaaagctcaattaaaaaatttaaattgtctgatacacacaaatacatacatacacataatatatacacgatgtattcccagtgaaatagccatttaaaagagttcagagaagtgtcagatttatctattcatctatctttatatactttatcta

SEQ ID NO: 39926 - DNA, 922 bp, Bovine  19866880893054
  misc_feature (1)..(1): n is a, c, g, or t
nattttttaaggcaatgattgccttaaatatctgtatccacagaacctacacagagtaggtgtttgatgatgctgaataaatgaatgaattccttggaggtaatgaagagtacgattagttacatacacataatatttaaccaacgaatgagaacaatgttatcatactgcctcaggctcctctggccacgatgtctgagtggtcacatggaggatgaggacagataacacgtgggcgttcatgaccactttccttgatggccttcatgaatgaaggcaggtggtagaaaagcctggagagactagagagcttgagatttgtaaaggatgggaaaccttgaatgtcaacctttgctttggctgctgctgccctagtttctaatcagaatggagcagtgagtttcttctggaccataatgagcaggactaatattcccatcctgctgatgagtgagctgaagccaccggttaattgactggtcactcccaaattccgagccaagctcccctttggttgtaaagtttgcatctgtgtgccctacaccgaggccagaggtcagaccgaactgtcccacggatgctacatggggcctggggtggggacaacgtgggtcctcgctctgctccacagacacagataatgcaatgcactatgttaattaccacttaaagctgatacagacgaaaataaacaaatgcgcacccattctggttccacttctaagacctcatcctgagaccgtaacacagtttgttttacggcttccccagtcacgtgagagccagcataatgaaacctctctaatctctatttttctaaagtctgtgtagatacagatggctctgttttggtctctgggttttattcttattttgccacaattttaaccttttatgtatctctttctgtgagcttccagca

SEQ ID NO: 39927 - DNA, 1821 bp, Bovine  19866880925074
  misc_feature (1)..(1): n is a, c, g, or t
ntgtctgttactgcacgtaaactctgtatttcaaaacaggtccttgcaaagagaaggcaggaacggctttggcaaacagagttaggtttaatttaatgtggcaaatgatggagcagaatggaaaaaaagaaaaaaaaaaaaggacacaggaagtgatgagtttctgacactaagtctcctgggctcactgcagactgcagtctcgctgttggagatgatggttacggtgggctgcaacgatagggctataggcatatgcgactgagttttagttgatattcttgcaagacaggaagtgaacaagcttatttcccactgggaaaggttcagacatgattaacttgggcatgaccaaataggtcaataatatgacaatgaatttctagcacaataattaagtgggaaaatttgtgtgatttgttcttcttgttctgcacataccaataatgcattagcatggattcatttagtttctttcattaggtgaaatcacatagctacaatttaagatagtgacggttcaatttgaatacttaaaagttatttctgcaaagcaacattaaattatatttcttttatttttagcataggcttttgtacttcagcagcagaggagtgatctggaatctatctatacatgcatactaattgtttcaggagtgattctcccatccaatatcaggtcttactgataccagtcaccaggataaagggaagaattactacagagaatgaaacagataaaaacaaatccttcaccttgggatactaggattcaatgtatttcacacttaaatgctgttcctgtcagttattaaaatattttaacttttctttaaataaaccatctatctatatatatataatactcaaatcagcattggaagagaagccagaaatcataaaatatactatttcatttcatgtggtgcttcattctagggtacttgcaaaagaacaaaaataaaaccccaaagcaaaaattaaaaaaaattttttttcttaatattattctcttaatattagtaatattcttttaatattattctctttcaatttaacatcaggacttaaatgtaagaggtttacataattgctctttaatatttcatgttcttgtttcaccccgccccctccacgtccaagatactcttcagtcctttgctgccatttgatataggacaattttccccctaatactggaaactatgcagttcataagtatgccttagcaaatagaggacaaaaatgacagttcagtagcagcccaatgcaagtatcaaggaagacctcaaaccattcattagttgtctttgcttatggcttcccaggtggcgctagtgataaagaccccgcctgccaaagcaggagacataagagatgtgggttcgatccctgagtcaggaagatcccctggaggaggaaatggcaacccactccagtattcttgtctgagagattccatgcacagaggagcctgacagcctacagtccatagagtcacaaagagtcagacacgactgaagcaacttatcatatatgcatgcacggttacacaactatcttgtcaacaaggatgccatgaaatacaaaaatcaacatatgctctaaatggtggtatgggtaaatgccagtaacctcctaaataagccaatctagaatacttttaaaattttattcccactttagtttgtttttcttttgcaaaatgagactaatttcctggcttcgggtttctggtattttccccatctgctccacagcttcttatcggtcactgacattggttccttgaacacatgggcacattctttcaggact

SEQ ID NO: 39928 - DNA, 2563 bp, Bovine  19866880962079
  misc_feature (1)..(1): n is a, c, g, or t
naaaaagagtgctctctgatgtgatgttagaatttcattagcaaaatttatgtgcatcctttataataaagattacttcagtactgttctgtattgtaagattcttaaattccatcttagattgaaagagaaaaataccacttatacttctaacttctgtcaacaaaggtattaaagtctaggtgctttgctttagctggctatgaccaataagcccatgaataaatcagtttttaaactttatgagttttcaattttggttacaccagaacattaaaattttggttatatcaaaacattaaaataattcactcttagattcttagttttgggaatgatgatcaaatttacaacaagcagtgattaaattatgctctttaattttactttgaatgttaatactataatttgattacaattaagatcccagtttattcagatagtatttaattagaaggatgggaaagaactggaggctatattctgtgcatcaatagaaaacaactgcattttttttaacagccaaatcacaaagacactattacagagaaaaggtcctatgtttagcatataaaataatgttttgtaaataatttaactttcaactttctacccatatattgaataagaaatccagaatctaaaatatgatctgagatggagcatgtagaggataatttaattgttgaatgatttcactgtggaaaattaatgattaggatacaaggaggcatttttattctaggttgcagcttttttgcctgtgttctgcagttaattgcagacatctcaatcgggcttcaacttgcaccaatagaatctttttataggagaaaggaagaaaatttccttggctggatcagaatgtcagagaactctggcatttaacctcaagacacaggcttaactaaactcacatggagaaaggaaccgcagaaaaagcttatcagaagtaataaattgtgtcaagataaatctctgaatgttggcacctttgcccatctgtttaaattacttgaaaatgtttttgtaggtgagagtgaccttgatgaattagatcttgaaaataagaagtctgtgaagttttttccctcttaaacagcaattttcatattaacacaagtgtgacctatttaaagagaaacaaattagtaaggaaaagaagactataattcaaataagttacttaaaatcttcagtttacaacaaactttatgaaatatccttagcaacttgaatatgaagtatttcctttttttatttttgtcaattgggttcccagttttagaagtgaaaaacagaatctgaatatgatttaaatatcagataaacaagggatagttttttaatataagtatgtccagggcaatatttgggaaatacttaactaaaatattacttgtttatctgaaatttaaatttaactggtgtcctttattttactgatagctctattttttagggagcaaaaaaacaatcatataaccccttttattttggttgtatatgtacttaaaactataaatattatgatcttgtatacattgtccttatttatatttttgtatctcaatttcatttgtatgtattatcaagacttacttaacgttatatgactatggaaagtaagaaattacacatgtaaaaattcccttccaacacagtttaatgtattctgcaggtaattcatactgtacatggggttctaaaggcaagaatactgaagtggtttgccattcccttttccagtggaccacattctgtcagatctctccaccatgacccgcccatcttgggtggccccacgggcatggcttagtttcattgagttagacaagggctgtggtcctagtgtgattagattgactagttttctgtgagtatggtttcagtgtgtctgccctctgatgccctcttgcaacacttactgtcttgaatttctcttacgttgggtgtggggtatctcttcacggctgctccagcaaagtgcagccgctgctccttaccttggacgaggggtatctcctcaccgccgccccttctgaccttcaacgtgggatagctcctctaggccctcctgtgcctgcacagccacagctccttggacgtggggttggtcctccaaatgataggccaaactgataggatactgaaagaggaatccccaggtcagtaggtgcccaatatgctactggagatcagtggacaaataactccagaagaatgaagggatggagccaaagcaaaaacaatacccagttgtggatgtgactggtggtagaaacaaggtccgatgctgtaaagagcaatattgaataggaacttggaatgtcaggtccatgaatcaaggcaaattggaagtgatcaaacaagagatggcaagagttaatgccgacattctaggaatcagtgaactaaaacggaccggaatgggtgaatttaactcagatgaccattatatctactactgcaggcaggaatccttcagaagaaatggagtagccatcatggtcaacaaaagagtccgaaatacagtactggatgcaatctcaaaaacagcaga

SEQ ID NO: 39929 - DNA, 1637 bp, Bovine  19866880973238
  misc_feature (1)..(1): n is a, c, g, or t
nagtcaaaaagagagagatgaaaaatagaatagaattgggaataaataaatgagaactaattaaaattaaaagcttttgcacagccaaggaaaccataaagaaagtgaaaagacagcccacagaatgggagaaaatatttgtaaatgatgcagcaaacaaaggattaatttccaaaatatacaagcagctcatacagctcaatgtcaaaaagcagacaatccaatcaaaaagtagacagaagagttaaatcgacatttcccccaaagatacacagatggccaacaggcacatgaaaagatgctcaacatcactaattattatagaaatgaaaatcaaatctatgaggtatcaccccacatcagtcagaatgaccatcatcaaaaagtctacaaatagtaagttctggaggggatgtgaagaaaaaggaaggctcctacactgttggtgggaatgtaaattggtacagccactttggagaatggtatggtgtttcccaaaaaaaactaaaaatagagctaacatatgattcttcaatcccactcctgggcatatatttggagaaaactataattcaaagatacctgcaccccaatgttcaaaacaacattatttacaatagccaagacatgtgaaatctaaaacaaaaatacaaagaactcacttccaaagcagaaatagacccacagacataaaaaataaacttaaggttaccaaaggggatagaggtgggggagtataaatcaagaagatgagattaacctatacacactactatgtatgaaatagataacttacaaagatctactgtacagcacaggaaactatactcaatattctgtcataacctataaggaaaagaatatgtgtgtgtgtgcatgcatatgtgtacgtataagtgaatcactgggctgtacacctgaaactaacccaacgttttaaatcaactatacttgttttctcaaatatgcagaaaaatagaattgggtgttgttagtatcgttacaggcttttgagaggcacctgcagtttatctaaatatgaaaaccactgttacactatggggagagaagagattcatgactggaagggaccttaatagggcttctgaggtgctggtaatatactgttactgcatctgcttactggttatgtaggtagattcaatttgtaacaattcatcaagcctacacatatgaaatgtgtacttttgatatattatatttcactaaaatactttaaaataaaacatgtgctacaggggaacatgtattattttccatctgttttaagtttacctggacaaagtgactttgaaagtgacttcaggccatcgatcaacttcatagttaaataagatcttttcttattgaagaaaactgctaagctttaggtttcagttaactggctctagctttttcataacttagttgtcttagacaagtgaccttatgtctgcaaaatctcagttttctgctttaaaaaatgttatagggtcatttaatgagatattaattctaatcttgtttttcctgaggtaggatggacagccatattctaggcttcccaccacccctctttgggtttcaagatccattcttaagaaaatttctcaaaccagtcctgttgaaagaaccaa

SEQ ID NO: 39930 - DNA, 1567 bp, Bovine  19866881082849
  misc_feature (1)..(1): n is a, c, g, or t
ntacttactataaaaatgaagaaaatgtaaaaaaaaaaaaatttctacaatccaatggcaagaaatactcattcagtgtcattaaaatgaggcatctttctttcaggttatattttttatcaacagcatgtaactgctatgtgaatttgcttcaaggagtaaatattgcccaaatacatattccagcaatgccatacttccaaaatatcatttattttgccaatttagataattccataaaacactttaagaacagaaatcacatacttagaggcaacttatgatatcaagaaatcaaaaaccagtagagaaatgtataaaatacaaatggatttgaaatatatggaaaatgctctttcatatttaaacaaatggaaatttaaattttaactagacagcaatttgttcacctaccatgttggcaaaggtacagatgttaaaaggggtgccatataatgacatccatcaacaagtaagacacccatcctttggctcagaaatttcacttggaagaattaatcctacagataaaccctgtgtatgcgtgttgtgtacccacatggacactcagcagagacctgcttgtaataatagcggcaaacttcaccacgcccctactctccagccctctcacccctctctcacccagccttcatcttctctcacctgggccacagaaggagcatcctgcctcatcttcttcttttccctcattcactctcacaacatcataaaagccagagcaatgtttttaaaacatagataacgtcctgctgctgctaaaacctctccagtgcctttccgtcatgctaaaaataaaatcaacaccactaatctggcttgtaaagacccacctaccctgcctctgcatgcccccaatatctcccatgcctctctggccctcacccttggcgtatttagacatggaggctgtctcaaggttactcaggcacgtccagctcattaatgctctggaatctctgactgaaccccttccccttagatttctcacaatgaccccttctcacccttcaaaattcaccttccgtgacagtctcgagtggccttccctgatgaccccaggtcgagccacggccaggcactcactttctaacacttggtccctttagctttcctctttacactgtccatcctcacctggctgtgttcctgggcgttccatcgtgtatttgtacagattcttctgctcctgtcagtgaagtttcggagagcaggggtactgtcagcttcattcgttgctttattatcagcaaccagagaagtgcctgcacataataaatgtttagtaaatattcgttgagtgagtgaatcagaaggggatggaacacatcccaggactcccctcagatggagcacagtgtggctgttgaaaagaaggggatggtaggcaatccaggggttatcctctgaccaaggctgcaccatcgcacagatctggccttggtctccctcccagaccttatctcagatcctctgtccttgggcttcttggtgtacttgctgtaccccacatttgttattcctgtctctatacctgcatccaccc

SEQ ID NO: 39931 - DNA, 2734 bp, Bovine  19866881115442
  misc_feature (1)..(1): n is a, c, g, or t
naatctaatataattgaacccctaggtttggatgctaattagtatttttttaatcttaaaaccaaaataatttcatataaattaaattgtcagggtataattcaaaagttgccaaactttctagtacattttctttatctggaaaaagatttctgaggagtaacaaaacttctggattaaaaaagaaattgaaaaagaaatttaatcagattaaaaaagaaattacagcataataccaatgctctgatttttagtaattaaatgatatatcagttcagttcagtcgcttagtcatgtctgactttttgcgaccccatggactgtggcacgccaggcttccctgtccatcaccaactccccagagcctgctcaaactcactctttctaaaagcaaattacatactctggtcacattctgcacattctatgctatccctcaatttcttaacattatattatttcagtttagttaaacatgtaagtatcaaaatcatatagtacgatatgataaactagaagaaagcaaaaattatatttacaggtgtttcagataataattgagaatttggaattggatgctgaattttctagactaacttgctttaattacatatattacttggggaaataaatgatttaatctccctaagtctaaatttccttacatgtaaaatgtctataacattactttggtatagggtcactatgaagattaagacatatatttatacaacttgtgtaatacacagagaatgtctgatacctatagcacttaataaataaatgatctcctgtttttaacgtcatagtaaattatcaacaaatggaagtttaagacctatgcctatattttaatttctgtagccacactgagtcttagtactgcatatagtcctgggcagatagtaggtgctcagtaaatatttgctaacgaaagagttattgaaagtgattctgccagctcctatgcagaatgcatgaggaagtaagtgaggcattcaattttgtctcttattataagaaactgagtctaacactcatgaacatctgtgtcaaaggtaatttaaacttttattcctaaagaaaaggatgtatatatagaaatatagacatgtcttataccatgaatatttctcaaagtaaatgatgccttgctttaactcagtctcattgtgtatagtcaaaacattgtattagaaataggaatgtgctttcttttgtatgcagacacttttggcaattccaagaaatccatatatttcataagcactgcatgatggcacatcatgtctttacattacttaaaaaaaatcaactgaaaaagcaaagatgtcacaatgtatcctactgcagttgctttggtcagctaaataatcagagcagaattaggagaaaaaatagtatgataacaaaaaggtgaattcgaacctcaggcttatgatgtcccagggcagatattaatggctgctctttctctaaattcattcctttccttccatagtttctgtgtctcatcgtgtaactgatatgttacaaagcactagcttatttggggagtttcatttctataatgtgtatgcatttggctacgtttgttatgtatgcaactattagcttcccaattgatgtctctaattttgtgtattttagggcataaaatattctttatggatgaaactttgtctgcttaatccatctgccagcaagttctttttttctggccaaatattgctcagggccttcaagtgtttcttcatctgtgaaatgaaaagaggtacttccaaacctaaaatgccttgatcttcatgtccccttgtaagtttaaaaatctttctacagacttagagactaagtagcaaagaacacagcactctggatgcacacgtagctttaactctctgcagtgaaggcccaacgatgagctgggcttgctgtttttcagtatttataactcttcaaaggtggtcttgatcgagggatttgttttcaacaaaagcactttcttaaatactggctatcaacttactttttattgaaaagtagctgtaacccttcttagtataaaagatcaacattgaagcttagagttagttaagaatggtagatcagatgttcacagttgaattctgtctccctaaaaatatatagaagagtcctctccctagtacttgagaatgtggctttgtttggaaagagtaactttacagatgcaattaagtaaaaattaggtctatagtgtgggctctaatccaacagagctggtgatctttcaaaaaggggaaatttggacacagacacagatacacagagagggaaggtagtatgaagattgccatctacaagtcaggaaatgcttgaagctaccagaggctaggcaagaggcctgagatagatccttctctaaaggctttggagagaatatggctctgttaacattttaatcttggatttctgttttccagaactgtaaaacaatcaatttttgtttttctgagttaccgagtttgtggtactttgttatgggggccctaggaaatgaaaatactatgctctgaacatttggactcagttttctagtaatatcttgggataactatagtctggatcatagaagtttctagaaacagaggctctcacagtagaataatttctttgcattatgaaatagggccattcttgaaaaaatattttacataattatgaaatgaaccatgatataaaaatatttataatg

SEQ ID NO: 39932 - DNA, 2383 bp, Bovine  19866881146896
  misc_feature (1)..(1): n is a, c, g, or t
ntgacgggctaccattttggggaatgtggctctctatgtaatatgtatatttcactttcctttatagatatgaaaaacaaacaaatttattccaagaaaggtctagtttgaattagtatagctcttctaaagtgacttgaggaaaatgtgtgtcataaaagttaaacatgaaaatatgtcacaaattctctgaattaataaatgggtagcaaatacaggggacataaaatcctctaaatcggggatcggcaaaccacaccctccaggtcaaatccaacccccgtcctggttttgtaatgctggtaaaccaagaatgacttactagatttttcaaaggactaaaaaaaaaaaaagcaaaaccaaaaaatagtatatgacagacataaaaacaaaagatagctcagttgtgaccgactctctgcaatgctatgaactgtaacctgcctggctcctttgtccatgggagtttccaggcaagaatactggagtgggttgccatttcctcctccaggggtgattcccaacccagggatcaaacccccatctcttatgtctcctgttttggcaggcggattctttaccattagcaccacctggggagcccatatgatgatagacacagatgtcccacaaaagcctaaaatattgaccgcctggctctttacaaaaaagtgtgctgatctctgatttaaatggtcagttttattattgaaaatacaaaacggcaatatcatgtcactggttataatgagacttttttcccctggagtttcaaagtaaaaatttataataattatagaaactgcatcatgtgtgtccaaggcccttcagttttaaattgcacgatccgtcatattacctacacatttttcatcctattattttcacttattatcatgtcagatgcactttatgaaaatatgttaatggcctcataataatctattgtttaatgatattatattttaatctatccacccactgcattgttgggtactcacgttgatggcaatttttcaaaaacattaaaagaaaataaatgtccttgcatacacctagtatataatcattttaaagaaaacaattaataaataactaatcctactgcatgtgggctcagtcactcagtcgtgtccgactctttgtgaccccatagactgtagcgtgccaggctcctccatccatgggattctccaggcaagaatactggaacaggttgccatttcctcctccagcagatcttcctgctgctgctgctaagtcactttagttgtgtccaactctgtgggaccccatagacagcagcccaccaggctcccctgtccctgggattctccaggcaagaacactggagtgggttgccatttccttctccgatgcatgaaagtgaaaagtgaaagtgaagtcactcagtcgtgtctgactcttagcaaccccatagactgcagcccaccaggctcctccgtccatgggattttccaggcaagagtactagagtgggttgccattgccttctccgagcagatcttcctgaccagggatcaaacccaggtctcttgcattgacaggtggattctttaccactgagccacctggaaagcccttttcacttactatatccagtttttaaaaagaaagacatgacattgtaaatcaactatacttcaataaaaattaactagaaaagaaaagtaaaagaaatacatggtagagtgactggatgtttgcagagtgagtcagtctctacactttgactcaacatggctaaaaattgcttaacagaccggatgtcattgctctctgtttttgtgatttagtagtgtatccatgttgggcactctaatgatttatattttgaaagtagtattgtaatcatgccataaggcattagtgaactatttgacaagaaaatcatctgatgaaccttctgaaaagtaaactgtatgtgtaactgatactgaggaatagtaattcaaaatacctgttgaacagaaaagggcaactttgtttcatccttgagattggagcagttccttgcaagaccatcaaaatgcataattggcagctcttgcagatggcagaaacccaggtgggctgataagcttttgaattacatgatcaagcaggaactgataaaatgaactatatctggaatgaagaatctgcatatttaacattgaagccacttatatcaatgtgcatatagggattttagtttaccacaattttaatatgagccaaagcaagctactacaaatttagagccaacgccataattcagctctagccagcaagtaagacatcttaactccgaccatatgcagtatacagtcctaacatcacatataagcccatataaagtacgtactgggatttcatttta

SEQ ID NO: 39933 - DNA, 1473 bp, Bovine  19866881211332
  misc_feature (1)..(1): n is a, c, g, or t
nacacggcactacagcagcacaagaaagaacagaatccatcagttcttatgactgctctatcctaatactaagggtatgagttacaactttcctttccgcttctttttcatgttacacacattatagatacacttaggtcactaaacttgctgtctctggtcacacatttatcagcttgactgactgataactgtgatttttaagataaaactaatcaatctctaaccttagatttctcactgaatacatgaaccagaaccagatggcagggtgttatataagatcattttcacctacaactccataatgaaatgaattaacagttttagtcaaacattaagttgatagagctctaccttgtaaagactgtgcataaaaaatcgggtaagtatttcaagaattaaactcaggcaggagactcattctctctaaaaatcagcccaactccaacatccttgctcagaattaatgcataagcgtaggatccttctggacctaaccagagttgaggtttgttgagactgcaacatgaaacttccttttgagaaaaaatattgatggtctgattgtgtgggcaaagggttgtttatgttcattaactgccaactctcctcactcaatgaattagatccttacacagtttttttgcacaggccctataatttaagattttatcactaccattcttccttctcttctgcttttaatatgtaattcctttacatccatcactgaaattattgtatcatgcctttatctgaagtcagttctctgaggaaaaactcttacccaaacacaatatttttttctcacattccgttaccccttttaatatcctggttttcttccaaaatgtagaataagctagcgctcataagtttagaaataatttcttctccttgcaaagcctctgtgtgatgaacagaaagtactgttaacttttttttttttttaatgaaaaacaaagctccttttagttttgttatacactggtggtgggggaacttaggaagagacctttccctgagtaaagaatgaatgggcagattgatagaatttatccaatctaaagaaaagaaataaaaatgaagaaaaagaacagattctcaaattattctagggaaaaaataaaatataatcaagtccagaatatgtgaagttggagggtctggaaggagaagagagggaaattttgagagaaaaatctttgaagaaataacagccaaaatatttcaaaatctcatgagaaacatcaactcacacatccaagaagctcaaaaatctcacacaatacaaaaacagaaagagaactatgtctgagaacatcaaagagagaaaaccaattaaagaggaaatctttaagcggccagatacaaaaggacatattacatatagaggacatggcatgaataactgctgtatttctcaatcacaaacaagaaaggacaggacataatagaaaaaaaaaagtt

SEQ ID NO: 39934 - DNA, 2077 bp, Bovine  19866881216593
  misc_feature (1)..(1): n is a, c, g, or t
ntcggacacagctgagtgactgaactgaactgaactgaacttccacttgactggtgaccataactgcttttttaatatttcctgtctgtctttcctctctttgttcttcctcctggaaactcctccaacacaaacatatgtatgaagtcttccctgaactctcagtgcaaaccaccactctctgtgttcccagagaaacttacacatggggaactctaactctatggacattgcaccgcagtcaccagctcttatcatagttcttaggtaggtgctcaaatgcttgctaaaaataagcaagtttgctcaatctgctaaagaatcatcagccaatgatttattgttattgtcacacataaaaatgctaagatagacataatacacagccttttacaggtgttctcaagcccactctaaatacccacctaatcacacattctgacctcattttatcaacaagcatttttgaaaacatgggaaacaataagaaaacaaacagatgagcctattagcatgaaatatgcaaaactctgtgttcttgtttgaagggttgcatttattgcccttaatccagtttacaaactgcaggagttcaggatattcaccgacctttgtgtttgatgaagacatagctatatatttaagagctggcagcactatcgaacctggctgtgtttgtagcggtaattaggcattttagcacatattagtgtaaacagctgtgtaaaatccagatcaatgttagaaacacaagttatatggttcaattaaaatattacaagactggtttctgagggtgcccggaaaatgctgagatgtgcctgggaaaatccattgttcccatacaatgacctgggctaacaggtgaatttaaggaaattgtctttcggatcgtatgaactggagaggatacaataaacaggggactctggggccagggttccttttctaaacctactctcagtcttcctgagacatcatgtgtcttagtggagaaagccccactattcctcgcaggaactggaagatctcaataaaagtaaacagggcaaaagtaaaaagacctttaatgctacaccaaaaagtcagctgtcacattaatcaagccacagctaaactctgccaccttttaggagttagcaaatatcaatgtctagctcctacactgggaaagcttcacgcatagaggcaaaacagaggatctgggaatgaacatacctgatttcaaatctttgacctactctttatcaagatctattctagatctcagttttctcacctgttcaatgggcataatacctgtaccatgttaaaaattgagagtacatatctaccaaaagtacaatataggatccatgttggcatcggtgatatgaatatcccaagaagaatatcataagcaagagataaaaacagactcatactctatcactttatagattagtgccatgtgctcagtcgtgtctgtgggggaaccccatggactgtagcccatcaggctcctctgtccatgaaattttccaggcaagaatactgaagtgggttgccatttcctactccaaggcatcttccagactaagggactgaaccagtgtctcctgggtctcctgcattgcagacggattctttacccactgagccatcaggaaagccccattatgctctccttgaagattccagccctccattgctacctgacaatggtggatatgttgccagtgagggtcgagccaaagggccatctcagtccattggtattttccgatggcgcagaacacctgcggtcagaagcaaaattcagagatctgaatgccagctctactaagttctatgccggatgctagacagtcaaatggcccaggtaaattcctgttgtccatggtgggcgagagacagatagtgtaaccctgccatctgttgacctagcagcatattgtaccacttctgacacgatctaagggaggaggataagagatcaatatttacaaggatggagttgctaactttattttgcaaactctagctgtactgctgcactttaaatattacacgcaggctggtgaaaccagagaaagat

SEQ ID NO: 39935 - DNA, 1117 bp, Bovine  19866881335156
  misc_feature (1)..(1): n is a, c, g, or t
natacaaagtagcccaatcagtcatcagggaaagtgggggcgtcctgcttcagaaaggggtgctgtgtgtgctcagtcgctcagttgtgtctctgtgaccctttggactgtagcccgccaggctcctctgtccatgggattctccaggcaagaatactggagcgggttgccatgaccatctccaggggatctttctgactcagggatcgaacccttatctcctgtgtcttttgcattacaggaagatttgttacctgctgagccatcagggaagccccagaaagggtacagagctttggacattatacatatgactccttgtgaaatcagagaccttgaatagtaatcatccgtaatccccatcctggttaacattattgacactaaactcacagtagaggggaaatttacaactctttgtttcagctctttttatcttgcttttatacactattcaagtgttcactaatgtttgggatatttggtaccttgtaaagatatcacagctcagtaagacaaagtgaaaaatgaggtagataatgtaacaataataaattatcttgacattcactttctttatggtccttcaagggtcattgttcccaatttataagagaactacatcatcaaaatttttcttcaattatctttttttttcttttatcccccagtatgactgcaagtagagaaacttatcggactgaatatagtgttgaaattttgctcttaggaatttcatctgtgtagcttttgatgttcttacaaagccataggatatttttaaatctcttttcaagaaagactatttattaaattaccccaccttccctcaaagacaaaagacacgcaagttgtattgaaaggactggagacaggaaggcctttctggggagaacacaatctaggagtcagagactgaggacctgaagtagagttctagcagaagacacggaaagtggggatgcgagatataggagaggaagacgtaaagcttagcaactaataacatacaagagctgagggagaaaagaagttggaagaggactcaaaaagttagttaggatgacaaggtcgcaatcttaagcaacactttaatcttcagcttctttttttctca

SEQ ID NO: 39936 - DNA, 2205 bp, Bovine  19866881417937
  misc_feature (1)..(1): n is a, c, g, or t
ncatcagagtcttttccaatgagtcaactcttcgcatgaggtggccaaaatattggagtttcagctttagcatcagtccttccaaagaatacccaaggttgatctcctttagaatggactggttggatctccttgcagtccaagggactctcaagactcttctccaacaccacagtttaaaagcatcaattcttcggcgctcagctttcttcacagtccaactctcacatccatacatgaccacaggaaaaaccatagccttgactagacagatctttgttggcaaagtaatgtctctgcttttgaatatgctatctaggtttacacccatcaaaatttaatttgattatggaatagtatgctttctgttattactgttttaatatatattgggctacttagtatctatacttttgattcctctttcccatcctgtatctcctaacacatgtacatatattcccaggtagtgctagtggtaaagaatcttcttgctaatgcaggtgacgcaagagatgcaagtccgatccctgggtcaggaagattccctggaaaagggaatgacaacccactccagtacttgcccagaaaatcccacggacagaggagcctggtaggctacattcaacagggtcacaaagagtcagacccgactgagcgacttcaccacctatttaggtgcagcgttcagtgcttcacacatgtagaagcgcagcttcgtgactgccacatggagatgcgtagcagacagtagccatatttattttctcttatctaatgcaataaagcgatactaaagggaaaatacacctgcgatgaagaaggaaagaggcaaagataaaggaagaaggaaaagagatctcataataagaaggaactaacacactgtaggggaaagaaaggaaacgtgtggaaaggttctctacgccagagagcaacaggctctgaagtagcaagggaccaaccagtaagtattaacagttctcagggctaacaccggagaaggcagctttcttctaaagcacttttaggtgtatttagctagaaccgtcacaatgtacctaagctttcatttccatgggatcttttcgtttacatagtacctgtgttggaatataaatagtgagaatggagaaaggttaccatgaagtcatacgtagtattgtattgactgtttttttatttcctttttagctttttgagttactgacacattattgcagcaaaacatatgtagggtcaattcatgctgaatagttattagaaaccatgataacaaaagtcattacactgcagttcagttttgacagtaaaatttctgcaacattatcacaaatcctcatgcattagtgcaatgatccttactatagtttcatattagaatcaaaagattgctgtagcatgcttgatacaaaaagtcaagcaagccaaattcttttctgcttttacagataacatttttgctctttttctatgtacatcatgcagatggtagctttgttttatatacttttctcaataacctatgagtacattgcatatatttctttaaaatgaggatttttcctagaaaaacaacacaattctgattaccagcaccataggaaataatttgaaaatgattttatatctgaaacaacttcaaaaattctgaagctatattattcactgtggtgttatcgttcccttcctcagataatgtgttagctgtgggtatagttttttttttttaatcagtgttttactgtgattagataatacaaaatttaaaaagggacatgtatattattcaggatgacttttatagaaaagctgtgagaactacccagctgacaaagggaaatattttttaacgtctacttgtttattttttaatagttacttatttttttaatttaaaattattttttaatttgaggtataattgacatgtaatatcatacacatttcaggtatacaaaataatgactcgatatctgtgtacactgcaaaatgatcaacacagtaaatctagtcactatctagcaccacggttttagtattttctgtcctgcaactgccaagtatctataatactatggactatagtcaacatgttgtacattacatcccatgattaattcgtaactggatttttgtacttcttgatgcctttcacctgctttgccaacttgccaactcccctcccctctagcaacaaacatt

SEQ ID NO: 39937 - DNA, 1474 bp, Bovine  19866881418156
  misc_feature (1)..(1): n is a, c, g, or t
ngatgaaggatgaggagataaaaagaagaaagatgttctgaagttggcaaaggatgtgcagaggggataataaatctcagaaggaatgagtgaggtagagtgaggagagtgagataaaatgaagacagttatttcctcctgtgcctttcattgaccctacttagacgcctgagggggtggccacaggcaatggaattctggattactcttcacttctttagtttcttctcatcttttccattttcttgtaactcttcccatttctctctctttttttcttaagaggtccagtcaccagacatgattgttgtctatctcttgagtgataaagtgggggcaaggagtggcagtttttagccagtggtagaggggaaggaagaagaaaggaaaggaaatctcccatgggcagtttttctgggggagttaatattggtaagtgacaaatgtaaactggttctctgtaagttggggcatgacagaatataggcatttatattagagtattacaaagcagtctatcactaacgtcattaggaacaagaccccccagccttcccttgtcatgtgttaattttcatctggctttcaaaaaacaattctgcacgttctttcttagataaacctgcctgctgtgcactcttttctcttacaaaagttccactctgttcaaatcacttccagggaagaagaggttaaacaggagagttcatcgtggattatatatctaccagggcttttttgtttgtttgtttgtttttggtaacatatggaatccgtcattgcgaagagaagttagaaaagacataataaataacattttttgttcctgatccaaatctgtttctccccaaagcccagaaactgtctttctaacactgaaagatatgagccaacaaggcagatcttgggaaagactgtccctttctcttcaaagaaatattcttggagggtagcctgggctgttttcctttaagattttctagaatgaacagatgtaacaattttctataatttgccttggtgcagatgctaaaagagaacattcaccataaaatatatgcagtatatgtaatttcagctggctgttctggggttttaaagtaaaaatgtgtacctgcaagctgttttatggtttctcagtcataatgatctctgttacagagaaggctacaatgcaacccctccttcacgtgcaaggtttccaaaaatatcttgatacttttgcgtgttctgcaaggcgcagcaaggtgcagtgttctgcccatgttgggtttgggaagggtattcaaatgtttagtttttctctttgacacaattacagagtaattgcatcaacagggaagatggtggataatctgtggacgaagcccttgcaaaagatgctgtagcccgaacaggctttaagtaataaaggctgcagaggaacttcagctaaggttatcttcagcacgacggcaggatgatgtttacttat

SEQ ID NO: 39938 - DNA, 901 bp, Bovine  19866881430027
  misc_feature (1)..(1): n is a, c, g, or t
nattttggagccctaaaaaataaagtatgacactgtttccgctgtttccccccccccccccccatgaagtgatgggaccggatgccatgatcttagttttctgaatgttgaggtttaagccaactttttcactctccactttcactttcatcaagaggctttttagttccttttcactttctgccataagggtggtgtcatatacacacatacaaacacatgtacacacagactctttctatggagaaccccaaacattgactaatacgacagctatctaagaaaggcaaatatggcagtttcaagtagtagcaatttttatatttgaaccttttcagaaaaatcaatcatttcatttattttatactatccaaaacaatagatgatacttggtttatcaaaaagaaagtaacaatcttttgctatacaatttcaaacattagtgaaaatctgatagaatcagaactagtatggtactgaatgcaattacgccatattttccatttattttgttgcctttcagtaaagttcagaaagaaaattatatattttctttaacagaagattatgtttcaaaaggagaaacaaataagcacattcctctttcaacatgagattaatttacaatctaattactagttatcatatataaagatctgtgagactcaactggttgactgcattaatatatttttagaacaagtcatctttaggataaaactgttgattactgctcatccctcatccattgtagtaggctaagataacttatttaagattgaattgttttggtttcatttctaatctcaaatgtttattaagaggcactgttttaagaggaaaaaattcctaatgcctcaatgcattacatgagctaatttacctacaaggtcacaatcca

SEQ ID NO: 39939 - DNA, 697 bp, Bovine  19866881580120
  misc_feature (1)..(1): n is a, c, g, or t
natctacattgtgggtgacaaggatcgagaggaagcacggggtctatttaatttagatctgtctgtcctgaaagatgtggctctgcgtgtgtgcgtgcgcatgtgtgtgtgtgtgtgtgtgtgtgtgagtgtgtggtttcatttttgatactgctaccaagacagatttaagctgtcaagaaatcttcatagaattatggcttgtcagtaaccttacatgtaaatttcatcacttgcacctcctaatttgcagattagtccacaaaccaagattatattcttgacctctaggagtaggggattcattcaattaacctgcaacagttctactctctgaacatggaactaatcccagtgccttggatccgtttagactgtcatgggtgcgatgggtcaacacagattaagtcccattcatctgcctggagtcttgactaatagcacctgttggtgagatagagaggcagccccgtctgatgaaaacccagagaccagtattctgttcctcatcctaccactaaatcgtcatgtgactctgggtgcaacacctctgctccgtcagtcatttaaagtgaaagccaacatcatgaacatgctgtagaaagtgcctacaggatctggtttctgctaatctctttagccccatgacatgtgtttctttccctcactctgagtttagccaagcaccttctttctt

SEQ ID NO: 39940 - DNA, 1319 bp, Bovine  19866881812738
  misc_feature (1)..(1): n is a, c, g, or t
naaataggattaaaaaacacaacctgtaaagccaaaaagaagcttctaactttaaatgcaagccaaaggcatcactgaggaccagcaagttaacatcctgaggaagaatgtttgctcaacaaatatttactgagtatcttctgagtgccaggagtgtgggggtaccctccccataaggagctcacagaccagcgggaagacaaacaaggacaaatttagagtccagtgaggtccagtgttataggaaacctgcctgacacacaggacgaagaaccctccccccacaccccaacaacccagctctggaaagaaatagcgttattttaaaacaaatggcattggaatgatgatggataaagggccaatcctctctcttccagaaatgccaggcacagcggtggactgggggagggccgctaacatgacctctcattcatggagacccccggggggttatgggcgcatcagtaaccttcacagtcactcccctgcagttaatcaggcatatctgaaagcctgcacatcttgaaaagcacatcattaataaatacctagaaatgaaacagctatgcttgaccttatgatgatggaatttttaaatgtaactttacttaagaaaaacagatacagttacacttcatttactctgctgccataaatacttgggaactatttaagaatttgaaaggtaacaaaataaaaataaatgtcagaatctattccctaaagcaatatacaacaggaaagctgaaactcaaaaatctgagaactacttttactttagagatgatcctaataagcagactagaaaagaagggaagagtggttacagacacagcaattgtaaggaaccatcacacctgacaggagcgagaattcaaaaagacagaaagaaacgggacataaaatgcacagtgtgaagccctctgcacagagttgattttataaagtagaacttaaaacagaaccatggtctctttcttggcctattccttttcctatttaacttctgaattccttgcaggtaactttaaacagtcctacacaggttcatctgtacttataatgacattttttttcttcacaggacacaataacggaggacggggacgatgaaggggtcaatgacttacagaggaacaagctatgttttcgatttcaattttcttactctttaaagaagttgtttgtgttttgtttgctaacatatacttaaagccctttaatgtaccattctgggaagatgagcatcttgaaaaaatatgaaaaaaaaaaatgctgttacaatgggttaagtgtaattaaaatgctgctcatgg

SEQ ID NO: 39941 - DNA, 1565 bp, Bovine  19866881817517
  misc_feature (1)..(1): n is a, c, g, or t
nattgcaaacactgcaggtacattagctcgggctccttcttcagaacaggcagataaagcctctaaaacagagatgaaaaactgagcctaggagtcctccataccactaaattgtgatgttcgtgggtaaaactcgcaagagatgcattttaaacagctagaagccaatgtgactcacaggttatagtaatgagtttcaggtaataccaattttgtaggaaaagttagtcttgggaggacattgattgctctctgcagatgctatctcagttaccagattcaaaaggtaactcagcggattaaattttcaccaggctgagaccactgtcttgtcaatgacttacaggtaggcaacattatacaattaaaaaaaatttagtttatgtaacatgaatgagtagatacacatatgatagctctatggttattttaccttataacaaattgctttcttctctttgagtaatatcatttatacggccctaaactactggataaagccaacactgtaaaattcataactaaacaaaaataaaggataaccacagataaagaaaatgtagttgacatccattcaataaaatattatttggcaacaaaaagaaatgaagtactgattcatggtaccatatgggtggaccctgaaaacatgatgctaaatgaagccagccacaaaaggctatagagtgtataattccaattatacaaaatgtccaggataggcaaatccacagactgtagtacatgagtgattgccaggggctggggagaatagggaattgggaagtgattgctaatgggtatggggttcacttagggtggtgaaaatgttctaaaattaaacagcgggtaatgactgcacagtttgggggaacgttctgaaaacgaacaaattgtacattttcaaagggcaaatgttatgatatatgactatctcaataaaactgtttttttttttttaaaaagacgcaataatttatccaagtagagtaattctaaatataagaggactaaattttcaaccacgttcactggcaatttgaattttctcagagtgagctcatcttacatcctggagtctatctgtgaagactgtaaaacgtttctctttcagtagtcactttcagaaacaaaagtcttctcttacgagagagacgagtaactccaattataggcaaattcacacagtgctgctccgtgttaatgaagtacattctctatcagtctaatttattaagtgaacgagtagtcccaaggaaatcttgggtcactcaaatatttggcagtcaccaaagaatctgcaggtagctacttaattcgcaatcaactacatcatcaaaagctacatacatctgttgctttgcaatcagtagcaactgttaatcaaagaaaacagaaaatgtaaatacgaatactgaccttgtttcttttaacccttctttctgaatgacttccaatatctgctttgctgtcattggtgagttgggatgtttttctagtgcctaaaaaataaagacagacataagacttctagattactgcatagaaacatacaagagcaaatg

SEQ ID NO: 39942 - DNA, 1541 bp, Bovine  19866881901664
  misc_feature (1)..(1): n is a, c, g, or t
ntgtatgtacatttatctcctatagtctaaactcaaatctcattccatgtaaaacgtatgtggttaaaatgtgagtaacagcatgaaagagggagaaacaggtcagagataatgagaaggaaaagagaacaaataaaaagggaaatgcattgtttaagccatttagagtaagtaatactttatttctgatttttcatcaaaaacacaaagcagtttctgactatgagcataattgtatatgcctctttatttgtaataactttattttggcatttggaattgaatcacccattaagatattattttagctgctgaatttattaaatcatttgaaacaaatcatgtaaggagataggcatgcttcctaagaaatctgttctgagtaagacaagtgtacttcattttaacaaggcattcacaagtccattgctggattccaaaacagttcaatcctgttgcattcacacaactagtctgtaaatgtaccaatttagttctaacatatcaagcatgaatttgagtttgaaaagtgtcccttgagtttcacaggtgtccattttgttttgactatgataaaaggtggcatttgggccgttgtggataagccttgtactgtatctcaaaaatgttcacaattttctcttgttctggttcaatgttggcatccagatccccatctttcacctttaacacattcattttactatcacagcatgcagaatagtgtatttcatagactatatttcagaaaacacataggtgttttctgtttcacccaggctctgcatgtcctacccaacatgtcatagcattagaccaacttgtgactttcagaaactgagagcttttgaggaaaagcaaacaagggagcttaggagcagactcatcaccaacagtcaacagtggccctcatctctgagactgcaagttgggtacatggggagtatttaagagaaaagagaacctcttcctaaccagccaaatcagccaaataagtgctgatgatttggctggagtgagagatcacatccaaactggcctcatgtctggtcaagagttatactggtatttctggaatgttcaacagggaagaaaagagcagaaaggagcaaaaaatggcacttgaggaaccatacaatttattactgagactggagcaattctgatcacaaaagagggtaatatttaaaattacactggcccaacaagcataatccaggactgtcctgggaatgctggaatgcacgttaccccctgatagcagtaactcagttacttccttcaaaaaggtttatatcttaatatgggaagtctgacaaataaatgcacaatctgtacaaattcataagccatgagaaatgtgagttcaggaatatattggggaacaggaaggtcaatgtgattaataatattggaggaaatacttccagttgcctatagttgaataatgaattgctttagaatcagaaactcttatcagctcaaatgaagatactctgggaagcaagagaaaataaataatgttcttactgttcccctca

SEQ ID NO: 39943 - DNA, 3446 bp, Bovine  19866880408065
  misc_feature (1)..(1): n is a, c, g, or t
ncgaaatgctaaacaggtgaataaggcagtatgattttggaatggaattccttctcttggatataaatctgtttatttatttttctccagtactctttggacaatgttcacttgaatcagcctttctaaatctgtcaaatactaatatgcttctaggaaaacctccacacctggtaacatctcactacagtagcagatctgaaaatataagggatatttagcccattgtctgggtttctgggtatccagtattgatgcaggtatttatttgtatccaaatgtttggaggattttaagagaatgaaaatggcagagaatgtgaactagtttttgtcacttttttaaacttcatcataagtttaattcagttcacttcagtcactcagtcatgtgtaactctttgcaaccccatggactgcacacaccaggcctccctgtccatcaccaactcccggagtttactcaaactcatgtccattgagtcagtgatgccatcaaacatctcatcctctgtcatccctttctcctcccaccttcaatcttttccagcatcagggtcttttccagtgagtcagttcttcccatcaggtggccaaagcattggagtttcagcttcaacatcagtccttccaatgaacactaaggactgatctcctttaggatggactggtttgatttccttgcagtccaggggactctcaagagtcttctccaacaccacagttcaaaaacatcaattctttggtgctcagatttctttatagtccaactctcacatccatacatgacactggaaaaaccatagccttgagtagatgacctttgtcagtaagcaatgtctctgttttttaatatgctgtctgctgcagctgctaagttgcttcagtcgtgtcaaactctgtgtgaccccatagatggcagcccaccaggctcctgcatccctgggattctccaggcaagagcactggagtatgttccaattttcttctccaatgcatcaaagtgaaaagtgaaagtgaagtcgttcaatggtgtccgactctgtgcgacaccatgaactgtagcctaccaggctcctccacccatgggattctccaggcaaaaatactggagtgagttgccatttccttctccaatatgctgtctaggttggtcataaatttcctttcaaagagtaagtgtctcttaattccatggctgcagtcaccatttgcagtgattttggagcctcccaaaataaaatctgccactgtttctactgtttcctcatgtatttgccatgaagtgatggtaccggatgccatgttcttcattttctgaatgttgagttttaagccaattttttcacgatcctctttcactttcgtcaagaggctctttagttcttcttcactttctgccataaggggtggtgtcatctgcatatctgaggttattgatatttctctcagcaatcttgattccagcttgtgcttcatccagcccagcatttctcatgatgtactatgcatataagtaaaataaggaggttaacgatatacagctcttgacgtactccgttcctaatttggaaccagtgtgttgttccatgtccaggcctacctgttgcttcctgacctgcatacagatttctcaagaggaacgtcaggtggtctggtattcccatctctttcagaattttccacactttattgtaatccacacagtcaaaggctttggcatagtcaataaagcagaagttaatatttttctggaactctcttgcttttttaatgatccagcagatgttggcaatttgatctatggttcctcttccttttctaaatccagcttgaacctctggaatttcatggttcacatatttttgaagcttggcttgaagaattttgagcattaatttactagcatgtgagatgagtgcaattgtgtggtagtttgagcattctttggcattgcctttcttagggattggaatgaaaactgacctttttcagtcattaaaagataattaaattctggggatttgaagcttcttatttctcttattttaacattttatttaatatgtatgtatataatatatgcttatatagagatttaacaatttagtataatgtacagaaattcaaagttttgacatatattttaatgtgatatttattaaggctattaaatatcgtgccatatgttgcattccaatgtttcaatttaatttttgattttaaaatattttctttacttttatcttaactttctccatcttcatctatttccaatattactgcaacaagaaaaagacattaatagtagtgtcacctagaaagcccctaagaaagaatttaggttataattgtttccagttatcaaaattaatgcctaaacaaccatagctcaatgagacactgacaatgaataatataaataagtaagccaggaacactatttctgttagagataaataaaaactaacagatacattcaggaaaacttgttgatttactggatatgttgaataatggaaagagaagaattaaggataatatagatttattagacttagaacaaatggatcattaatggtgcaacttactgagctaaagaagcctggaaacattcaaatttggtggtatggagaggataaagagagccagtcatgttaaggtctggtaattactagtaaatcagacaaaaagatgcctgcatctgcaagccatagatcacagatccaaactagatagcaaagatatgtacaggagattgatggtgcctcaaagagaaaagctttcaaacataaagactcagtattagacagactggcagagagtaacatctatgaatctgaaactgggagctaaataatagtttctatgtgcatgcaacttggctcactctcgtcaggttatctgaaatccaacttcctagaagttggaaactgtgtctatagtctccaccattagattccaaggacctagtagattctgatcaataaatatttagaaatgtatgttgaccaagcagttaccaagcatgttcagaggtagttaaattcaatgaggaaaaaaaaatgctaaaaaaataaggtaattttactaaaacttaggctatttttataaaagtaccatgtaatatgcaaaaatatcttattctttcttaacatatgataggttgtcagaatcaactttgttctagccttttttcagtcctaccctacacttgactcttttcaaatacctacaaaacatattcaaaagcagctgtcagatattttagactgaatacaaaaaataaaattgaatacaagagactatattaccttaaaattttaagccataaaatttttcagaattatggtaattgaaacacttgcacaggtttaacaatgcagcataagaaatacaacagcttttatctctttaagcttattatcataatcattgaaatgaatg

SEQ ID NO: 39944 - DNA, 1899 bp, Bovine  19866880830864
  misc_feature (1)..(1): n is a, c, g, or t
naaaaataaaaagccacatttcatcttcatcttaaaagaacaataaattcaaacataaagtataattccattgaatattcaaccccactcatactactggactaaatctggccatgccaccaaaatatttaaataggtttattgactggaaaattaaaaatttcatcatagcctgaaatagttatttgttatgattttatcaacataagcaccaacagagctaataagcttattttctggccagtcctcagttgaagctaaagcatatcaatcacatactgtttgatactattatcaagcagtatttatagtaaggcatattgacttaaatgtcaatattatgatacatgtagacactgatcttacttatcatgttatcttggtataaaaggggatcattttgctaaaatatctctgttgtgatgtttgacatggataacaacgttggacacaaaattttattttgttgcagttttctttagaaaaaaaccttttgtcatgatgttataatgaattcagaggaaatagctgttttatagtacagagaaaaatgactccatctaaatattgccctttctaaattccaaattcacttgaaaagttatttgattccattttaaacagccactttttggtcattttaaagcttgattgaaaacaaagattaagtgaaaaaatagaatttacttaataaattatgtttaaaattattatttgcagtttcactattaaagacaataatgaggactggatactggcaaattttgaagtcacatgataaggttatcaccttcatagacttgcagctttaaaacaggcttccctagtaagtcagacagtaaagaatctgcttacaatgagggatacctgggtttgatccctgggttgggaaaatcccctggaagagggcgtgacaacctattccagtattcttgcctggagaatccccatggacagaggagcctggagggctagagttcctgggatctcaaagtgtcagatgtgactcaccatagcacagcacaactttagaataaacatattaacaggcaacagttatagagacttcttttagtaatcacagttttacgctttctccaagatgccaaattaccagtaagagctgccttggggctctttagcaagaactgctaacataaagataggtgactggatggttaatgatttatagatattcccacatcatcattgtgcagaaccctgtgggagaggaaaattataaaatatagatcttattctttagaagttcaatacacagtttgtgagacagggcacatatcaaaatgaagatgtagcagagtcaaacccaagtgaagagatatactgagtttgatgagttgtatcaaaataacagattgattagaagccagatataagaagaaaggaaattcaaatatcttatgaaaagaggatattaaaagattttttttttttagaattggcagtttccaaaccattgtttaatggttgataaaaatcttatttgcaaaagcaaaatttctgaaaatatctttgattctactttctcattcttcaccatatcgtgtttccattcctttttatttttcaaatggaaactgtctcagtcatacatcagagtatatttatgtaactcagatgaacatattaactaagatttcaaagagcatgggaatcctaccccaaaattcaagattaacaaggaaccatactatgtcattgatcagtcgctaagtcatatctgactctttgagaccccatggactgcagcatgccaggcttccgtgtccttcactatctatctcctggagtttgtccaaacttatgtcttttgagtcagtgatgccttctaaccatctcatcctctgccaccccctcctcctcttaacctcaatcctt

SEQ ID NO: 39945 - DNA, 1764 bp, Bovine  19866881014303
  misc_feature (1)..(1): n is a, c, g, or t
nttttctaacatgtacctgccccagtgcatgccacttgttaagacaaagtctacatgcctgatagagaaaattcaactcactaagtgcaaacaatgaaggattacggtagcctagcaatgaatccaaggaaaagagagaccaaatgagtccatctaaagtgagagcaacttttaaaggatcctgcactgaagaaatgctatttcataagtttgctgtaacaagtgggttaccctaaaaatatttagtgcaagcatatatccccagagcagaataatatattgaattctactttaacaggagaaataagagagaaaaaaatctgttgtctacttcctttattatgtgcaataataatcatcatttaaaggttttgctgcaaaatacttgtgtaagattgtgtgattgacaaataagaatgcaaaataatgagaagaaattttatttcaaacactctagataacatgttctaaaaatgataattaaaattggaacaggtgttttttccccaagcaaaatatttgaaactatatttgaagataatatattaagagaggggaatatctactgaggaatgctgacccagtttgtttttaataacagagcagaattgtcgcttctgctgtttaaaatcaaaccaagtgtttcacttcaaaatatgcagatttcccccttctttctgtcatcttttgacaaccatcccacacattcacctcctaccttttgttctcattctttagttctttttccccctgatcttttccttctttatgtcactatataaatcatttgtatttatcatgtgtgggtatcctctgcttctttctccattatcacccttttagtttgtcttcaattctgctgctcacttacatttatttttgttaaataacacatttaggtagtctaactttagttgtagcagaatatatcttttcagttactatataatagatatttctagaaagtttgatgaggaatgttctcacttaagactaattgaaactcaccttggtagacaaactgatttgttttcatggataccagtgactgaacaacaaaagaatgttagttgagcatgttaaagccattcttactgctaagaatccatttagatacttgatatctttgataagatattgcttatatagtctgggcatctgttatactctcaggactcaaaacgaacctatggtgacacacttgttcatctgttctgataacaccaactccaaaataaaggtaattataagccgactgaagatcagccataagcagagcaattacacaggtttgtcagagtggacttgtcaagcaatgaggctatgacaggattataagtcaagcacatattagtggtggcaggagtcaggccagtatagcagcattattctgggagtagctttgggcactgtctgatggcttgtccataaatcctggagctaaaatcccagtcccatccaggtataaattactttacattctatctaattgggaaattttattctaacaccatctcttttcatttcatgcaaacatttcatccaaagatgaaatgttttcatttcatgcaaggaacatttcatgcaaagatgggcacaattaaggacaaaaattgtatggacctaaaagaagcagaagatgttaagaagaggtggcaagaatacacagaagaactatacagaaaaagatcttcatgacccagataaccataattgtgtgttcactcacctagaacaagacatcctggaatgagaaggcaactg

SEQ ID NO: 39946 - DNA, 1066 bp, Bovine  19866881079474
  misc_feature (1)..(1): n is a, c, g, or t
ntaatgtgtagtaatatgcttccgctttagcatcattccttccaaagaacaccccaggactgatctcctttagaatggactggctgactcattggaaaagactctgatgctgggagggattgggggcaggaggagaaagggataaaagaggatgagacagctggatggcatcactgacttgatggacgtgagtttgagtgaactctgggagttggtaatggacagggaggcctggcgtgctgcagttcatggggtcgcaaggagtcggacacgactgggcgactgaactgaactgaactgaaaatgcttcagaataattataataaacttcaaagtacttgtttttagtcactttggtagaaggaagtgccataagatgctgagagaataccatggggagtagatggtattaattatattgtacacttgctataaactaatatgaggcaaatttgacaaaatgttaatactatctatatctagatatttcatatgttagttattgtcttttggtttgtgtacttttttataatttgtaaaataaatacattaaaaatactacttacaacccaggtgagttatgtctataaaaaaaaaaaaagatttttcaataaatattttatatttattctgtttcagctattttaaaaaaatgtaccttgataaatttttcttataaactttccctggttttctgtctctgaataataagagaaattttgtatgaataccctgaagaaatcttgaattttcttctgtaactagaattccttttattttgaattccccagatactttcccctgctctttattttgtgtttcctgtgtactagtcatttttacagaggcagtattcattacattgatccctgaccatgtttcagctcagctttttaaagcagtttatgtttgcatgcaggcaaacagcagaaagaaattcccctgggctctcccttacagttcaagaaaataaaaaatttccactttttaataaatacttttattagaatcatgcaaagagggagtagatttttttttttaactccaaagggcaggaaataaggca

SEQ ID NO: 39947 - DNA, 1462 bp, Bovine  19866881093549
  misc_feature (1)..(1): n is a, c, g, or t
naattaagtatctacaataaaattaaaatcctttatataatattttcaataatgtgaaatatattttaaaataaagcattttaaaagatttaagtatcacaaaactctcatattaataaacatcaccttttgaattttgtactgatcttgtcactgtatttttaagataaaagtataagaactgtcatattggatttttcaaggaacatattccatctatcagaaggcatttcctgagatagtttggacagtgccatacgaaatatctactctctcttctaagataatacttatttttagtttgcttccaaaagaatttcagttggctaccattcgaattgcaattaaaagaaaatctagatttatatctgacatagacaaaaaaacaagttttaagggacaaattattttagtgaagtttagttttattgggcaattcgtagataatcttttaatctctggaagctaactaattagaatttttcttatttttaactttacaaaataagaaaaacatttttaatccacttgacaaaattttatattttgcaaatattaattatgtagaatataactgtaaatctgtggagctaatatatattttcagaatttactttctgataaaatgtgtcagtttatgatttttatcaatttaatagataatttttgcaatctacctgttttttttattgtgagaattctatattgaaacaagctttaaaatatttataaaccagttgtatacctggagaattatatcatacgtttgcttaactcacaagtctaaagtttaataatagaaaattttttccaagcataaagcctgcagattcttttcacaaagtgttggttccaagtttaactgttagctattggctacccactccaataattcttgcctggcaaattccatggacagaggagccattgggctacagtctatggtgtcacaaagaatcagacacgactgagcgactaacacacagacacatgattaaagagagaggttatttcattaatgttaacttgaatattttgtcctttgagacagacttatttctttgtgaggtgattaaggtgagaaatttatgtgcatcagtgatgccatgaactactaagatgggccttctcttttagttagcagtgactaactaaagtaactaaactaactaaagacaagtaactctgatccatctggcaattcatgagtagtgaactgaatttaaaaagaaaactgttagtataccattgacagcaccttgcagcatctagtcactttaatatgagtcttgtatggacagtcactttctatcctccgtcctctcctaaagaactaaattgagtctctgaggcactgaaaagatttccattggaatgaacctttttactagatggaatggaatccagtttaggtggacaaaggctataaattttactagatgctcctaaaaacttacataca

SEQ ID NO: 39948 - DNA, 786 bp, Bovine  19866881106160
  misc_feature (1)..(1): n is a, c, g, or t
ncaataaacacaaaaacccaccaagaatctgcactcagctctctgtactgatttatcttagtccttccagaggaaaaaagtaacacattacctatgaaaagtgatactgaaactgacataaccaataatactgaataacagaaagtcaaaaaacaaaacctaaaaacttactaattcaaatttctaagggatgattatttgaacccagaattttatatactcaggcaaatgtaaagagaaaaaaaagtacttttaaacatgccagagcaaaaaaaaaaaaaaattgtcatctgattatcataaatatgatcttttgtcaggataagccacagtaaaagaaaaagaaatacctaagaaaggacaacatgaaccaaacgaatcagcagcaattgagtattactcaaaaagaactcgaagaaagcttacaagaagttaaaaggagggctttgaaacttgaaggcagagatggtttctttcaagcagcaggatttagtaacaaaggattatgttcccttctttatgtgttcaggcaagacttggttctgtaaaaagtactgacttaatcataataatgtatacattcatgtggggcataaagtgattcaacagaaaaacagtgcactgaagacttaattacagttgtagaaacagtaaattttatggtattctttaatagttttgaattgtttaacttgaaaaaacacggaagtaaggaaaaagttaaagtgcaggcagactaaattctttatcttttacatcaatggggcaatatacaatgcctaaagt

SEQ ID NO: 39949 - DNA, 1439 bp, Bovine  19866881144823
  misc_feature (1)..(1): n is a, c, g, or t
ntcatatctatttcctgcaattcttttacatggctttggagaaactttaaattaacaaataatctcttattcctcttgaatattcaaaatctctctcaatggcatctttctcattagttcttatgcacaactaattctgtcctgaattgaataaaatatttatctttatccaacctctaacgcaatctaccaccttatttcttgctttctattcaaaacattttcctacagttgtctcaaagaggtataacttgttcatccactagttcagatttagaaaatgacatattctttatttttagaactgacttctaatttctgactctgagcccccagtctgtctaatgacagataacttaactgctttcagttaaatttagtccaatccaatgattaattaatcaatttgaaatgtataaatttgttacaatctagttaaacttttccatttttattctctccctcaggttccaggttttatattcagaagtgagggaagtggatgggaagggaagtaacacactcactgttgacagcagcacaatgtctgagtaatgcttggcccgttttatacagtacaatctattatctcctcttccaaaaattagaagaagctctctaagacttctgtagagtatcaagtaagagtctcacgtagtcttctggtcaaggtcatctcacaggctactccctgtccatgacagctaaccctattacatggtcttttaatcaagaagaactcttgagcccatggagacttctcacttgctcccctggcaccaggatgttctataactaaacaccaagatatggtttttccactaattatgtacagatctgagagctggaccataaagaaggttgagcattgaagaattgatgcttttgaattgtggtgctagaggaagattcttgagagtcccttagtaaggagatcaaaccagtcagtcctaaagagaatcaatactgaatattcattggaaggaccgatgctgaagctgaagctccaatacttaggccacctgatgcaatgagctgacttattggaaaataccctgttgctgggaaagattgagggaaggagaaggggacagcagaaaatgaaatggttagatagcatcatcaattgaatatacatgagtttgagcaaactctgggagatagtggagggcagagaagcctggcatgctgcagtccatggggttgcgaggagtcggacattcagatgaagaaatcaagtaggtaattggattgttcttgcctacagatatatttttgaaagctgtaagcatatacatgttatttagagccaagaaattgggcaagataacaaagaaattgtggggagaaggacaagaggtctaatgacttattcccagggtagtacaggagctgaaagacctaagatataatatagcaaagaataccaggagtagcaa

SEQ ID NO: 39950 - DNA, 1513 bp, Bovine  19866881220474
  misc_feature (1)..(1): n is a, c, g, or t
nctatcaagactctgtgatatgctcaatgagagcttaagtcttttgaaattgccattcttaatatttaaaaattatcctgaagttatccattataccattatatagaataaatataggttgtggtttccatttatttggcatcacaggataccataaatagtgagtttttataaaaaagaactatactgtccagcacacaaacaaagaactaactaaatatcatctttgccccaaaagaatcacgctgtgcagagtttcccctgcttttctaagatgttagtttctgagaggtaataaatggtctcaaatgttttaatcaaattatttctttaaactataatacaatgtactggttcactgtcttgtatgacagtaagaaacactactaattcttaatttgcatctcattagaggcaccaaattattgggaaaaactgtgtgtgtatgtaaggtgaaatatgtactatatgctaagaaaagtaacttagataagaagttttgcttcttctgtacatgtcttattatcaagtctatttcccttaaaatattatactttacatttgcaaaggctacttatagggcattaaattacagaggtactataatagtctgaaatgtaaacttgcacttgtataatttttcattttttactgcacagaataaaaatacctggttggtataattgaatagcagtttcgtttggttttaacagttcactataggattccagatatatttacactttattttgactttaaaaatctgacatctcaaacaatgttttgatatgtcagtattccctaacactatttctttttctccttccatatgtattcttaaagatcatttcaaataaaagttctccaaattttcaattaaaaaataacttctacttataacaagggctatgagatggtgtttacatcgcttcttcaatcaaatgttttgaatttcaataagaaatagaatggctttctattaacacaacttgattaataatgtaaaattaatttttagaaaggaaaattgcagcaatttggttttttattgaaatgtgcattaaaaaggtgtttgcctaaatctcaaattcaatttactgttcacaggccacagaaagttatgaaaatgtgattgtcttaatctgggtacagaaataaatagatttgtgccctttattcatttcctttatttgtgatcatgttttaagaaaacagtcactgcacactcaccatacggtttcctttcttagctcggccagcttgtgcaggcgttggagtgccttttcctgttttctttcatctttcctggatttagatgctacatttcgagcaaattccctttgtttcagttctttgagcctctattaaaaaatatgaaaatgattaatagcatttgagtctatagtaatgtcaaagtcattattattgttattgaaattttctaatgcatcatctttgatctcatctaaggaaagtacagcatttgtgacaatctacttctaacaaaatatgt

SEQ ID NO: 39951 - DNA, 895 bp, Bovine  19866881227525
  misc_feature (1)..(1): n is a, c, g, or t
ncgcaaggagtcggacacgactaagcgactttccacctatttgagaaattctcttagcatttatggatctcagatactttcattcataaaaaacacatgttgaaaaattccactttcaagctagcttcagttcagttcagttcagtctctcagtcatgtccgactctttgcgacgccatgaactgcagcacaccaggcccccctgtccatcaccaactcccggagtccacccaaacccatgtccatccagttgatgatgccatccaaccatctaatcctctgtcctccctttctcctcctgccctcaatctttcccagcatcagggtcttttccaatgagtcatctcttagcatcaggtggccaaagtatttaaaaatgttcagtaaagtcattggtgttttcatacaaatatgtactcaatatgtagtctttctgttctttacagtactcataattcacaaaaataaggcaaaaaaaaatcaacattattatatatattttgaaattgtcttgcaatcatttgtcttgtgtgagcaaattctatttataaaaagatgtttatactaatatgttaataaatgaaagcttttcaaaaaagattatgtaggtatagaatgtgagattagctgaatacttgtcatattattctgtttattatgaaggatatcgttcatttctttactactcctgatttgacaaatccattgacgccaaggtacagactttcaagaaagataacaaccttggcattgttggcctgaaattctactctcaaacatacatactggatgctcatctatggtcttctggatgcccacacatgaataccatttgttaagtgataacatattaaataaaattaatttatatttggcaattacacagcaccaggac

SEQ ID NO: 39952 - DNA, 1494 bp, Bovine  19866881230407
  misc_feature (1)..(1): n is a, c, g, or t
ngacggggtagccgttcccttctccggggatcttcccaacacaaggatcgaaccctgatctcccacattgcaggcggattctttactagctgagccacaagggaattttaccatataagagtacaaaaatatacaaaaaccctatacaactatctttactatcattcaattaaaggaatttaattgaattcagagtttaaaatttaaatacagcaaaatataatctcagattaaaagacaatcattaaaattgagaacattgtattttctcattttatcacaggatgctaaaaaattcccccactgacattatcgacctgtatcagtgaattcttccttatgaaactaataaccactctctctcttcctttctatcagataagcctgctcattcccctcaagaatatgtcacatctgtttttttcctttgaaaatgcaaataatttttctctaatttgaaaaaataagaaataaggtgaatggtccttaatacttggaggagggtaggatatataacagtaatacttaattggggacatcttaatacttcaggatgtgtataattcaagagaatctacttctgaaaaaaaatagatatatgtacgcaaaatattacctataatttcaggggcttcaaagaacctctagagcccagagaccctgggaccagaaatcttgtttaaatgtggctgacaaatgtttaattatcttctagtcaaatacattcaactggcttccttctgcctcacaacagcagtgatgagaaaatgtgtgggcttctctgaggtctccactgacacagatcctgagttctgccacgtccaaatacaccagccaggttaagctcataataccacagtataagacagagggaatgagcaacaggcctggataggttttgcagaggacattacaatgaagagactttaaaacatttaaatttcaaacaaatattagtctaaggcatacagaggctttacatgcgagtgaacagagctttgctttctgtgagaaagactctggtaggtatttgctatttaaatcttttcaggtaattagtccctgtggtgccttccatttcaggctccatctgttcatgctaatgagatgtcacttggtgtcaggaattcccatcctccagcattaggcagttaaccaataatggggtgcttgtgaagctgcacacataaagagaggtgatgaacaacttaaacttaattatctctgcttttatccacaaaaaagggcaaaggatatttatagtattagtgttagtagaaagtcccctctctgatgaagaaatttcaaaaagaagaaaagggaaaagtttaacatttcagacataatcatagacaagttatttctttaaatatacaacctgatttctgaaaatatcagaatctacagaaaggatcaaatgtctatcaagcatcaccttttatctctcacatttacagtatttacatgaaagtactagttggtcatcatagagag

SEQ ID NO: 39953 - DNA, 727 bp, Bovine  19866882113135
  misc_feature (1)..(1): n is a, c, g, or t
nataaaaaaaaggctattggatagacatctaggaggtatcctataataatttttgtttcatgcaaccttttggcattatgtgaaatatggttttatcactataatttgttttaaaattggctcaagaatgaatatattttgccccttgcttgataactttgtagggtcacaacatctataatgttctttactttaatttccccatctatttttgccaccagagagagaacagtgcttttgttgacacacaggtgtacctgattttcaatcatattatttctgcaggatctcagttgggggtaccagggatttatggcaaagacagaaattattattaaatccattccacttttctaggagtatcatgagactacagataaaaagagtaaaagctacattgtttttcttataaacaataatttttctaactgactatgaccaatgctattattgcgactcattcataatctattttatgcccagactgtcagggtacaaaattgcttcaggtcaaagttagtaagttagaattgtggaatacatatttatatttcagatgaactgaatcactgttaaattctatatttataaattataaatggcaacaaaaaaaatcacttaatatttactgtagacaagtaatcattgtacaaagcatctaaggtagcccatatcttgaatctggagggtatcagaatgtaatatgtattatgtgctagctgttatt

SEQ ID NO: 39954 - DNA, 813 bp, Bovine  19866881284187
  misc_feature (1)..(1): n is a, c, g, or t
ncattccagtcaattcggtgagtattacaacttttttaccctatatttcatgtctcaacctttattccatagtgtttgtctctctgggttatagttttaatctatctttcagttcactgattcccttctccagcagtgttgaatcttctgtttaattgttcattgagttttaacttatatttgtcactgaagttctatttgttctttttccaaatatgcttgatcatttgttaaattctctttttcctcactcacaattttcaagcttctttttaaaaaatatcttgaagcatattaaacacacattttatgttccatgtcagggaatgctaatgtcaaatatctccatgtagtgattctgtatctattgtttttgctggctttcactcacagtactctgtttccttgtatgtcttacaatttttggtgatagcttcatgttccttgaaacttcatctgaggaaattatgaagtctcaggtgaaattacattcttccagagaaaatttgtgttggtatctgccaggtacttgggagctatacccagtcaatgccatttgaaattaaaatttctgtctacagatttggaccacagactcaaaagaatggttatgaatcacaggggagaatttattacctcttctcaacatcaagttaagacttataagcctccttacttttattttctgcattgtgggtttattttattttcaatttttaaaaaattttaaaattattttatatttatagaaaagtttaaaaaacaatatagagagttcttgtatgctctgtacccatttccctttattgttaa

SEQ ID NO: 39955 - DNA, 1168 bp, Bovine  19866881383802
  misc_feature (1)..(1): n is a, c, g, or t
ntattagggggggaaaaaaaaagcccttcttaattgttctctattttttttattaactaaatccagaactcctgtcccttcaccaaaaaagtgtagaatcggggacatctgtttgcctctccattgacattgctgatcttgacattgattgaaattagtgagaaacttcctctttaagctattgtcccataataaggtaaaaatgatactgatttcctaaacatgttgggaatatctctttgataattgtgcatccttgataagcattactcactcctctacctttctagaagaatctttctgtgtttctgacaactttgaggagtgccactacattgtctaggggttgaggagaaccaggatgagaatgaaagaagaagaatgggagaaggggaaacctacttattttctttccaacaatattggaaacatttcagagttagttgtcattcacaaacactctcagatactagttcctttgatcctcagcccatgaggaaaaatgatcagtttaatcccaaagcatttgctgaacatatactattagaagtcagaaaattaaaagctcagaaaacatgaaaacatataagacatagaataagactcataaagagtccacagtcccagtaggaaagacagataataataggaaacaataggatcccacgagagacacaaaagtgtcaagtatgtagaaggtttagaaccagaatgaagactcaccccctctggtataaggcagagagtccacaaaggatgggtaagattttgaaaacagatattagaagaaattccagcagaggatacatagggtgccaaggcatgtagcagcatggtgtatttacaggattataaagagtcatcttgctggaagaaaaagatatggggaagtgctttaacatgggtagggggtcaagtggttttcaggagaggtagacagaagctgaacacaattccatgaaatacctggcaggacacgctacagagccttggtctgtatcctgaaagtcaaaagaaagacaataagagatcctgaaaaaagaaaacaactttacatttgtaggttctgggaaaaaaatatgagtttggtttgggacatattaaattaaagttcctatctgtatttatataaatttagttaatttagataggaacttatataaacaca

SEQ ID NO: 39956 - DNA, 2468 bp, Bovine  19866880380190
  misc_feature (1)..(1): n is a, c, g, or t
nttgggctgtgctagtcttattgttgtgcacgagctctcactagtttgctaagtgggagctacttttccacgtggtgctcaggtttctcactgtggtggcttctcttgttgcagcgcatgggctctaggcatgtgggctcagcagttgtggctcccacagctgtggcacgtgggcttagttgcccaacagcatgtggaatcttagctccctgaacagggatcgaacatgtatcccctgtattgtcagacagattcttaaccactggaccactggggaagtccctcacatttcattttatactagctttgttactaggaaaaaatattctttcatcctagaaatggtgaaattgagacacatgaagattcagtggattacctggggtcccatggcagatgatgggagaggtggtactacataaacctcctaactctcaatccaggcttttcctatcactaagttgtctttaaatggttccgcagaaagaaaaataaacatggtggcaaagaggagctgtacatggtagaaactacaagtcttggagccaaataagcctggtcttaaactgtggcatcactgcttacagtcctatgtctgctgttgctgctgctgctgctgctgctaagtcacttcagtcgtgtccgactctgtgtgaccccatggacggcagcccaccaggctccccccgtccctgggattctccaggcaagaacactggagtgggttgccatttccttctccaatgcatgaaagtgaaaagtcaaagtgaagtcgctcagttgtgtctgactcttagcgaccccatggacttcagcctaccaggcccctccgtccatgggattttccaggcaagagtactggagtggggtgccattgccttctgcaattgctaaattacttgatatctctgagtttcagttttttatccagatagatacaatgaagatttttttgtggagtacttgcaaagaattggatgtagagcattgaattatacctgacacacagttggaacttgatgaagaagagctactatttctagtgacaattactactccttaattataatacaaattataattatgtgtttgttttttttttctaactgttccttcttcacctgcatacaggtttctcaggaggcaggtaaggtgatctggtattcccatctctttatgaattttctacagtttgttgtgatccacacagtcaaaggctttagtgtagtcaatgaagcagaagtagatgtgtttatatatattatatatatatataatataaaatataaaattatatatatatttatataattatgtgtttataattatttacctttcattcagtgaaaaacattatgtttatgatacatcagttcttgctctgggctgcagggccacaaagccaaccaagacacacacctgatgttggagtctctccatcagtagttctcagccattttgtatcatatgcaataatgttacagtaaatgcacatttactagttttcactaatttttaagatttgtaaatatagcttgccctattttcttcttatagataagaaagccagaactgcctagctctgctagcattgagaccactgcttatagctccccagaagtatgtgaccccaggcttgtggatctctgagacatgcagaccaaaaggaagtgggactcagggtacacgtactgggctctccatggcccttttctgactccccagattatcactgcatcagtatatcagcagcatcttatggatgtaaaatgattttagctttttaaaactcctgtcatatatttttccataatcatatcacttatgcatgtcatattttattttagagtcagaatataactctcagataaaacacacctttttcctaagagaatgaaaaatgatggaaagaaatcatgtcccctgtctttcctgggaagttgtaaagcaactggttgaattcactcttaaaacccttatgaatattcagagtaggatctttatgcatctcatggttcctagctattaaatacaaccatattgatgaataattagattagaaatacaccctatttgccattcatctcaagctcaacccaaactgaagccctcatctcaccgattgaaagagattttcagccagggcacaaaatagattaaagtcaggaactcatttatttattcactcaacagtttgttttgaagtatttacagtgtgccagataaggaagataaaacgttgagcagaacaaacactgccatcctcatagtccaatgagagacaaaaatagaaataaccacacaaataagaatgataactttgatgaaatctgtgagcaccacatggctctatggaaagcctgtaataggtaaatttgatctgggcaaggtgtcaagaaacactctcaggagccatgatgtttgagcttcaatctgatgtcaaaagcaggagtgaactagccaaaaag

SEQ ID NO: 39957 - DNA, 1590 bp, Bovine  19866880414998
  misc_feature (1)..(1): n is a, c, g, or t
ncagaattttccaaaaaaaaatttttttccaattttccatcctgctgtactctctattatatcattcaattacaacgttttaatcctgttttttgttttcaaagaaacttgctactaagctggatgaaaagtatataaacttagcttgatagatagcactgaattggtttcttaaaacaatgaccatcctaaatttatcaacatgaagaacaattagggagtctgtcttttggaatgtaaatcaaccttttgaacaaaaccaaaagaactgaacccttattttcattttttaagcattctccaacttctgggatcttcaagtaaaatcttatctccaagatgacttaatatttgggtaaggcatcagcggaaaagtttcacagtctatttcaaagaaaaaatttgcatatgtgagtcagacatccgcagcattttgaaatacactggcaaataagaattacacacactgtgccaatgagttctcacatcatctaaatattgcacatagagccttcattggtgatatgcttttaaagttcagaattatgtttcagcacgtgcttgcatgaatattctataatatgcccaatctcaataagcttgtcagcctttatccaaaggcattccaggatctaattgttctcactaattcaggtgctgaggtcttttgaagagtgtgaaacaagtttaactcacttaaaataatctgttaggattgcctcagtgttaaataattacactatcatgtggtgatgatggaagacagttgtttgggtgccaggggcccgaaggctgaaagacaagcagagtgtgaaacgtgaccttcaacactaacattaaccccaagtaaaggcaactcagtgctcaaatatgtatcaaagctctaaatatttttacatctggattcttagaacaaaagttggtctatttgatctctttggtttagtatctttcattatcaactgcacagaccatctaaaggaagtgcagattctgactccaccatagtgttttaaagttgtgtcaaaatttccatgctaaagctttattttcagaagttgatgtgccgagagatgttttcagcaaattgaaactacctcaaagaagattaccgaaaggaaactataaaaacaaacaaaaaaaatcattgtagaatgagccatacctgtaaaagtggttatcataacagtctatttaatgtaacaaaaacaagtttcataaataaaaagaactcaaactttcagaattctcaatcatatccctgcattacttattgccatatctcatgatttgcattggatacattgactgtaagttatgctgcacttttaggaattgaataaaaattaagatactcttttttcagaaaggaattcttaaataatattgatatgtcttaaatgacttttcaggtgaaaagcataacacaacaaaagttgtcacttcatattaccaactcttttaaaaccatatagaatacaaaggaaatggaaaactttaaaaaatgtgaccatgatcaggttatcttaaatgtctcagctcctcatttttcctactgtaaaacttctgctgacttactcactcctgcat

SEQ ID NO: 39958 - DNA, 1544 bp, Bovine  19866880478514
  misc_feature (1)..(1): n is a, c, g, or t
ntgcccagaaatttgggcactatcagagatgcctgttgcaataatgaccccttcctggccatagattctaatctcaagtgtctgtaacataatctgaacatagatcaaaagacttctgggtgaagttttcatagggtaattttcttttcccggcaatgatcaaaactttccaattgtacctaactagagaatatgatttttgagtgatcaaggtttaagtaagttttaagattattactaacaaaacacatatcacctgtgacctaaactgagttgagacctataattctttcaggtaagaaacaagtttgcaaacttcttttaactgctaggaactttacaacaaaattttttaatattaaatttggaattagatgggtagagtagtaattcttagtaggaactgcttggctaactccgtgtctcacagaaaatttataccctaatattagcttttggctaatgtttattctatgagtgagatataagttctgtttttataagggcccatactgagtggtagaaacggccatgggagggtccaattcttattgaccccttgcatattttatgtaagctgaaatataacttgagataaagtgataaaatattaggagagagtttaatgtataatgttaccttctgcaagaaataggatatttaccctgtttttataatcatgcaaagaaccaacaagacaggtgtttctaaatgatgtttagttcaacaaagaatgtgttcctttaatagtgagagccatatttttgtcttacgctggctcactacacatttaaaattgacagacattggagcacttcaaatttatatcttcatttcagccattcatttagtaggtcaaatcatcattatatttcaccagtatggtggattttaattcatttaacgttttaatctttcatcagtttttcatttaagaggatttcacagcatatatgggatttgtataaatttgtgtgcagtaaatttattcttttaacagttttattctttcatcagaaattaatttaaatggattccactatatatcacttctacttccagtgcagctttaggtcaggctgtaattgatgcaaaagcaatgaggtattaaaagagataggaaatatctgaaattggaaagagttcaagaagtggcccattgtaagggcattacgctcctcagataaagtggggagggagaataatacagcattttgatctgaagccttgcatgctttataatttcaattctcaacaaagtcaaaaagatctattttatctaagcctgtgtctttaaagcaaaattaactgctccagtgctctaaaacagcccccatatggccatgtggatgtgtgtgcttgtctttaccatccatttgaattaatggcacagcttctttcagtgaacattctatctcttccctcccctctgccgacattcattaaatgacatccaagtgataaacattaatataataaatacagtagctatgaaaataacccagggaagaggggcattctatcatgttttcatatagaagtag

SEQ ID NO: 39959 - DNA, 683 bp, Bovine  19866880484168
  misc_feature (1)..(1): n is a, c, g, or t
ntgtacttcagttgaagttggtcttctgtaaatgcttattgggaatttctaaagcactgacttggagaggccaagagcctcccatcaatccctgcctggatagccactcctgtcaccacgggccaggcagggtctacagacgtgttggggtcctttccaaagaactcttggatgacttggcggattcgaggaatacgagttgagcccccaaccaagactacctcatcaatctcagtcttttccaggtggccttctttcaacacttgctgaatgggtacaagtattttctggaaaagatcttcattaagggtgtcaaagagctttcgtgatatttctgtttcaaataaaacctgaccctctccatttttcttttcagataggttagctccaaacatgctgtccacatggggatcatttgcttgggaaaatttgtcctttggcagttcactgtcactagtcggaggtccctttctgtcattttcctccactgttagtagtactgacatctgggcagtctcatgaagtgtcaggtttaacttgaccatttctacagcttgtcttaatcggtggatttcctctttcctagagggcaggaagccatatgtttgatagatctgtttgtataagtactgaagcaatctctgattgaagtcttgtcctccaagtttattgtttcctaagtt

SEQ ID NO: 39960 - DNA, 1089 bp, Bovine  19866880546783
  misc_feature (1)..(1): n is a, c, g, or t
ngtataaataatcatgcttagtaagatttatatttacttgcataagtttcatttagaaaaggcagaaaaattcatttatgcatgagactgtattgactatctttcatgtacataagactgtcttaagcaaatgcttcctggctatttttactaaagtattccaaatgtaaatattgcttttactttcataatatccacatgtttgtttaaataaaaaataataatattttaaattaacaacaggggagacatatagaatgtttcctgatcccatcactactgagagtggctaaaattgatccttcagttatacatagttttcttattctttggcttccagccactgcttcaatatctccaggcaatttatactctttaaatagcatgagattcccaatatttgcatgaagtgacagaaagaaagagacttcaatttgtatcaattcacctacaaatactagttctataactttgaggatatttccaaactatttccatttcctcttgtgaaatgagaaaagtaatatcttattattgcaagaaagaaataaaatgcatataacttgtctgatacacagtagaaatgcttaataaatgtaacgtccctttccaactctacgtagtgtgcctttcagtcttgcttaaaaggggttaatcaagaaaaataatcgagctgaaaaggaactctgaaatataggttatattttttaagattgaggatggcatgtgttcaatctatgaaaaatttacaaagatgtaaaatctgattaaatacaaaaaatacagaccaatgaaaatgcaccaaaaaattttccccatctttaaaactttcattctctcatctctacagattaatgactgcattttttgaacatttaaatttagatatagaagacttcacttcggaaaccttaattccagggaatttgaaggcaaatatgcaaatcaaatttgaaaatcaaaacaggaaataatatacacactcaccaagaatggaatacaagttaaagttagcatggaaaatacagcaagatacccagctgatttttgaacttccaattcctgttctcgaatttcaatatcttcttt

SEQ ID NO: 39961 - DNA, 1684 bp, Bovine  19866880549890
  misc_feature (1)..(1): n is a, c, g, or t
ntatgtcaccatcagttcagttcagtcgttcagttgtgtccgactctttgcgacttcatgaatctcagcatgccaggcctccttgtccgtcaccaactcccggagtccacccaaaaccatgtccatcgagtcagtgatgccatccagccatctcatcttctgtcgtccccttctcctcctgcccccaaatccctcccagcatcagggtctttttcaatgagtcaactcttcgcatgaggtggccaaagtattgggagtttcagctttagcatcagtccttgcaatgaacacccaggactgatctcctttaggatggactggttggaccaccttagtactacctataagtatgtccatcagaaagtaaacaaatattttgaggcaaatttatgcttgttttgtcattctgttacactcattggggaaagagtttttatgttaataactaaaatgagattcaggaacttagaatgtgcttggttctaaaccagtgagtcaagtttattggcttgtggtttgaaactcaatgaggtgaaggtagatttagagatatatcgatagaatgctgagcagcaaaagaaatatcccatatacatctctataccagtgtctatcatcatatataggagagttaaactcttaccaacctagtgagctcatgttgcagttttaagggagattcagtatcctttggagaatattttaagtgaccaaatactgttattttcctatactaggcaaggtatgcaagtttagtattcaaaattttactcgtttactttaactaactgtcaggaggtataaaaagtattttgtaatgaaagtaacagattatatacaatttaatcaaaaagattttttcatgactggatttttattttttacatttaaaaatttaaagttttgacttattattaaatgtaattatgttataaattttaaattatttcataagaaatgaaactctgtaatttctggttttattagtggtccacagctgcatcctctggaacctgatccaatcaaaagcaggctgtattcactgatatcataaaagcttacattaatttttgagctttaaagcataaatagcactttcacatgttaataccagaggcctgctatgaataatatagaaggctgacattcaaacaaaactggagaactgaagcagaaaatactgcatctatattttataacaataataatgatcctaccttatcttctgaaaaagaaatagccctaaacattttatttctggttctcagctatgtgctgaatctctggaacactctggacatccctaatctgttgtgttttatgcctccttgttagagacttccttttccaacccagtgtgtaaaatatagacaccttattttcaacgtgtggtgtttaaggagtacacttctactccctgtttgagatgaatgagtggagtcatttactttacttacctcacaaaattccactgaaatgacagtgaacaaatccaaaagtaaagggttcagggaatttcacagtgatgaatttctgcataagtgattatagtgataatcaagggtagaagaacctgtaacaaatactagatgaaagctgtaaaagcatagtaagtgggtccagtctatccactggagaaacacaagtacagggagtaagattaagtagcacagaattaatcaaa

SEQ ID NO: 39962 - DNA, 1948 bp, Bovine  19866880589036
  misc_feature (1)..(1): n is a, c, g, or t
nctgggtattgtttttgctttggctccatcccttcattctttctggagttatttctccactgatctccagtagcatattgggcgcctagacagcatctttcagtgtcctatattttttccttttcatgctttcatgggtttctcaaggccagaatactagtttgcctttcccttctccactggaccatgttttgtcagaactctccaccatgacccatctattttgggtggccctgcatggcatggctcatagtttcattgggttagacaaggctgtggttcatgtgatcacactggcatgaccccatcttgtcctaattacttcccaaaggtcccatgtcctaataccgtgacactggggataaggtttcaacatatgaactcgaagggaaccaagccttcatccataacaatataagatagctagatagctcatttcccaacaatcttagcctcatagatatttaatttcttttaagattgccaatcactaatgtaataagccaaggtatgtgattttgttgtttttgttgttcagtggctaagttgtgtcctactctttgtgaccccatggactgcagcatgccagggaaaagagggtgagtgttttactttaattattcatcatttcctgctctatgtaagttaagttctttgtccattttttcccttggggactcacaattttttaatcatttttaagtccttatacgaaaggaatacaaaccattgcatacacagttgctgcaaatgtactttccctacttgtcaagttttgcttggggatctttgaaatgaaaaacttgcagtttgtactcaagactgtcatcttctcctttgtgtgcctcttttgggtggcattcttcagaaggccttttcatcattaaactatatgaatttttccagctttccctctggcatgttatttcatataagcattcaaatatataatcgatatagaactaatattattgcatggtgtaagttaaagatctaaccttatttattcttcaaatggttaattaaaatgatttctctgttatataataaattcttacttatttgtgttttcatgctttttattacactccactgaagtatctggctttacaaaaatactgcattgttttaatatacaacaaagaacataagaatatatgatgctatttcttgcatctccgtaaaacatttaaatcagcacaattttatttcagttaaattggtttttctgcttattttattttattgatgtaaatagtttaaattcaagaactacttaccaataattaaataaagaacctggcaaaaaaaatcaccttgaagggctaattttgcttaggatacgttttacttcttttctaatgtgtcaaaatatctagaatttttgaagttctggcaatttatttcaaaaatatatatatgagaaccctgtcctcttgtgtcagtgtaatttacattctatcaatcattccagttttaagtagtccttaatcagggtgtaaaggataaaataaaatcaaagtttttgaacatttatatgaatgtgtcattagaaataaatagtaagggaaagtgaacactctactgttgctctcttttttcttttgactcttgtcttatttgttcatttggtagctcttgtaacatgaaagttattttccttcaaattattttctagttataaaaatgtgttgactttttttccagtgatctttgcacataacaccttaaaaggactaaacatcccctattgcctgcatatatctatgttatatctattttagacaagtgtttccttatggaagttcacggttcacgtattgctgaagcctggactggaagaagcacaagctggaatctagattgccgggagaaatatcaataacctcagatatgcagatgacaccacctttattgcagaaaggaagaggaactaaaaagcctcttg

SEQ ID NO: 39963 - DNA, 1299 bp, Bovine  19866880599165
  misc_feature (1)..(1): n is a, c, g, or t
nctttgcgaccccatggactgcagcacgccaggcctccctgtccctcatcatctgctgaagtttgcccaagttcatatccattgtatcagtgatgtcatccagccatctcatcctctgacgtcaaacctggaatattaggtccatgaatcaaggtaaattggatgtggtcaagtaggagatggtaagaataaacatcaacatcttagcaatcagggaactaaaatggacaggaatgggcgaacttaattcagatgattattgtatctactactgtgggcaagaattccatagaagaaatggagtaacccttgtaatcaacaagagtccaaaatgcagacttgggtacaacctcaaaaatgacagaatgctaaaggtaagaacactatatcttcgatactgatttttctccaatagaatataagctccatgagaaaaagggtttaccagttctgtttacctaggtaatcagtatttgctgaatggtatcaaataaattttctcccacctcagatttttaaaaaacattgtattatattcatcttcacattaaaacaagttcaggagaacaaattcctcactgttatgtgtccatgttctttctcagccttggtcatatacctgcggggttgttgtcagaatgtacatattttacattgtaccatggggccttcttaattgtttatctaccatatagtttgtctaggcgcctaatcaagtggatggcaaaataatacacttcattacagattttcagcctaagaaaattttgagaaaaatgcaactcaggcaagtgatattacctgcaaggttagcagcttgaattgttgaatttctctgctttagatcaaattctgctggtacggaaataacagcattggcaactggcattccaagatactcctctgccatttcttttaattttaacaacagtctagagccaacatattctggggaaacggtgatggtttcattacttgtcacagaaaattcaaccattccatttttgtttaaaacctgtgaataagatttgcaaagatgaaaacactatatatgagtgtgtatttatatctacatacatataatacatacacatatactaatacacataaatatatatatatatacacacacactgaatgtattcaatcaaaacttaccctgaaaaggtcataaaatttcatttgttatctagcaagtgcatgtacaaagattagaggctattaaaagatatactttaaaattataaaataaatctactctagtttttaataatagcagaaaaataaaacttatcatta

SEQ ID NO: 39964 - DNA, 730 bp, Bovine  19866880610734
  misc_feature (1)..(1): n is a, c, g, or t
ngaattttctatttcattttccctctgtgttgaggtaggaccctcagcaccaggaaaaaggaggttgtattccttcaccacattttattcatctcctactatgtgtcagatattatgtatgaagccctggctcatacaactcccttctttctgttgatagctttccacctaattttcaagacttcagaactttgccagattctatgcttggacatttgcaattggaccaaggtcacaaaaggacagcttagttggaaagggggaaaagggagaaaaaaaatgctaagaagttacataaatgtcctctagcacattccctgttctgagggctaatgtactgtagcaattcatcagtcattctaatagtcttttaacttctgtctgaaagcctactaaatgctaacatcttaaatgtttaatattctaaaacatattttcattaatcatgcaaattatctaggcatctatattttactataactctcttcggagattgcagcctaaggctttgtgtatgagagacccacattggtgaatgatactgtagatgaaatataacatacagaattttagaaatgaaaagttgctagtaaagtttcagtagctatatgttgtcacagttattaaaaaaaaaaaacaaaatgatattaatgtcatgtacttctgattaagtagcaagcaactaaaatatgcactgctgctgctgccaagtcatgtcagtcgtgtccga

SEQ ID NO: 39965 - DNA, 904 bp, Bovine  19866880765020
  misc_feature (1)..(1): n is a, c, g, or t
nagtcatctgtaatcagttaagttcaaaagtctgacacctttgttaatattacttattacatattaaatcaaataaaaagtaaaactaatcctgagaagtatccccttaaaatataaaaatacctcatccaaatctatttctgctctgtgcccttattcctcaaacttggctccctgtacaagtttaatatatgctcaagcttattaaagcatatcaaactttccagagtttaaatatgaaacttatcctgttactcaagcttttcttactaacatgcctggcttcaaaagtaagcagaccccaaaggaaagccttgtcagagaaagattcttcaggcctacctacccccttccaaattcatctcattggggtaaacaagccacaaaagaaatgtcccattcctaaaatattgctagtttgaagtcggcctatagggtattaatgatattcagacagagttgtgtcagatttcccctgtgttggtttccattgctacctctattatatgctattcttctcaagcttgttaatagaggaaaatttgaaatactcaaccactgagcagacaacactcctaagctcaatatatttttatcttctatgtatttatggtccaagattgtcctttaatttaaaattaaaagaatcaaatgaagcaaagcatcaaaaaatgtattgcaactcaattttgggtttagtttagaagaccaaggagattgtcacttgagagaactttagcctctcaacaaatcaaaattaattttctctgactagttccttaactgaaatgcaaagaaaatttggattatttcttgaacatacccaagcaactagcaaattgagtcaattagccataagagatattgatagaacaagcattaatgcaatggatattaatcatat

SEQ ID NO: 39966 - DNA, 1092 bp, Bovine  19866880782954
  misc_feature (1)..(1): n is a, c, g, or t
ntctgactctttgcggccccatgaattgcagaacgcccggcctccctgtccatcaccaactcccggagttcactcaaactcacgtccatcgagtcagtgatgccatccagccatctcaccctctgttgtccccttctcctcctgcccccaatccctcccagcatcagagtcttttccaatgagtcaactcttcgcatgaggtggccaaagtactggagtttcagctttagcatcattccttccaaagaaatcccagggctgatctccttcaaaatggacaaatttgacttataccttcataaatcatgtcctctgcattcattatttattaaggtgctcattttttaaaagacataatggattctattgtttttcatctccttccactctccattctctcaccatcagcatttaacatgctgctttctcatgaacagtaaatgtatgtaatgaatttatgtgtcaactagagtatgtgtatgtgtctctttctcattgatgagaaagggtatggaatgtgcattcctggaaagcttcaagaagagaaaaaaaaaaaaaaaaaaaacacctatgttgtctatgatgcattatacccccaaggatcctgggccagatgatctcttaaagtcaggttttgatctataactaaatgatcagtgagccagcttcaagtcgccttatatttagtacatagagccactgctcaagagtactaaatggtgtccctgggctctgaaaaaaaaattaatgtacaacccttagggtccaaattactgccagggagtgatttaggtaatgggaaatgaattccattaatatctagttaggtggttaatcagaaagtaaaataataataataaaaagtaaggagttaaatctattttctcattttgtcctccatgaacagaaaatcataactgttaggtgtgctcctcctaaaagctttaataaattttaaagtagtgctcaagactccccttgagttcttcatctctaaactaaatatgccctattcctttaatatttacacataagatctgtttccacatctttaatcacctttattgctcttttcaatttcattttcatttt

SEQ ID NO: 39967 - DNA, 1496 bp, Bovine  19866880831458
  misc_feature (1)..(1): n is a, c, g, or t
ntacaggaatgccctgcatgtacagatgttacaagttctctaaatgactgaggtgaaaattctatgaactgttttctctggagatggtgctctgaagtataatgtttttatttcatttttttgttctttgtagtatatggaatatggcatttatcataatttaaattttaggggataaaactaaaaaaaatttgaagaaattttacatgaggcaaaatggctatgactagaaatagatattaaatgcacatttataaatacataaaagcaaaatgcccatgtgcctcctccactctgtctgtggagatagcatatattttcttaaaagctgcatgtttcttgaatctcaatccaaatcatatggcaagcatgttggaaacaacaggcacgcatgtcaggggctaaggcaccaggcaaccctggcacactgtcaggccaactgctggactgctgcttggcattgctacaaagctcccctgctggcagctcatgttccaggctcctggctgggctttgccatttgccctgcatcgtcgtgggcaggtaggcaggcaggaaggcacaagcggggatagttgagcaatgtggggctgctgtgaccacagctggtgccaagggcctggcatacaagccacccttcccccttcctcctcactgagtactgtgaacaaagggtgcaggtaatacctccaatatgttatatacaggttccgatagagtttgcttattctgtttcgaggttgttttttgttttcaatttaaattttaattatccctgggctatagggagagcaagatatttccttcacctattttccccgaggaggattgtacacattgtcacagacacacttttaagacacatcaaagtgcatgtcagcataggaaaagagaaatgagttctgaataaaaagaaagtatttactataaatagcagttaactatcttattattttaaagaggcatttctcagcaaggcaaaggggtcttgaaggttgtgtttatggaaaaatacacacacacacatattctctatccacttttttccttgctgggaatatttattcaaagtaaacaaactgttttaaaattcagatgataaatagagaaactctaaagtgcacaaaataaacagattccactcattggctccttcatgagccaagtagttgccttaacttttcttctccttctaacctcatctagattcccagctgaaggagccagtagcctgattctgctcagttctaatgtgttgtgagaagaaattcagaatctctctgtgcttggaattgtagaacccaaagttgctattctgctctagaggtcatgcaaggatcagtcctaacaccactcagccctcctgttagtttgttgggagaagtgtctttacctcctgtcaagcaatgacctaaaaaagtttaatccgattaacattttcaaggtcaaagagggtacaatgctgtctattttggcctaagagaaaagggaaactg

SEQ ID NO: 39968 - DNA, 1216 bp, Bovine  19866881061823
  misc_feature (1)..(1): n is a, c, g, or t
nagagtatatattttatatatatatatatatataatatgtatatatatatatattgacttgttacatgaagatgttaaaattggtttttaaaggtgatgtaaatagtgatttccttaatgaaaaaatacatattttgtattgttctaatacaacagaaaagccttttaatctctttggtttctgtatattccatgtacaagtgtaaatataatcggacaggtttaaaaattgtgcatgtatgtatacagttgcaagtctggacaaatgtatagaataagccttttatttaagttgtgattacctgctgcatgaaaagtgcatgggggaccctgtgcatctgtgcatttggtaaaatgtcttaacaagtcagatcagatgttcatcccaacataacagtattccatttctggacacgacttctgtggtttaagctttgtggaagaatgctttgaatccaagggtcttaaaactttttaaatcaagtcaaccacttttcaaagtaaagagttcacacaactactttcatgaattttttaatcccgttggaaacatataccaggagtgttccagtatactggaatacaggcacactaccattcatggtatgaattctggggtttacacaaccagttttgatgcaatctgctcagtaatataatttgtcatttttattagaaatttaatttcttcatgtgatgtcatgaaattgtacatactgcagtgtgaatttttttgttttgttttttaatctttagtgtttacttcctgcagtgactttgaataaatgaaggaaaaaattcatggtctctggtttgaaatgattgttactttttgggctctctctgattttcagatttttcgtaaacataaaaagtctctggtcatgagaatagcaagtcttcaagaatgctttgccattcttggaaagataaagaaaaaaaaaaaaaaagaagatggtcttagagttaatgtgagacagggcagtggaagcatagctcggaagaccatcggctcacagcctagcctacccacccttggttctgtttcttgtgtaactggatggtcatcatggatttttaaagtgggaaaaacttgtacagtattcaaaaataaagttgatttgatacaaacttgttgtaagataagatgttactaggtttttatccaagtttcaatgggcattaaattttttctaaataaaagtcttcaaacatt

SEQ ID NO: 39969 - DNA, 970 bp, Bovine  19866881076348
  misc_feature (1)..(1): n is a, c, g, or t
nctgctttttaaatacacatatacttagttataagaaatggagaaagaatcatataaaggaaaatagtttttatggtaaacatttggcaagcaaagtggatttccacacatacacacactcatgtgtacacacacacatgcatacacacacatacacacaatatgatgagaaatatcaaataggaagaaataaaattaattctggctagtaaaattcaaatttatttgagattcttttcttcttcagaagaggtgaatgagagaaggatatgacattttctccttaagaactaagaattactgaacatggaggatttatttaatgcaaaaaagtcacattattgagattagacatctctttttcaaggtgcttctgggagatagtggctctcatacctataattcagtggaggcatctttgcctggtaagagaaaaatggacctgaggactaaagttaacaccttcatctctgcatagcacaattttaagaataactctagaacatatttgctgtcttacatcactctcatttctaaaattttcttttaaggagtggactctgtgagtattttccctaaaaatatggccaattttaagacaaacaaaaaaacagaaaatatctcacattttctctaatccatgaaagaataacttataatactgttgtattaataactacaattaaggtaggaaaaaaatgaaacttcaatatgaaatgggcaaaagaattggaaaataactcttcatttgtataatcagtatgatgtaaaaccttattttaaaattaaaaaaaaaataagaaggcaagtgattttatcatttttttgatcaccctaaacatgcttactccaggaagaatgagtacaaagaaatgttgattctcaggaagtattgggtcggctgaaaagttagttcacatttttccatatcctgtataaagacacgaaccaactcttggccaactcagag

SEQ ID NO: 39970 - DNA, 727 bp, Bovine  19866881083873
  misc_feature (1)..(1): n is a, c, g, or t
ntctcaatcacaatgtaagaataaatggatcttagaagaaataccagttagaaatcatcataccatcactcttcctcttgtgcctttgaggctgatgccaaatgcaatcattttctgccaacaatgcactatctttgctgaaatgttttatagctatttgtctattagtaaattattttacaatatatgctacatcatgtcacagtgccaagaattttttgacaatttagaactttctgaagctaaaggagattattagatgcatgcagtacaggatgccatgtgtagtcaactttcttcaggctgactaggtttaatcaggggctccactgcaatgcacttgaaaaagctctgaaaaagaactcccaggccagctactactggagtattgggttctagcagagtcatctggatttttcaaatgtctgattcatgtattctgatataaattccaatctgaaaaaaaatattccttgcttttttagatgaggaatatacctgatatatagaaatttgcctttcctatcaaactaccacacaactgcactcatctcacatgctagtaaagtaatgctcaaaattctccaagccaggcttcagcaatacatgaactacgaaattccagatgttcaagctggttttagaaaaggcagaggaaccagagatcaaattgccaacatctgctggatcattataaaagcaagaaagttccagaaaaacatctatt

SEQ ID NO: 39971 - DNA, 577 bp, Bovine  19866881214500
  misc_feature (1)..(1): n is a, c, g, or t
ntttttgtatttggaaggtcaagattttcctcttgtttttttgttttgtttttttcatcttgacagtaatgacttaaggattggcataagcctaggtcttatgctatgggtagtttttccagcagaggaaatgaattcacactaatacattcacatgttctttctaagtcatttagtctcttcatgtggtcatgaagcagagtaaagctaactgacccccctagaaattgaaactatatccttcatcagttttgtcccatggtccaatcatctgagctaaccaggtaagtaacacattggaataagaatcagtttgactataaaattatagactttccttaggatattcgagtgcatctttttatacaaaaacatttctgatactacatgaagttaaagaattagcatatataatttttatacttttaaaattatataaaaacataatggacatcatatattcacacatgaaagtgttagaattttagagttctatatttctgagattgtttacaatgttttgtattttattttaataaagaacaaaacattaaaacggtaccattttttaataaag

SEQ ID NO: 39972 - DNA, 821 bp, Bovine  19866881229998
  misc_feature (1)..(1): n is a, c, g, or t
nattaaaagtgtattcttaaatagtttcttgattaagaacaaatgcctcattaatctggaacatattgacttgagaacacaaggtaagtcaaagaagtaatgactgacatgacatggaacacaatatgctgtgttcccattgcaaaagctttagaagaacagactccccaaaaggtcactagatacagcgaattgaataggaacccagcgtcacccaaagatgcaaaggtaagctttcaaaaatctatataacagaggacattgtgtgcctgtatcactgaaacttttccatctatagattctgagtgcctcacatttatttcagaatgaaaaaacccaagatctaaaaaaactaacataaaacatatttgcatataaaaaataatgacatcaaatttttaagaaacttggtgtctgtttaccctactccatctctcaagttttacttaaatttgtgaatagaaatttaaagccaacacaaatagctttgaagataattctaacaacataattggatgtggattctctttgaaccagaccaaagttgcatttcttaaaggaacatatagtactaagaaaataatagatgcccatcaatatgattaccttaaaagttacatacataatttcaaatgacagatcagacatttgaggatgactatgaaattttctaacgacaaaatcttgtttggaaacagccattaaaatataccatacattcttctgaaaagcttcagaatttctaatccatagagaaagggacttttttgtgtctcaatcattactaaatccccagaaccatgcttaggacataatcaata

SEQ ID NO: 39973 - DNA, 755 bp, Bovine  19866881267485
  misc_feature (1)..(1): n is a, c, g, or t
naccttttagcagctattcattatttaaaagagcggcttcttttctttcatgccagtcacagttttctgtccaccatgtagcctctgttgaaaattattaaaccttactaagaaaaactttccaacaccaagttctaaaagctagaaaaatattctttttcttttacattcacaaaattgccaggctggaggaggaaatagacacaatatgagaagaaaatccatttcttcctccagtcctaaatggcatactgtactcaccaacagattgaggaaatgtgatttaaatcaaactatcagcaggtgagtgtaaaagccctagaggtcattcccaaggagctttactgtgggtgtttctgatcctgctgctgctaagtcgcttcagtcatgtccgactctgtgcaaccccatagacagcagcccatcaggctgcaccgtccctgggattctccaggcaagaacactggagcaagttgccatttccttctccaaggcatgaaagtgaaaagtgaaagtgaagtcgttcagttgtgtccgactcttagtgaccccatggactgcagcccacaaggctcctccatccatgggattttcctagcagccacaattctagtagcattcaacctatattagaccttcagacaatattattttattaaaaatccagcagttattgaaaagtgacacaataaattaatcagttgcttcattcaaaaaagctgcacaactgactggacgacttttcacccattcca

SEQ ID NO: 39974 - DNA, 1244 bp, Bovine  19866881313064
  misc_feature (1)..(1): n is a, c, g, or t
ntacactcatccctagttccccatacttgtacttcctgaaagagatcatacacccagccatagacaaaccatacagaatgcacacaccttgattttgagggaatcagtgtcataggggcttggtgtgaaatcggtgtgtactcgggcacggccacagaatggtccagagtaggggctgtcatcatcaagtcgaaagctgtcccggttacttgtaccatctgaacaacttgttattccacctgatgaaagcaaagcagacatttacagttctcattgaaggttcataacattctgaaccgtcacctggacataactaagcagaaacaatgctgaacaattggatgccagcctcctgcgggggttctaagtgactgactgcttatttttgctcccagtccttctccatcagtgacttctgtcctgagccatttctgatctttattcagtcaacctgatccttctttcctcaaccaccaattcaagcactctcctacttcggcctctgtgatctgatccagtagcacagtgctttgagcattggctacttgctaaagaggcaggaagtgtatagccctaatgccctgtacaaggcagataatgaattttgtacatgtaaacaaagacagaagcctataataacagtttgatttttgtgtgctattgatcaggaatggtcaaagcataagccacaaatcttcctacaacttactatgatgtagcaaaaatggtgtttcagacttcctcctgtgtaccaaaagccattctgagacaacagctctatgcataaaaggtagcgtttttgcttgtagtgtgaatgacagggaaagagaaagtgtgttataatatctatactcctaaatggttcaaacctgttctaaactgggctattaaaacggctccaaaaccttgttctctggtcctcttcctttctgatccggaacctcaaggggggaaaaaaatagatttcgtatttgctgcctaggggcaagaatggttcacagggggtggttactctgagtctcctaccactctcagtcgtcacctctctttttcctttggtgcggtcctttggtgctctgtttcatgagggagcaggcccagtatctctaccattcattcaaataagtgtagaaataagataaagatccctagggatgcttcattttttatataatgaaagtcgctcagtcgtgtctgactcttggcaaccccatgcactatagcctgccaggctcctctgccca

SEQ ID NO: 39975 - DNA, 1295 bp, Bovine  19866881314445
  misc_feature (1)..(1): n is a, c, g, or t
nctcttggatctttttgcctataaggctaaatttttattcttatgtaactcattctaggcaggtaattataagcaattcctgattactacaaactaaatgattcttctaaagacatttttcaaaaatctttagtcatggaatcaaaaattgatattttctcactatttaattttatatattgtttgagatggtggatatcggacattacagactttatatatgttctatcttaagaacttcatttcatttcaagcttataatattttcaaaataggctggtggtactgaaaaataacctgataattagaaaagttaaaaatgggagtcagtaatctgtaaaactttgtatgtcctttaaaagtcgcacaccgttttagttcaagacggcgtcaaaggtacttagtccttgcaagcactcttattctcagatcttcctactagctatctttaaaactccttgtttctcttttaaatgagtttatataaaaagatcctggcatgtgacaaggggtgagcttgatagacactgtgacacagaacaccaccccaaggatgagggctgtgttagacacaattaacacctttttctgacttgctacccttgctgaagaagcccttcagcttgtggcaagaggagagaaaaagaaggactgaaattgaaaactactctggaaaatacaatcttctcatgcagggcttacggacctagaatgatttctgagagcattaatcacttcaacttgcctagtaggcacttctgccaggccatcattgcccggaaatcgcgaaagggaattgagtgtgttcttgttctgcttataaacaatctgaacacagggaaagctgttacttttttatatacttgaagcattcttatggcctattggagcctgtgcttagggcacttttgtagcctataaccagtctatgccctgcctattaaatattaatgaaggttacaatgtgttatccacctctggataatgggtcaggttgcccagaggggcacagaataggctcacctcagcacttctccacagtatcttctgccattaagtaatcaatagtcaccaccttttaaaattaattctcccctcattatatcaatagaagcagattgagaagtagtggttttcagaactattactttgggttttgtcagtcatctcattacaaatcactcaacagattcaagccagaggagtaaaatatcaatccatgctaagaaacccttaagaagcaaatctaagtatttaaaataatgtttttacaatttcatattctctgtcagaaa

SEQ ID NO: 39976 - DNA, 961 bp, Bovine  19866881773080
  misc_feature (1)..(1): n is a, c, g, or t
ncccaaatttctcctgtgtacaaataaggggatacaattggaagatatttaaattcctttggagcaaaatatacatacaaaagagaacatatgtgtgtatgcatatgaaacattaaatattcatatatattatatataaagatatatataagaagatacaatatatatgtatgtatatttggataggcctataaatttaagtgtgtacctgatacttatcctctatattggagaaccatatttaacttataaatcaaaagctggaatttggttgatcttaaattcgattgtcaacaccagataactagtaattatgttggctcctaaaattcttgtgagatagaacattggattagaagtcagaatacttgattctcatcctagctctgttattaatgaattatctttccctggataagccacttaacttctctgggttttcccattttttaaataggctggtagactagatgttccgtaagttccatcctggcccataaaatatgattgtaggactaatctagttcaataattcattgatgctattttctaaaaattattctgtcatactaatagtcaagcaaagtgtcagaaaatgaggtgcatttaatctaacacttgtaacaaaaattttacattatttaaggaatgtgagccaagtgaactaaaagatatgcacatttatatataaaagatataatatgtgtgtgctcagttgcttcagccatgtccaactgctttcaaccctatggactgtagccaggctcctctgtccatgggaatctccaggcaagaatactggagtggattgccatgccctcctccagtgggatcttcccaacccaggggtcgaacccaacagctcctgtgtctcctgcattgcaggtggattcttttcccatggagccacttgggaagcccgaaagatatagcatatacatattaaaatatatgtatgaaa

SEQ ID NO: 39977 - DNA, 1174 bp, Bovine  19866881913944
  misc_feature (1)..(1): n is a, c, g, or t
ncaaagaaaacccttaatatcactaaaaatgaataagtttctttctttagtggaaatatagatggacgatagatccttctgtgtattaagaacaaggatcatcaagaggcctccacatgcatatactacatgcagcatggaaaagaggttgaccaagttcctctcactaagaaccttaaaaacatttactaggaaatgaattattttccctgtcccacagaagacttttcccaaaagtgttagtatattaacaagtaaacatgaaagcttgcagcagaaaataataacacaattatgttgttcactttccgcaaagaattagagtaatcataacaatctctcttacctagtttgggacatgattttcccttaaagtcagcacaatccgcacatagaccagtcttataatctttgtatgaacgacaagaaaatgaaataaaattgcagcttgtttccaaagctgccatgaataagtaaactgctctctggtggtcgcatttaataaattcaagtccttaagtgttaaaaatcaagcagttagatgtattaagccaagttcaagtaaattagaaaaaaaatttaaagattaaattctacctaatgctgtgtactttatgaatatcacaatgctgactacaatgcagttttatctcaagcaacttaataaacggtaccattggaagcttaaatatggtatgccttttacatgagatatagaagaaatttttctaaagtaataaagtagcaaaaatgtttaatttcagtactttgacaaattacacacacagtgctaccatatttaattattagtgtacacataactcccttctaaactctcacccctaacattcctactcaatgccaaagatacctgtgcaaacaggtgacattaaagatttatcatgtccctttcctttcctaacttctcacattcctgtccctttgattaaactactctagttttttgtggcctttaaagatgtggttcttgaccagttcccactgtagatctcaggacatttctcaccgtggctctaaagtaagccaaattccacacagagagcagttgtttagctctttatgcacagaatgaccaaatgcaagagttcataaacctgtgaataacacacaataatactgcggtaatggttggagaagaaaacggcaacccact

SEQ ID NO: 39978 - DNA, 1559 bp, Bovine  19866880121189
  misc_feature (1)..(1): n is a, c, g, or t
ncatctgcagtgattttggagccccccaaaataaagtctgacactggttccactgtttccccatctatttccatgaagtgatgggaccagatgccatgatctttgtcttctgaatgttgagctttaagccaactttttcattctccactttcactttcatcaagaggctttttagttcctcttcactttctgccataagggtggggtcatctgcatatctgaggttattgatatttctcccggcaatcttgattccagcttgtgcttcttccagcccagcgtttctcatgatgtactctgcatataagaagggggtggtccatctcaaatgaggttaaccccgtccatcctgtggacgggaggctggtggctgcccccagccaagcccagtgtatttatgttgctgcagagataggctctcaggcccccaaaggaaagcacacaacgaacgacacgattcgcctatttacagaagacgcagattgctctccaaataagccacatttactggccaatccccgcccccccacatccccccagcaaaatgtgagaagcaatagtcagagggggagtgccatcacagtctaagaaatgccaggatagccttgaattacttggattttgacctgaatttgcccttcagtcctaaggagaaggtgatcactgggaacacagaggctcacctctgactaaattcctgctaattttctactgggtgttaggatgctaacagtgagtgtgaggtctgacaatgggttgattttactgagcagtgtctcggaacatcgcagactttctcttccatattcagtgtcagaaattatgctctttagggggtacatttattgttaggcagcgtgtaaacagctgctttattttagaataaagaagtgccaggaggtacttgtttggcagctgtgggtgctcaggttggcagtgtcataaataaatgcgcaagttttatatttccattcatttggatggaccttctgttcaagggcctgccaagacgcatgcaaggccaggatggtgaaaggattgactttcataaattttcagcgttccacgtcgttccgcctgttacttttcactcttcaggcccagagaactgttacaaatacgggtctccagcgccatctagtggacaggaagtggggggtgatggcgcacagacaccgggttctaaaatgtgaaagcagggttctgggtgtggcccggtcttcctattccttttggagtgtcttggccattctccgagcaggatgaaacctgagaaggatggcaggagcccctgctgcagcttggctccttggaaggcctgggagatggggcggtgcattgatctgtgcgcttgatcagtggagaaatcagttattaatcaacaaagaactattgatttcccagccaggaagcagtgtatccgctgttcctattaacagccagtgtgctggggaagttgcccgagagcttctgtgccccaggcttcggtcagcaggtcattaagggtaggggatcccgagtctccagagtgatgactgggggaggctgaggcattctaa

SEQ ID NO: 39979 - DNA, 1694 bp, Bovine  19866880350026
  misc_feature (1)..(1): n is a, c, g, or t
naaaaaaaaaaaacaagttggaaatggaagttctctcaaatgacattcgtgagcacacagaagatgagacatcatcagatcctcttctgaggttgactcttggtatccttcatgtcaacagactatctgcacacagctgtctttgagggtaatccacagtgcttagaaactgtgcacagagagctcggggagagctctctgcatcgcttcagtataagtgctctgtcgtcacttagtcgctaaatcgtgccagactctttgcgactccatggactgtagcccaccaggctcctgcatccatggaattctccaggcaagaatactggagtgggttgccatgtccttctccaaagtgctctctataaatcaaatttaacttgagttatgagttaacaggtcttctagtcaagatcataaagttttatgcccacatcttgagtgttttactacaagtcaccattttaataatgttgattataaataataaatagaaggctcaaacagtaatgcttctactcactttaccaaagcaagatcaaagttatagaaaaatacccacaaaaaattagtttatcaatgtacaaaaatgctgtttggtgcaaagacatatttcttaggttagttttaattttttttctcttggtatttgccccattcagctaattataatgtgctaaaaatgttttaaagttgttggttttatagtccagtgctcataagtcaccctataattaagaagaaaaaagaaaaggccagtttgcatgcaaagaaaatatttttttaaattgggatataagtattaatgaaagttataaatatctaagcaaaagaacacagaaaatcagttccagataaactgctaaaattttcttcacaggtgtttcgatttactaacaaaaactgggcttctgattttgacctataaggtgattattctaattttctctctttctaaaacatatgagtacctctcagtcttataaagtggtttttacagtaagtcccctacatacaaatgagttcgctccaagagcatgttctaggtccattttgctcagaagtccaacaaagttagcctagatatccaactaacttaattggaaatttagtactgaactgtaataggtttataatacttttcacacaagtaatacataaaaatacacaaaaaaataaagaaaacatttttaattacagtacagtaccttgaaaaataccacctacaccactgtcgcttttatgcttgcttccagatatcctgggctggaaataaagatactgccctgctgtactctacacagtactgttcagtaaagtacacaaaagcaccgccaattgtagagaatgcacacaggcaacaacgtacaccagacccgtgagctaacttacaacatgggacacgtgaacacacacgtttgcacctttgaaagttcacagcttgaaggttcataagtaggggacttacagtatatgtcataggcttaattatggatttgatctaagaaggcacagtgcctgagaagcagcccgagctaccagaagcatacaacccaggagaggggtctagaaaagcctatacaaacaaccaccacaaatgctgagaaacacggtataaacagggagtgaggctacacttgactgtgggcagtagagtggctgcacgaataaacagttccgaaaccaacgtgaacgtg

SEQ ID NO: 39980 - DNA, 1938 bp, Bovine  19866880357077
  misc_feature (1)..(1): n is a, c, g, or t
ntgagcataagccttcaatgatgtgtattgggttgactaaaaatttgttaggttttaagtacaaataaaaggactatttttaattttcatgaagaactttattgaaaaacatattcactaactgaccaaactttttggccagcccaatattttacttattaagtaggaggaagggtagatggaaggggaaacaaataggaaattataggggtaaatgttttcaataggctgaggattaaatagcaacgttttaccgaaaaccttgagcgtgagattctctgatacaaaccggtgacctctggaggatacagtagtgagatgagctatgtttagaatggtattatgttgtcgtgtcttggtctgtaaaattgactaagtggctacagttaattgtgaggacctagacagatttgggaagcagaattttgcccgaataagttcttctaggagaaggacaggacatggtgaagaagagggtttacgtttcaggaccataaagacctgtcttccgctcctggttttgctggtgtgcgactgagcagatctcactgttttctcagtagtcaagcaggaggagcaatgctccagaaatgctgggttgagacggtgctgggcagattcagcgggcggctgcactgcaggctggtcctgccgctaggaagcactcaacacctttgcctttacttttcctttcctccctttccttccccttttccaacttctctctgcattctctccttcccacctttgtccccttccttcctttttgcctgggatacatttcatttttatttgctctagtatttaaagaactcagtggctttcaagaactcaggggctggccaactttcttggtacagggccattgagtaaatatcctcagctctgtgggccataccatatctgttgcaactactcagctccgcggtttaaatacataatacatgaatggatatgcatggctgtgttccaaaaaagctttatttataaaacagatggcaggccacagtttgccagcttctactttggagtaactgtccaatagagttttctgcgatttgaggtgccatgatttttcttttcaatcaggcttatttcaccactgagtctgtggcatagggttttcatcttataaaggcattgcattgctcttgtgtgctgtttttacgttttaaaaagttttaacacaaagcgtaagtgattcagtctcaaaatgccttcaacaatgttctaacacctggttcatgttctgaatctttcctcttcaggtgtttacattgaagaagttctcaataagtggaaaggggactacgagaagctggaacacaatcacacctacatccaatggtcagtcgcctgctctctctcgaaccgtgacctgtttaatcacgtgtgcttcccagagatcactaatatacaaatgttatttctctaaaacataggcttttccctctgagagaacaaggcttgaacttctatgctaaagaactaactacctatgaaattgaggtgaggcaagctgatttcatttcatgcgagttagccaaattaatgttgccgtttgatggccctggtaactctgagtcattccgctgaatttttctttttttcattaggaattcaagaaaacaaaggaagcaataagaagattcctcctggcttataaaatgatgttagagttttttggaataaagctgatagataaaactggaaacgttgcccgggctgttaactggcaggaaaggtttcagcatctgaatgagtaagtagagcccctgcagtgagtccccaaggcacggggttttctctgggttggaattctctatggcacatagagccacaagcaggtggatccatggatttgaattcaaaagctcatctgaaatgcactttattccccattctatattctaaagcaaaactaaataacaataacaa

SEQ ID NO: 39981 - DNA, 3159 bp, Bovine  19866880418739
  misc_feature (1)..(1): n is a, c, g, or t
nattttctgaccttgaaattctatgattaatctaagaaataactttattgactttattttatattcatgacacgaaaaaaagaaagaaaaacagaacttacatgccatgaatgtgtctacaggcaaatgtaaaatggaagaataaaacaaaaagtcacactgagataagaggaaaatccaaaatgaaatgtctattatacaagccatagctggaacaatatattaagattgattcctgtgcggtatttctttaaaagaaaaacaaaaccaaaaaaagtactgtattcttgagattacagaagcatagttaaaataaggaagtggtagcagggaggactcaaaatatcaaagaactgtgtatacaagaaagacataaacatgataaagaggagatgggtggcattaatgatgatggatgacacaatattttataagagaaaagattatattagagctccagttgacaaaaggaaatggctttggcagaatctgcaatatgggaaaaaaataatagaaagctaatccttagacatgatggtgtggtgagaactgcattttaggagagattttttgaaaattatgaaatatgggaaggacaagaccattgatcacaaaaggttttaattgaccagaaattgtttagagggcattctataggagaaaatgaagggaaatctgtttcctaaatgtactgaaaatgtgtctacagccttacataaattattgagcagtcaacatcctgaaagtgcgttcacactgtcatccttggaaatgaatcagatgtgtaacgaggagcagtcctgcagcagagacgctgtaaaagcatgccagcctgtcaacacagtctggtgcgcttcctgggattaagacgtggctcagaggttggcatccctaacctctttctgtctcatctttctctctgtgcaataaaaggtctgactcagtgggctctgtgtttcttaccgcccagagctgaagaggatgcttgttagtcatagccacataatactctgttgatcccaatctaattacttttaactgaagcctcactgtgataatttatgctcatgtctttaaacttccacttaaaataatttgaaacttccctcttccttacacattcacacttactcatttcttggtctaatctctaagctacttggccaagtagctcacagattactatagggtcctagctggtaagtgtactctaaaacaacctggagttgtttttcacctcattccatcactcaccattggttacattggttcctggaccacaaggaaacctctgaacctgtgttgggtctccattgctgcataaggggagtcagagagtgggggacagtctggtgagactgaaaaaggctaaaacaatgctgaaaaaggctaaaacagaaacatctgtttcttttactttaacttttgtattctattgtttttgctacaagataatcactaaactaaggttgcctatagcttaagtaaacataatggagctctgcctcccatgcaatgaggaactctgcctcccatgcaatgagtattaacctaaatacctttatttagcccacaggaaacatcctgaccaggcccacctatgaatggctgcaaaaagtaagagattggcacacctcatctagaatttcagcagtggccacaggactggaaaaagtcaattttcattccaatgccaaagaatggcaaagccaaagaatgttcaaactacgatatggttgcactcatttcacatgctagtaaggttatgctcaaaatccttcaagataggcttcagcagtacatgaaccaagaacttccaaatgtacaagctgagtttagaaaaggcagaggatcaagagatcaagttgccaacattcgttggatcatgcagaaagcacaggaattccaggaaaacatctatttctgcttcattgactatgctaaagcctttgactgtgtggatcacaacaaattgcagagtattctttaaaagatgggaatgacagaccactttacctgtctcctgagaaacctgtatacaggtcaagaagcaacagttagaaccttatatggaacaactgactggttctaagttgggaaaggagtatgacaaggctgtaaattgttaccctgttatttaacttctatggagagtacatcatgggaaatgctgggctggaagtctcacaagctggaatcaagacttccaggagaaatatcaacaacctcagatatgcagatgctaccactctaatagcagaaaatgaagaggaactaaagagtctcttgatgaaggtgaaagaggagagtgaaaaagctgtcttaaaactcagtattcaaaaaactaaaatcatggcatctggtcccatcactttatagcaaataaaagggaaaaaagtggaaacagtgacaaattttattttcttgggttccaaaatcacagcagacagtgacttcagccatgaaattaaaagactccttggaaggaaagctatggcaagcagcatattgaaagctatgaaaaagtgtactgaaagctatggcaaacaaagacaccactttgctgacaaagtctgtatagtcaaagctatgggttttttttttttttcccagtagtcttgtacagatgtgagaattgaaccataaaaaaggctgaacgctgaaaaattgatgcttttgatggtggagaagactcttgaaaagtcccttggacagcaaggagagcaaaccaataaatcctaaagaaaatcaaccctgaatattcattggaaggactgatactgaagctgaaactccgatagtttggccacctgatgcaaagagctgactcattggaaaagaccttaatgctgggagagattgaggataggaggagaagaggaggcagaggatgagatggttagataacatcactgattcagtagacgtgagtttaagcaaactctaggagatagtgaagaacagggaagcctggcatgctacagcccatggggtcccaaagagttggacacctcctagcgattgaacagctacaacaacaactctagaatctggctggcaccaggaaatatttgcaacaacttaccacctttttttactttgcctcttcaattcacccctttttgttttgccaaaaaacatccagcatccaggcctggg

SEQ ID NO: 39982 - DNA, 2353 bp, Bovine  19866880468337
  misc_feature (1)..(1): n is a, c, g, or t
ngtccgactctgtgcgactcctagatggcagcccaccaggctcctctgtccctgggattctccaggcaagagtactggagtgggttgccagtctccaatctaccctctcatagtttttaaaatacttatttatttttgactgtgttgtgtctgttgctgcacgggcttttctctagttgcagggagtaggggctactctctagttgtggtatacaggcttctcattgcactggcttcacgttgcagagcacaggctctaggtcctcaggcttaaatagttacagtatatgagctcagtagttggtggcacatgaactgctccagaagcatgtgctgctgctgctaagtcacttcagttgtgtccagctctgtgcgaccccatcgacagcagcccaccaggctcctccgtccatgggattctccaggcaagagtactgcagtggggtgccattgccttctccaacagttctatgagacttcttatatcactaatctggcataggcagataagaacatgataagtaagtgatgctatgcttctcattactgctcctgactgagtgtgaacacttagccttgagcacacccttggacaccaaaaactgccaactctaattcttcactgctaactactgaggcatcaccctagggaggagcgagtccaagtggaaacggattaaagaaggctgcttccatgaggtatagtgagacactctccttgatggcaaaactccttgaagctttataaatctttatattactcaaagaaccctttttattttctacccaagaaaccatttaaagctttttcctttattaaaaatgttacttggaattcctctggatttaaacacacttggctttatgaaatgaaataaactcccatgtgtgttactttgtaaactcaagtcataaatgttcatttgaagcatattaattttcaggcttcaaattgttctcaaaagcttaagaaaagatgactgagggttaaatgaagctgtttatttttaatcttcagttaatttttcttactgctaagtagggtttcccaggtggcagtggtggtaagaacccatctgccaatgcaggagacataaaagatgcaggctcaatccctggatcaggaagatcttctggaggaggccatggcaacccactccagtcttcttgcctggagaatcccatggacagaggagcctggcaggctgcagtccatgggggcacaaagagttggacacgactgaactgacttagcacgcccacactgctaactaggtggcctttatgctaacccactcaactgaccgagaggcctcacagccggtgtgaaccctcccaccccgtctgtccctcccgttccgagctcctcctcctgtgagtcaggtcggctcgccctgcggccggcgctctgcccagcgtccgcctggtgtggcggcatcccccgaggtcccacagacacgctcgtcctgccccgcgcacatcgctgtggtgtgtgtcacactgcccattcagtcacgctctggatgacgagtacgcagcggtgcttgtgttccctcaccgggtgaaggccccagagcccgtgcagtcccggcaccgcctctaactccaggccccctgtgacacgccgcatctgtctcccggacaagtgggtcccacgtctgtctggtatgacacggtcccctggcagtctcagaatctcacttcctctcagagctccacacactgtaactgttgagaataccggtctggctctgcaatctaccaactgctcacctttgagcaacttacttaacctccgtgcctcagtttcttcactggtaaagtgaaaccaacagtagctcaccaacctcagagcttctgtgaagatccaagttttcaccatctgtaaacactcagagcagtgcctggcacacagtaggcaccatctccatgcttcttaaagtaacgagatggcaatctaactactggagtaaaagcatctagcttcagttcatctacaagctgagactggactctgaactcagggagatctgggtttgaacctagttgtcgtccagaagctgggccttggaagccaacttcggtcagcttctgtgtccttgtatgttttaaaacaaaaggaaatgggaaggacaagggtgtgtgtctggtgtgtgtgtgccacatcccccctctgaagggctgcagaggctgacacgctaacaaagccagcctgaggtgtgtgtctatgtgtggctgtgtgtgtgtgagacacgttccccctctgaagggctgcagaggctgacacactaacaaagccggcctgaggtgtgtgtgtgtgccgtgtgtgtgtcatactccccactctgaaggg

SEQ ID NO: 39983 - DNA, 883 bp, Bovine  19866880473315
  misc_feature (1)..(1): n is a, c, g, or t
ngaagctgcacagagctggtctggctaaacaggctcaagggaccgggcagctggcaggaagtggctcttatggcctctgtggctacagaaaggcaaagaatgaacaacagggtcaaaggtcacagtcagaaatgccaggctaaactgatcaacaaggcaaggagagcctgaggcgtggaacagttaggtggggcaagcctgtgggtcagagtaggtgactgagaagcaggacccactgcaggaagagtcaagcaagagcgcagtcctggccaacagcctaaaggtgagctggtgtccctcgtgatgaacaaggccagagcagcgggacacctactgacccactgaagctcccttttctctctctgggtacatcccatgatgtatcctgccataaggatgtggcagagatcaaattcagtcctgtatgtggagtctaactgtcattattataattgttaaaactgcgatatgtgataataattgagaaatacatggacagataacttaaactcacacacacaaaaaacaaaacactgcaagatgagcatattttctttttttgtggcagaacaaaatagaatattttggggtgttattttctttaaatttagtctgctcttgttactttctaaccgaagtgtttaattagcctctgtaattgccgaacatttgtgatagttgtaatctgtgaacaaattattgactgttactgtagcaaattctggtaaattcacatatcaaaatttatatacatggaaaaattccaccagaaaagaattcgattttttaaaacctcaagtctcaaattatccagctattttgacagtttcagtgtcttgattaaatattttatgatgatctcacttcagataaaatgtaaaag

SEQ ID NO: 39984 - DNA, 1654 bp, Bovine  19866880561671
  misc_feature (1)..(1): n is a, c, g, or t
nctcctgcttggaaggtggactctttactactaagccagctgggcaccataggacagcactcagcctcagcccctcaaggagattgtgcgctctccagaggaggttaacaactcatttatcaaactgtaaagggaaggcttgtttctagttgttcataacatacagccaagactaatagagccttaaatacatatgggtttatttaattattatttattttataattattatcattttttgcttcatgcaggaagtccagagcaggtggtggttctgagacaagttatatctgagttcactttgaagttctcttcatctcctactttgtggtccctcagtggttgctgcagatcctgtcaacacatctctaacccaggtaagaagaaataggggaaggaggctggggtggtgcctgcatcagggaatcagagacttgctcagacactcctggaagtctgcttttatcactttgacttgaactgtgcccagggtgaaatttttagtggcttggtagtcagaaaaggtgaatttgagctttgcagcaccaatactcaaggaagaaaaggagctaaggttgaaatgaatttgagtgagccagcctacgttacttttcacagcagggttgttggaaaactttagttacccctccagtgccaagatctacagcagataccaaactattgcaggctcttggtgagaaagattatacctggagatggttatctggagagggagttacatgcattttccagttgactatgaaatctgaaagtgaaagtaaacagctgtgtcggatagcaaataaatttcaggattgactaacttccataattgatcctggatttctgtgagtagagtcacacatacagtcgtccatttaaatgatctttgaatctgaaaggatgagatgcttggcttcacttaggtccttaattaagcatcctgacacaaagcatagtcacttctgagtgagtcaggctgaccctcagctgtgcattttcctgtaactttgtaacagagcaggaccctttggggccctcccagccacactactccctgctctagctacccgctgaagtacccagataaaagtatctgatgcatgtcttcctgagttgtttcacggatgctgaaactctcaccaaatggaagatgttaactacttcatgaccgtgagaacgtagtccccagacccactggagcctgaggatgatgaagttagcccctgtgacaccatcttcttacctcaccatcaaccaaccagagcgctgtgcactagctgatcacacactttgcgatcacactcgtccacctggcctttgaaaatgcttcccagaaacccactgggagtttggggttttgagcactagctgccctggactccttgcttggtgcctgtaatgaacactgcactttccttcaccacaacccggggtcagtgggttgactttaccacttttaccgactcaagtttggtttagtgacaacttgggggtatcacccatgggattaattcttggatgaagaggaagatgtggactctcagattttgacatatctggaaatggttttaaaagggaagaaaaaagcagttaagtggccagaggaactggaacaattataaatgacagataatgtccttatagagcaatg

SEQ ID NO: 39985 - DNA, 825 bp, Bovine  19866880601442
  misc_feature (1)..(1): n is a, c, g, or t
nataaattgatctttggaatgagtaaaatcttcagtgcttctaaaatatcatttaagaagtcaaaaaaataaatgatattattctgagcaaatagtagactttatttatcaaccaaacctttctataactatctaatatccaagttatccaaagggagcaaatagttatgaatatcataggtaatataacgttctacttctaacagtctaaatccatatattaatcactaattggggcttctgtgtttatctgcattatctctgagttgtaggcaagaggaatgaggaaaactgatgtaaggagtgaggagaaaaaatttaaatactaagccattccgctaacaaaatgctcaagctgtctagcgtaatttgggtgcttggtgaatcactgcttagcaattcatgaacactgtgggtgcctggaattcaattctattgtcctcgagctgaattgctttgaaaaaggtcacatgagagggagaggaagttttgactttcacatgccagttattgctaaggaaaccacttcctcagtattcacagattcagcatgtctgcagttttggcttccatacggattacattttggtgccacattaagaaacaagggtggagagtattttaagaagtcaacttaactatgacatgttcacagaacaataagaggagccttctcagatgcctttcttttcagaagcactctaggtaagcctgggtgaagcttccaggatctgacaggatgtttgaggttcaaggagcacgcctgtgatggccaaaaccaaatgagaagtgagtacagctctgctgtgttttctgattggcaag

SEQ ID NO: 39986 - DNA, 1022 bp, Bovine  19866880718537
  misc_feature (1)..(1): n is a, c, g, or t
ngaattgtgtacaggatgcaaaaattcacatccccagagtgttacaggatacacttactcactgggtctcgtcttcagacttctttttaaatattaaattcacagccacacagactaaaaaccaggtgacaactaaatgctgaccacagaaaaatcaccaaccgccggctgcgctgagaaacgcggcctctactgctcaggacacgtcacagcctcccctcccggggatacacaggcgtgggggccttctgataattcacggcaacgcggcgtcatcatgggaacccgcatcgcctggacttccaccgtcttggttccgggtgtcactcgcctcatccttctccgagggagatgcactctccttttgctcctcgggatgagtaactgtcttttctgcccgaggactggaattgtttgcaacctcatcctgccctgggtctccgggctgggcggcctcgctgcctggctcctcactgggcttgtccgtctcttctgactccttagaggccacttttttgtcttcagctgctttactgatcccatgcgcggctgaagaggcgtttttggagtctttgggttttttgtgcatagacatctgaccgtgctgccccgcggtgggcggcccggggggcttctgggctttgctgccctcgggctgtgccttcctcgggggtccccagataaaattctctgagggcgtgtaatgtttctgggcaaaccgtaggagctttctcctctcccttctgtctctgattgtgtacacgaaatactccaacgcgctctgtttaatattgggaatagtattttccaccagagcctcatgaaggataaattttacaagaggagatttaaaactttcatatccaagctcgccaaggcttttcagaatacgagtgatcctcaaatagttgtgctgagacctggaagcaggttgaataaaatgaaggaagaaaattaggtggggtaagaagcctgggaatgaaaactactgggaaagtacttttgatggaagtgtaaccatg

SEQ ID NO: 39987 - DNA, 3512 bp, Bovine  19866880762550
  misc_feature (1)..(1): n is a, c, g, or t
naattttcatatatgtcaccatccaatttccttgctttcaaccataatcagcacattctatttcttatttttctctttttatttcgaagtaattttgaactttacaaaatcatgtaagactagaagaaagaacacttttttccctttgggtcatttgtgagttgcatatctgataccctagaatactttggcatgcatttgttatatcctaaaacattctctaatattgtgatagtgcaaccattaaagtcaggaaatgaacatttattcattactactctctcattatcagacccaggtttcacaaaattattgcaataacatccttcatagcaaagaatccattctgagatcctgtctggtattcactgtcatgactctttaaaagactcttgctctttggaagaaaagttatgaccaacctagatagcatattaaaaagcagagacattactttgccaacaaaggtccgtctagtcaaagctatggtttttccagtagtcatgtatggatgtgaaagttggaccttaaagaaagctgagtgcagaagaattgatgcttctgaactgtggtgttggagaagactcttgagagtcccttggactgaaaggagatccaaccagtccatcctaaaggaaatcaaccctgaatattcactagaaggactgatgctgaagctgaaactcctatactttggccacttgatgtgaagaactgacattggaaaagaccttgatgctgggaaatattgaaggtgggaggagaaggggatgacagaggatgaagtggttggatagcatcaccaactcaatggacatgagtttgagtagactctgggagctggtgatggacaaagaggcctggcatgttgccttccatggggttgcaaagagtcagatacaactgagcgactgaactgaactgaaacagcaaggggtaagcacctcatatgaatatgaccataatcttcaaacattttacaagtaacatttagcttgaaaaatcaaatacacctgcttgaactaacagtagcaaagaaacacataatccaagagcctgacctgaatcataccaggcatgcaaaagttgcaatcttcacctagaccttatgatcttagttgcaaagaatcccaaactacaagcctatttttaaaagccggctcaaatgtgacaacagtggttttactcagaccagcatcattaagtaatattcaagtgtccttacacaggagagaaagtcttgaggctttggaaagtttcttaacagcctctttgagcatcccacccgctcacttaccaagaataaaaatatgttctgagttgtttccaaaatttaaaaagataccgtatataaagtgccaaactcagggcttggcccacagcaaaccctcactgagcaggaaagctactgcagttgtttccaacactgtaccttcactgtgttgaaggtcaaggacttactagtatcagataccgatcaatccatgataaaaatctctcctgaaatatttagataaggatcaaatatctaaggacatatcaacaaaaaataccagaaaaaaaactcaccatctcactgtgttggtagtgtagtcgctaagtcgtgtccgactcttgagactgggggactgtagcctgccaggctcctgtctatgggattcttcaggcacgaaaactggagagggttgccatttccttctccaggggatcttctcgaactagggatcaaacgcaggtctcctgcactgcagcagtctcctcgcactgcaggtagattctttactgactgagccaccgggacagcaccatcccattaattctttacttctattagatttaccataaaatggacggtaattacttaagaaatagtattcctaccaacgtgtaccacatggtgcccagaaaggggcagtgtaagcagatgccagagtcccatctttgcctgcacaccttcaggcctttgtcaattatggtgatcagtgagataccttgacgctacattcatccaccaaataccacataaagggtactactccaaatttcaagactgtcaagtaatttatcacctggtattcaagaaaagtccaaaaaaccaaatttaaaccaagccaatctccccttccccaccacccaacacatagacacacagtaaaacttccatccagaaaagggagtttcttcaatttgaggcattttatatgtcaacttagacttggggtgaagagcagaaaaaggaataaattaatacaactagcaagcagtggtaaccaccacatggaacacagactgtctgctctgtgggattcttccaccatgctctcttcctcagggttcagtcccatgccctcacttccagagaaggaaaaagcatttccaggattctgaataaaaccctcagaaagagcagaggcactgccccaggtaacatagctcacccaagcattcttccatcacctacacacgaaggggctctccagtctacactgcaccctctgctcttccagagtccagactcccgtctccagcttccagacgggcatctccacgcgtgtcccacagacccttcatgctgcccaagcagtgtctcaccgtcttccgcctgtaacctttgaaccttcatctggtactgaattccttcccccgatgagtaagtctacctcactcacagaaccttagccaagctagaaaacgtagggtcatctcagtatcttccgcagaaggcgagccaatgttaacctactccaaatgtccctggctcctcaactcctttccagtctccccagctccctcctgcccactctgaaccccactacataagtagtaccttcatcactgctcatttcagggctgcactaggattctgcatgaccccgctgactccacaacctcctccaacccctcttccacgtgatagaaggtgacgtttctaatgtttctcctgcctcacagcattgcaagcccttcaatcctttgggtcaattaaatgaggcactgctctatattccatttataggcagttctagatgccattgaaaacctttcacaatctggaataataatgagctgcctttgccacttgccccacaaaacttagatgttattacatcggaactttaaaatgtcaagtgtcctcacaccttcgtacttctactcacacaatttttatgcctgaaatacaccacccactcttaccctaggatcttgttataacaaaaataacctgggatatcagactgctaaatgtgtgggaaggaggcaggagaagcagaaacagaaaaggctaaacactaacttctggaatatacctcaacaggtttctacacaaatatgaaaaaaaaaaaaaaaatatatatatatatatataatggcctgtatctctgtgagaaagaacttttttcattgtatgatcacacaaattgttctagtacatggggagcacacagctgatctttaataaactacattatattgccaaaaatcacaaaaatcatcctggataaaattacgtg

SEQ ID NO: 39988 - DNA, 2441 bp, Bovine  19866880825667
  misc_feature (1)..(1): n is a, c, g, or t
naaatactactttttgaatagctaatacttgcacattttccacaattcaaaggtacaaaagggtacagcactgaaaacaaagcagtactttaaaaaaaccagaggtttaagacatgagccaaaatttgtacatactgaatacaaaataatgtttggtctatcatccttcctctctagctgctgctgctgctgctaagtcgcatcagtcatgtccgactctgtgcgaccccatagacggcaacctaccaggctcccccatccctgggattctccaggcaagaacactggagtgggttgccatctcctcctccaacgcatgaaagtgaaaagtgaaagtgaagtcgctcagtcgtgtccaaacctcagcgaccccatggactgcagccttccaggctcctccgtccatgggattttccaggcaagagtactggagttgggtgtcattgccttctccgtttctttctagaaaacctctttattctacaaacttccccttctttccccaaatcacatggttacagtgagaacaacctctttcatctgtgacccaggcccctggccactggttgacttagctgtggacaccagatgcaagctgggccagtgagctttcttcttaagaaatttgaaatgaagactaaaactgtattctcagtttggttattctcttgaactgagtagctgctgggagcagttaccttctgcccagtggactcagaagggagtatggagacagaaaacagctcagtaccaccagagacaagaggagggagactatctggtttccacagtgcttagccctgaggtcccagtcttccttcaacggccagcagcactactgcccttgagcctaacctgttccctgcaccttactaacaacacaccctaccttctgttaaggctgtttaaataggtttctgttatttgcatcaaaatagatcttaattcacatagtttttcatgtgaataatggaattgaatacatgagcaaacataatcaatcactgccaagggcctgtaaaactctttttaaaacccatacatattgatggtcaatacagcaattttattcattgttgaaatattctttattactgctaatgaagaattataaacagtaatatgtgtctttaatttttttctcagtaacagaaacactttctttgagacctcaaaaattgagaggagtttaactatactcacttgtcagtggttccttctctaaactggaatcttctggcgcatcaaaacgaccttctggtaactttggcttcttaagaggttgtttgctaggttcaggttttcctccttgagaacttattttcctcaaattacacagaaggggtgatcctggcagagggaagacagtgaaaaaacagaagctgttcatttattctactccaaaatttaatacttttaattacttgttttaaccttatacattcacatttatcaaaatttaaaaatacaaaaggaaatatagtgacaattcttccttttgcccctatctttcagacagccagtttccttctttggaggcaaccgatgctatcaatttgaaaagaagagctgtgaaataagctaatcactatcaaaattgtaaaaactattttgattcctatttgaaacaatgcccaaaataccaagaatcaggtcactaagagtaactaagtagtaggaacttttaaatgataatacttagtatttaaatttcaagatgtcacaaggaattgtatttaggactcttaaattctaataatggtcctctttttctgtaaattaaacatttttaaatgtaccaggcacctgttgttgctgttgctttagtcattaagtcatgtctgactcttgcgacccatagagtggagtctgccaggctcctatgtctatgggattctccaggcaagaatactggaatgggttgccattcccttctccagggggtcttcccaactcagggatcaaacccatgtctcctgcattggcaggtagattgtttaccaccaagcaacccactgggcacctgcaatgtataaatgtgatcactttctatgttacaatgagaaaggtaagttttcagaatattcattggaaggactgatgctgaagctgaaggtccaacagtttggccacctgatgggaaggaagtgactcattggaaaagaccctgatgctgggacagactgggggctggagaaggggacgacagaggatgagatggttggatggcatcaccgactcaatggacatgagtttgagtaaactccgggagctggtaatggacagggaggcctggtgtgctgcagtccatggattgtaaagagatggacacaactgagcgactgaaccacaacaaaagttttcagtattatggaagttatccaacccttattgagataaatcttcaatgagggcaaaaccactctgaaaaacaacctctg

SEQ ID NO: 39989 - DNA, 2175 bp, Bovine  19866880831828
  misc_feature (1)..(1): n is a, c, g, or t
naacatatttctgtatttctgtaaaggaaaaaaaaaaagctgtcatttggccaaagtgttgtccatcctgggcacctgaaccccctacctctgctcagctcctctgggtatttttgctgggtctccctagggccctcgccccgggggcctgggctccagaagcacctccgtttctgtttccatggggtctgtctgccaggatcagtagatgagcagcaccgattgtgcaggagtctcgggcccccacacccccagccactgcacacgcacagtcccaggctacccacctcccccagactctccgtgctgaattgggaccccaccctccagtgtgacttcactccctgacaccctttgtctcagggaagggtctctagaggctttacaggtggcactgatgaaactgctgaagatgtttaaaagaacaagtgtgtccatgtcttaggagtgagaacaagagggtataatgagtgttaagccgtgtcttttcctctcagctagaagcatctcctaggctcccaaaggcatgatcaattttactaacgatttgctctgacctactgaacagtcttctgcttaatactaataatgcacatttgcagaaggtttttaactttgcaaaaactccttggttcctgttactcatttaatcattgcaaacccacttgatagcacattgctttttaaaaatcacaaaaacggggattctgtggaattagtgacttaactaaagtttggggccgatcagtgacagggccaggtctttggagcctgtattttttttcccctgcctctgtcttaaaaaagaaattcactggcttaccagtgctgagttcattacctgaatctgttagaataatattggaaataaatttcaaaaatgctgcaaaaatatttatagctctcaaatctatggagatgccacaagaataaagtgggatcatagcagagtggaaatattaatagcatgagatttaggctctggcaaacctgtgccaatccttactactgtgtccaaagtattcaacaacccgagactgctttctcttttttaaataaatgtatttattttggttgtgtcaggtcttcatcgtgctgcacgggcttttctctggctgctgtgagtgggggcttctctacttgctgcatgtggacagcatgtggggtcttagttccctaaccaaggatcgaacccatgtcccctgaattgcaaggcagattctcaaccactggacccccagggaagttccctgctttctcgtatgtaaaatggaggtaatttctactgaatatgagtgggaggattagaaatctaacagatataaaagaatgcctgttagatttattggcacctaataaatactaccttttaccagctatttggatttatttttattaacatcaacatcattataattgaaaactatggaattaatacaattccaggataatctgtgagctcatgatgatgatgttagtaggtgaaactgtacaaaatacgagaaaactggcctttaatctggacatgtggtccagattggctgactggctcttagtaacagcttaatgtttttccatcctctggatactgcaaactattttattgtctgtaaaagtaagtttggccagagaaacaattattcccagaactctggaaactctagaagacacgggcaatttgttttgttaacaatctgccagtgatacaccgaactctgcctctgtttttcccccttgtccctgtcattgtcaattactttgcacgatatcaggatccggaaaacagttaatcaggttagattgctaggcagccttgagttggctttgctttaatcacaaaacatgctgctgcatccatcaatttcccttttatgtaagcttcttcattattgtgacatttcaccattgtccatggcaaacgtgtttgccgacttccatgtcacggaaaagaaacgtggtatgaacagaagaacccatggggaagggcagccaagacaaaggtgtggagtgaatttgaagatgtaacttagtgaaaagcccaactagtccaaatccgtgaagcccgtgtaaggaaatgtgacctgtcacgagacggtaacagcaacgcttgcattccaccagagcagaagtctgatgacgacatcaggaagcacctcagagctgggctggaggcat

SEQ ID NO: 39990 - DNA, 1962 bp, Bovine  19866880892635
  misc_feature (1)..(1): n is a, c, g, or t
nactccacatcatccactccacacatgcactgagatcatcctctagcacttggcagtggcagctcactagttctgctactggctgtcatgctttcttttctggtaaagaaaaagcagtaaaaggaacacatgatatttcattctcatatttaaagaaatgtataaaaaattttaaagcagctttggtgagatataatttacatgttgtaaagttcatttattttaagtatgtaattcagtgatttttaatgtgttggcagacttctgcaactgtcactgctataaaatttcaggacacttctgtcatttcagaaagatccctcatgcctatttgcagtccccctggccccttactcattgttttgcaagttagtagtttggtttttactgtggaaaacatgtcttcatgaagcagcaaaaggtagttgatgctctggggtgaagagctgagggcttcacggtggtgcaggggaaagggcgctttgcttgttttggtttggtcccagctgtgtttggtgtgagtgcttcctttcggggcccctttactgctggccatgtccccccttccccaggagcccactgcctggtgctgccctgtgagccaccttcccgccccagagggttctgccccctgcctcgcctctgctcccccttgatcaaaattctctgtccattgcagtttccttcttcagcaaataaaaccaaaccaaatccagttcttactgcctgtaagcttaggtataatgaggaaagaaatgaacttataataatatgggaaggattgatacttctggagaggtgaagagattatttgcatctttaaatctgtattactagcttcaacagtaaatgacttagcatttcaaccggtgacagtggagagtaaaaccaggcatccagtggaaaggaattttgtttcgaagggtggaattatcgtggtaggagatgcagagtattcacaagtgtgttctggaatctgctcatggaatagtcttagctcgctctctcctctgattgctagatttggtttttttttttttttttttttgattctacatttctcagtccccaaaatacagtgtgggaatattatctacttcctatggcatctggtcccatcacttcaaggcgaatagatggggaaaaaatggaaacagtgacaaactttattttcttgggctccagaatcactgtggaccataactgcagccatgaaattaaaagatgcttgctccttggaagaaaacctagacagtgtattagcagagaaattgctttactgacaaaggtccatctagtcaaagccatggtttttccaggagtcatgtatggatgtgagagttggacgataaggaaggctgagtgccaaagaattgatgctttctaactgtggtgctgaagaaaactcttgagagtcccttgggcagcaaggagatccaacccgtcaatcctaaaggaaatcaaccctgaatatttattgaaaggactgatgttgaaactgaagctccaatactttggccacccgatgtgaagagctgactcatttgaaaagaccctgaagctgggaaagacagagggcaggaggagaaggggatgacagaagatgagatggttggataacatcactgactcaatggacatgaatttgagcaaactctgagagagagtagaggacagggaagcccggcgtcctgcagtccatggggtcaaaaagagtcagacacaactgagcgactgaacaaccacaaagaggaggtgagtcacaccataaggggtcacacggggtgggttaggaggcagaaggagtgagtagaaatgtggagcctacactttattgtggcttccacaagaaggacaggtgaggcaaggtaagcaggtagcaggtttaggattggctggtttgaataattccagcaggctctgagtctgaggggttgtcacctagcctggtacctgccctgg

SEQ ID NO: 39991 - DNA, 1164 bp, Bovine  19866880996981
  misc_feature (1)..(1): n is a, c, g, or t
naagttggaattggtgaatacatacagccgtgtcagatatttctacctgagggcttgacagaaagggtaacatttcagtttggtcttagattttagaaagcattatgaagaagtgagaataaggaaaaagtcctatgataaaagaaaaaagcatagaagcattaaagtatacacacatatgaataatttaatggccaactgtggtcttcagaaatctattaaattttgtgcttcagtttgtttatgcattggggatagtcatatttgcctttttaccatcctagaaaatggaatgtgttaagataatccattttcaagtacttcaaacacttcaaaggaaaggcatctaaaaatcagcatagttgaggtatcagatttttatgattcttactattatgattttattcactgtaataatataacataatcctcctggtcattgctatgaaaaatttgcaataaaagggtattgcaaatttttaataaatacttgttttattatccaggcttttattcataaggaaaatctattagaaaaccatacctactctaggttaaatgagaataatattacaatttttttttctggatgtttctgactgtgattgtagtgtctcacaataacatttaaagttaattttcaattttaatcatgattaatttggctctctcaaaatcaggctgtgtattattcaagtaacacttttcagtgtcatgaaaacaggagcacagctgtgtgttcaaaaataaacatttcagttgcagacacttgcaaatagttcagggtatgtgttaatatgacagtagtaatatttcaggtatttctgcttaccttgtgaaaaaaatagcatctaaaatgcaaggtaacaaagagaaaaaatgacaagtaatcttaaatgctcacatgaatacttggaaatgtcagatatttaatcattataatcttgaattccccatgttttatgtgaggagcattatagcttacataaaatgccatataaaattatacaggattatatccaaactttatattttattctaatgttcacatgggttaaataaaaatctacttgtttagacccacatgggagtaatctcacttttatttttgcagtttcaattttatagtttcatcaatcaaaaatagatttattttgaaaagga

SEQ ID NO: 39992 - DNA, 1401 bp, Bovine  19866881102790
  misc_feature (1)..(1): n is a, c, g, or t
ncatattttaattaaaaaaaaaccatatctatggcttttcagagtgataaaatctcttccattcaatttaacacaaactatacccaaatatcctctcctaaatttaaaactgtatgcatctcatttctaacatgtatccattgttttgtttttaattttgttcaaagccaatataattaagataaaaggattcatttgtcagttaagaatatatatcaatagattttaaataagctttaaaagccagtcttactcatcttattccttcaaatatagtgtgaatatgtgtgcctgtgaatgtgtgtgtgatgggatctggggacaggtgtgtaagttccacatttgtgtgttagaagtaaagttcatgaactccccctacattattggtaggactatgaattggtgcagctgcaatggagaacagtatggaggttccttcaaaaagtaagaatatagctaccaaatgaccctgcaatcccattcatgggcatatatctggagaaaaacgtgatctgaaaggctacatacaccccagtgttcgttgcaggactgtttacaatagccaagacatagaaacaagaaatttcattgacagaggtgtgaataaagaagagatggcacatatatgcaatggaatattactcagtccttaaaaagaacgaaataatgccatttgcagcaacatggagcaacctacagattgtcatactgggtgaaacaagtcacacagagaaggagaaatatcatataacatcctttatgtgtggaatacagaaagaagcacagatttagagaatgaacttatagctgctgtggtgaaggatgggcagagagggtagttatgaagtttgggatggagatgtacacaccactatatttaaaatggataaccaacaaagacctaccgtatagtacatggaactctgctcaatgttacgtagcaggctggatgaggggggaatttgcgggacaatggacacgtgtacatgtatggctgagtccatttgctgttcacctgaagctatcaaaatgtggggttgatataaatacatcagataaaggaaaataggacttgggtatttaagaatatatactgtcttatcatacctcttcttccaatgaattaacagaaaaacaaacaatttaacaaaagtgattgctgcctgtgttttatcacagcaccactttttcctaatatgctagccttggttttgcctaatgcattttcctcactccctttcatggcctcaaatgatgaaatctccttctgagaaaaggtaatgtggagaaaacggccttaaaattagctttccacaaaagatgacataaaatatcagtgcaaagaaagagataatagaagagctaaggaaagcatgtcaggttaggcattatgcagcattt

SEQ ID NO: 39993 - DNA, 901 bp, Bovine  19866881146816
  misc_feature (1)..(1): n is a, c, g, or t
ngtgaggaaataccctactcatcagtgagggaagacgtggatgcagacagagctgtgcatgccgcctgtgacccagagaaggtcgtcagggacccgagcccacacacctgtcaccacccacgtctactcagtatgggactcgtctcatccactgcttcacatgaaggtgatctcaggaaacccctctggaaatgatttgcttaaacaaaaatacttaagatgttcataaatcaaatctctaataccaatctaaagtgataacctatatgttccaatcaagagctggatatcaatcaagaataggatataatatcttatacttaattatataaaaatactatgtaaatcatattaccagattcctattaaaaaccaggtggcgaggtggtaaagaacccacctgccaatgcaggagacatcagagacacaagttcaacccctgagtcaggaagatcccttggaggagacatggcaacccacttgagtactcttgcctggagactcccatggacagaggagcctggtgcgatacagcccatggagtcacaaaaagtcggacacgactgagcacagcacagcagcaacagagttaaaaacttaccacatataaagcacaggtcagggcaaatcaatctctattttttatgaacagtatgataaaattcacatgttcctaaatacaaagttaaaatataaactataaaaatgaaggaaaaaaaaatgagctgattcttttaaaacccaaaataaagcaatgttaaaggatactgatctgtctgtggtcttcgaaagttctctggaagattggcttcatatagtagtcttgctttagtatttcccatatcttgcatgcactgtaataaaaaaaaaatcaaatattttcattactcatataaacatt

SEQ ID NO: 39994 - DNA, 1143 bp, Bovine  19866881236343
  misc_feature (1)..(1): n is a, c, g, or t
natgggaggtgctgttaaaggtggttaatgagctttttgactgaggttcacataacagcaggttgaaaaagctagagatgcacacactgaggctatttatgaaaaaaattcacgagattataataaagtttaagtgtttgatcccagacctggttcctgccttccctctgccattctgttgtttttttatacaagaaggaaaatcatagggacctaattaaaaagtagaccaaagcaaaaccactgccatgaggttttccaggtaaagaaaagttaaagaaaaaatggggcctatttaaactaagacatactcatatgccaaagtttattttctgtcaaaaatcctcttagtcttattcaactcagaaaaatgaaagctgatgacctagatgtgaaaatttgtatattcttcaacttaatctcataagtcattcaactctaattcctttgtgaattcatataatccttcaccagtgaattaatggataatattcttctcagtcagttccttggagaatagatttttgtgtatatagttaaatccttgttaatgtctatgattataccatataaatgaatgtgtcaaagttatgcccttgaaatgtggaggaaaagttacaagattatcatttcagtgttcaatatagtctttcttggcaaagtgcagtgctgaactattctttcctatgaaaataatgagggatacaaatgagtgatgcagtgatactccatcaggctgttaggaattcaggttggtgggcaaagaaaccttcaaaagcctaacgactgtcattcttttctgacatttctccattttaagaaatagactacagcaaaatgaagagaacctaccctgaaaggactgagtcacagcctggactatttcacattgatgcaatttaaaattagagctgaaaatctctaattaatggggtaacaggatacaagccccaggaggccctgcactgtgtaacatggcccagcatctcagccgtacaaagcataaagcatcagcccatttgtacctgagctcccatgcattttggctttgtatttcggctccaggttctttgaggatggaacttcagtgccaagtgtttgatctggaagactcgggctagaatataactaaacagcaccttt

SEQ ID NO: 39995 - DNA, 3079 bp, Bovine  19866881248590
  misc_feature (1)..(1): n is a, c, g, or t
ncccttaacctaaatattttttctgagcatcgttttctagcatctgtaatggagaaattataataagagatcaatttgccgatatctgttagatcatagaaaaagcaagagaatttcagaaaaacatctacttctgcttcattgactacactaaggcctttgtatggatcaaaacaaactggaaaattcttccagagatgggagaataccaaaccaccttacttgcctcctgagaaacctgtatgcaggtcaagaagcaataattagaaccggacatggaacaacagactggttccaaattgggaaaggagtacatcaaggctgtatattgtcaccttgcttatttaacttatatgcagaatacatcatgcgaaatgttgggctggatgaagcacaagatggaatcaaaactgtcaggagaaatatcaataacctcagatatgcagatgacaacacccttatggcagaaagtgaagaggaactaaagaaccttttgatcaaagtgaaagaggagagtgaaatagttggcttaaaactcaacattcaaaaaactaagatcatggcatctggtcccatcacttcatagtaaatagatgggaaaacaatggaaacagtgacaaactttattttcttgggctccaaagtcactgcagatgatgcctgcaaccataaattaaaagacgcttgctccttggaagaaaagctatgacaaacctgtgtggtagtagttcagtcatgtctgactgtttgcgatcccattgattgtagctcaccaggctcctctgttcatggaattcaccaaataagaatattggagtgggttgccattccttcctccagggatcttcacaacccagggatcgaacctgggtctcccacattgcaggaagattctttacagtctgaagcaccagggaagactggactttcctttttgcttccctcaatcatgtctttttaggaataaagttttaaattttgatgagagtttttaatcaattttttcttttataggtcatgtttatttaagaaatctttgacacaagtcacaaaatattttcttttgttttcttctaaatgcttatggttttgcttcttatattttggtctattgtccatttttgagttaatttttatagatgtaatgtatggattgaggctaatttaaaaaataaagatatttaatttttccagtgtaattcaaagactattttcccctgtggatttaccttggcttgagaaaggacttggcatattccacaaatagaaaggaggtcagtgtggcctgaatagagaagaggagagcagtgtataatggcattgcagagaaaagcagcggcgaaacttgtaaggtcttaagggccttgataagaaacttggattttattctcaaagcagtaccattgcctcaagcattataagcaagagtgctgggtgatctgattcatattctaaaatgaaaattcttcatctgtctgtgcaaatccatcgaaaccactctgaacaaggtcactactgaccatgcaatagtatgctgagtttgatgaagttttattgtttattcagtggggttaaatttggcccatagctcagcagttcttagactgcccaccagcaccagttgcctttgtaggagtctgtataaaaccagagctaatgcacttttttgaatgccagctgatatgctgctactgctagggaatttctgccaaggatattaaagacgctacctggtgctttatgtcctttggcttctcttcgttttgctatttctttatcgccaaggtaaacactgtgctaatgccaataggaaaaagctgaagaagactttttggctattagagattgcctatcccttggcaattattaccagcttaaagtatgtgaaattaactaaacatgaagaatctagaatagcatttgtataataataaaatttatgaggcactgtgatcatcctccattggacttgaaaatgattaaattagcttaaataaaaagagactttgatacagaaaactttttttctgtattagagctgattatgagagaaactgtagatatctctcataatagaatgggtttgttttgggaaaattttgttgaagaatggttaaccagttaagctatatctagattatcttttcaactcaattctaaaaggctctttatttaaatatgtatctgtgtttaaactatagcagtttaagtagatgatttacctttcagaaaattttgtatattgaagttgagatgaagaaatgaaagttaaatcaagttgtataaataggttattcttttttcttctactgtatgaattctacatgattaatatcacaagttgggctgatcagttcagcatttgcatcataattacataatttgtctaacattatgagaattctggctagaaggaaggacattttattcaataaaatattgctactagtcttaataaccccaacattccttaattttgtttttttgatatgatctctacaataattcaatttttatattgaagatttttaaatctttaaatgtagaatttagttttagtcttctaaggttttaacatttactgagatagccttgctaaaatggagttgagaaattttgtaatttacagagatgtagagaaactcccacttctgttggactagatattgtgaaaattctctcactaatggcctctggaaattatgagatggatatcttcaaattaaaaatggaaattagagtggtaagttagcatggaggccctgatttccctggcagcatctacaataccagaaacgcagactggattttgataacctcataaagggaacaggagacaaaaatctttgcctaggaaaatgggcaaagaactaagaatcatgcataaagccagcatgctcaaaaggctaggccttcagtgaaagactgagctgggggaaaaaaagtctgtctcggtaaagggattcaaaaggatacttttacattcttagtctttggtttcgggggaaaaagcctcccctaaaatgattaccagcctatctctacagatatttcaacacaggtacagtttagaatcacc

SEQ ID NO: 39996 - DNA, 1545 bp, Bovine  19866881429008
  misc_feature (1)..(1): n is a, c, g, or t
ntgtaaagggagaattttcaagatttagtggctgctccagtttgacttggtaggaataggagttgtgtcactaagcggctgggcaggggtgatgtttgaagcaggcagggctgggagccagtcaggtgccgtgcaccagagagcatgctgatccccagttgcttacagagctgcctgtaattactcaaagtggccttacttccccagaaaattgtcatctgctcaaagaatgagagcagaactgctgagaaggtacttgccgccaggggagacagccgccaacggttcatgattaattgatgtgaacatacaaaacgcagtccctctggtctcaaggtgggatcaactcatcggtacaacttatgcttcagagttccccccaggtcaggttgaagctgggcttccggctgggaccacagccttatccagtagctgcttcctccactgtctcttgcttcccatattcttcttctccaaagatactctctccataggttatgacccataatctcagcaaattatgcacttcttgggaacccagcttcagatagtgcttaagacaatataatgcaggttaaaactgggaagtggctcatggtgggggataagacctagggcacagccccacgagtctttcacagccatggttttctctctggctggactccgcagcctgacacacacaaaatgagcagcacagtttattttgttcatcgaatgaatttgatttgaggtctaatgagttggaggagacagcaggatatccaggataagctatagaacgaggtgccacaaagtggttatggctgcacatttagatttttcccagcgagagagagaattcaggaaagaggcggtaattagtgtcaagtgcgaatgaagtcttcagtcttttcagtgtaaagcagccagcatttgtctttaccttagttagatacataactccaattagtctagatcaatggttttacattcctttagtaatgtttaggcaaaattccagttggtgagttttgctcaatgctagcaagtaggtctagtaaaaaagagtaacgtctaattggggaaaaagttatggattctgtttctgtcttctgtttttattgtcaaacaattgagtgagccacttgatattcttttagaacaagagtgtgcaaaattaataaaataacaaaataaagtaaaatatacttatgaagagattcatgcctatctctcttcattgcactgattttttttttttaaagtagacatttaaacaaaccagacaaaagcattccactgtccccaaagagcacactatcttttcaaatatggttctccagtatcttgaggtaagtggttttgaatgctttaaatcttggttgtcttatttcattccataaactgtaattatagctctttataacatgctaaataattcctcccctactggatgtttttacctttcaaatatttatagagtgtcatcattccttagtcatctctttacaaagtggggcctatttttttcttataatatttttcataaatcaatttcctcaa

SEQ ID NO: 39997 - DNA, 1165 bp, Bovine  19866881500277
  misc_feature (1)..(1): n is a, c, g, or t
nctgtcaaagaataaaagtaggcaatctataattcattaaacaaactttcctaataaacaagaacacaggtttacttagacaaagcaattttataaaatgtaatttccttagattcatactgagcaaatgtctcattcaaatgattaaaatctgtattagcagaggaatctgtattcacaaaggcctcacccggctgatcttgtgtagttcataaagccaccccatagaagggaactgagccaaaaccacgtggttcccagctcctacactcaccaccattcctaccctacgacacaacaggagcaagagctcagcctctggaaggcgatgcactctgcttggttgagcaactaacgtaaatagtagtgtcaatacataagaatagggaagctatacaactttttaaggtctagatgtaattattagaattcttctttaaaaatgattatctccaatcatgccttagctagtctgtctataatcagtgtcctttaacattcacagactcacacaggtagatgagacaacacaccctgtttaacactctcattttaaagtgatacacaggcagtggtatttaccttgcggtctgcagggaagacaggaaggcgtatgaaagtaggaactgaaaggcacctgaggaagaaaagcaagtatgggaaagacagcgggcctacccgcctaacccggaggccgagtgtatggaggcgacaaaaggcgaaactgaaaacgtggggctgtactgtgcaaggacctgaacaacccacgagagctaggaactagatgaattttccaggtgagctgcaaaagcaaagctactcctggggtggtgtgccaggcataggaacagccctgctaaaggagaagatgaccaccaccaccttgggcaagggctgtgtggctgagacacagacagaccaacgcctgggaagacagccccgaacctgccacctccccatagcccgaaacctgaacattccctacctaacaagctgctcaacaacaggccgttcccagaatactctctcatctcagagccttacgaaatcccaacagcgggatttaagctttacttcaattcttagtaaaaatttatgaatggtaagctactccaagctgttggattgtatgacatcatatactccaaagcagaaacagaattca

SEQ ID NO: 39998 - DNA, 1279 bp, Bovine  19866881525763
  misc_feature (1)..(1): n is a, c, g, or t
nactcttgagagtcccttggactgcaaggagatccgtcgtccatcctaaaggagatctttcctgggtgttcgttggaaggactgatgctaaagctgaaactccaatatttttgccacctcatgcgaagagctgactccttggaaaagaccctgatgctaggaaaaattgaagggaggcggagaaggggacgacagaagatgagatggttggatggcatcactgactcgacgtgctagacagggaagctctgggagttcgtggtagacagggaagactggtgtgccgtagtgcatcgggtcacagagtcagacacaactgagtgattgaactgaactgaattgctagaatagcatgggattttaaattttctagtatgggggtattatttagttagtcataaattttacttttaacattttagtatgtttaactggaaataaaattatggctgctaaaatatattttttgaaatcaactattttgccctctcaaaccgggtagttcatatatgacaatgttataaaagttttctataaaaagttattattactgttgctagtaaacatctgccatgcctattaaaatatattttctacaggtgatttcaacattatttctcatattgacttttattactggaacttttcatgttcatgttagcagcatctagagattttttgaatgtttgaatgccctctgccttggtttggttggaattttgctaaatttggtaatgttgcttgaactttctgagtacatttctttaactttttcatggacttccttgtatgtacataataattaagtgttgaaatttatgaaatgcttttatgaatttagataatttttaaatattgctaaaatttgttgaactaaagagtaatgtaaatacaataattcatggaacaaaataattaactttacatgtttggtgacacagatgcaaatgttttgatatatggagatgttaagtctcttgactttactcaaggtgctgaatagcattaaattcactattttcctttcctgttttacttgtgaaaataacaatgcactaaggataatagaaggtctatttgcatttaccagttgtgatagaaggcttttgtaaatacgtattgtaaaattgatgcatgtttatttttagcattgtgttattgcctctgctgctaataaatgaacaaatgactatctggaggacagctaaaacactcacttattttcagaatactagaggtgtatttttatttagtaattggagtagactgtattaattaa

SEQ ID NO: 39999 - DNA, 703 bp, Bovine  19866881771934
  misc_feature (1)..(1): n is a, c, g, or t
ntgactggatttcttctcccttccactgtctgtcggtgattacagaattgcatattttgttagactgtgacaaaccgcttcaaaagtaatgggaaaaaaaaaaagcaaacagaaactactttattaatattttcctaagaaaccttagaatgagaacctggccacttcctcaactgatattgtgctttctcatttacacagaaagctatcattattttccagctgacatgtttgatttatggttcctaatatctttcaagtaatgtacttggtaattgtagtcactctattgattttcataaaacttctttgttctctgtgaagccacatctgaagctggtgatttacatgccctccatccccagctgctgttgagggcgtgggtaaagtaaatattcgaacagggcttccccccagctctggacatcatttgccctgggaccaaatctttcaattccctaatgaatctatccattcacaactgtgtattgctaaccaattcacacagccttgtgtgttcaaacaaagaggtgcaccaataaaaataatcaagtggagccaagaaggaattaacttaccttcagagcaatacaggtagttattaactgttattttgggaaagaaaggtcaaaactgctaaggaagagaatactaggaacagaccctgatgtttcatctctctctgctagaagccatagtcctt

SEQ ID NO: 40000 - DNA, 1309 bp, Bovine  19866882059807
  misc_feature (1)..(1): n is a, c, g, or t
ntaccaagaaaacattaccagacatgctaaaaggcaaaaacaaaaaaaaccatagtttgtaaagacagagcaaacatcaaaaccagactcagatatagcagtcatgttgaaattatcataccaggaatttaaaacaactagtattaatgtgctaagggccgctgctgctgctaagttatttcagtcgtgtctgactctgtgcgaccccatagatagcagcccaccaggctcctccatccctgggattctccaggaagaacagtggagtgggttgccattgccttctgcaaatatactaagggtgctaactgataatgtagacagaaagcagggacagatgggaaacgaaacagatgagaaatgaaaagtctaagaaagaaccaaaagaaatgctggaaataaaaaacaggaacagaagcgaagaatgcctgcaatgggctcattagtagaccagactcagttgaggaaagaatctctaagcttgaggatacagcaatagaaacttccaaaactgaaaagcaaagagaacaaagactgagaaccagaacagaatatccagatcgtgagacaactacaaaagctgtaagatacacatcatgggaataccagaaggagaggaaagagatgaaagggacagaagaaacgaatgagaaatgactgagaacttcccctgcattaatgtcagacgccaaaccacagatccaggaagctcttagaacatgccagataaattaaacacacacatagaaaacaaacaaacaaaaaactacacttaggcatatcattttaacgctgtagaaaatcaaaggtaaagaaaaaaatcctgaaaaaaagagagagaaaaaatattacctgcagaggaacaaagataaaaattacatccaactgctcctcagaaaccatgcaagcaaaaagagagcagagtgaaatatttaaagtgctgacagagaaaaagcaccaaactagaattctgtactctgcaaaataatctatcagaaataaaggagaaatgaagactttctcagacaaacaaaaattaagagaatttgttgccagtaggtttctatggaagacgtgttaaaagttctttagagagaaggaaaattatataggaaagaaactcagatctacataaagaaataaagagcattggagaaagaataattgaaagtaagataaaaactttttaaaaaaactcaattgagctaacagacagtggtttgtacgaaataataacagcaacaatgtatttgttacctatatatatggcttaggtataaatgaaataaatgacagcaatgataagagg

SEQ ID NO: 40001 - DNA, 2238 bp, Bovine  19866880291279
  misc_feature (1)..(1): n is a, c, g, or t
nccttggaattcgtgaagttgcttaccgttgaccaacccaaccccagccgaggctgagggaacccagtctgtgagttccagtcttctggtacacatagcacacagcgatagttatgtgtacagagcatgcacaatagtcaatttttcaggacgtgttgttggaaaaattcagtactggttagcctagggacttgtgaagaaagtggagccagacctaattgtcaagaccagccagaaaagtagtacatctctatttagggaggtaggagtactggcagaggcagcaattctctcctatcctctgtgccatcactaaagttggtgctgaaatgcattccctgggtctctagagacaggaactaacagtaggggtagggtcactccagggcattgctgatttgctccatagtagagacaacctactcctctcactggtcagtagcatctttttccagtctatttgtgttcctctgttcactgtgggtgctgctgtaacaaacagattgagcttattagacggttctcatttaaaattaatctaactttgaccttctcagcaccaaagttctggtctttattcttctaagcaccaaagttctggtctttattattatgatttactaaaaaaaaaaaaaaaaaaagccttatcttacttgagataaatgctccaagtggtgttatcagaatgtcttccatctccctggtattgattagccagtatgtagcagggctctggtaactggatctgaggacttgtttttgcatttttaatcctctcagctttgaatctgttcagttactactcagttcgtggtttgggaggaaatataattaagacagttagctagctattcaattcaaaaacacacaacccatgtgatgtgtcatcatcttataatcagtaatcccatgtggggaaaactatttccactccttgcatgtaaaaaataatttaacctttgatgttaaaacacgtggcataacacagaaagcatctgcaatgaatgaaagatactttcaataaagcataatttacacacaaaaaagaaagcctcaccatagtaggaagcagcaggaagatggactggacaggagtgtacaataggaggactcctctggtggctttgaggaagctcacaggttgctcagtggtaaagaatctgcctattgtgtaggagatgcaggttcgatccctgggtgaagaagatcccttggaggaggaaatggcaactcactccagtgttcttgcctggggaatcccatggacagaggagccttgggtctacagtccatggggtcacaaagggttggacaagactgactgaatgtgaatggctcaggtgcctttgtccctggggtgaggatgtagatctaaatattatttatttcatgaattttttgtggggggaggtcccaaggcggcagaggaataggccagggagaccactttattccccccaaattcatcaaaagatcatttgaatgttgagcaacttctacaaaacaacttctgaatgctggtagaggacaccaggcacccagaaaggcagcccaatcttttcaaaaggaggtaggacaaaatataaaagacaaaaacagaaacaaaggatttaggaacagagacccatcctggggagagaggggtgaagaaggagaagtttacacacaacagaaaaccctctcatgggcacgtcagtggggagctttgggatctcagagggtaacataactgggaaaaaaaaaaaaagcccatagaatacatgcctaaccacgaatatttgtggagaagcagctcagaagttcacatctggcagcagtgagtggggcctgggcagggaagcatgggctgattcatcggtccttagggtaaggaccagacttgaatgacctgaggacaatctgagggagttaatgcgacataaaaacccaaaccttgggattgcgaatgagccaagaaaaaaaaaaaaaaacgacaactttcctacgaaaggctctaatgccatacggtgacccctggcatgctcagagaacaaagggttgtgccctagagaacaagcccgttgctgtttagggccttccctccccagagccagagaggcagctgtgtgacagccagagccagagggcaaggggctgctgccctcttggccccagagactgcagcttccaccaaactgtgagcaggctcccagttgctaaccgtgtcttcctgggatcctggcagttcacatctgccag

SEQ ID NO: 40002 - DNA, 1146 bp, Bovine  19866880438075
  misc_feature (1)..(1): n is a, c, g, or t
naatcagtgtgctgcacttctggcatcctgcttccttgttgtcttcctgttgaagcctctcccgtcctggaggattgccccccttagtgcatctggggttctttggtgcttcctgatggcacagtctttgctacctatgtcccagtgctgcaatcaaatagcctctgacttggagcatcagattgtacattgatcaaaaatgcttccagtgtcttacaaaggcgcccaagtcactggtctataagtctgtgtataattcagacatacatgtgtatggtaacaacttttaaatgaacttgacttcatattgttttgcatcttgctttttacctaacagatcatgagcattttctatgtcattaatattttttaaaaacatctaatagctgcataatttatttaactattttcctcttgactgtttagatcatttccagtttcggctcagaaataatattgtggtgaatatttctgtattggaattggtttgttgggttaaatgaggcagaggaggcataaatagaaatgaatggcacaaagaagacctacatttgagtcttagagcaccagtgtatcctactcacatgtggtgtagtctctcagtatcgtttctggagagaccggaggcatggctcccaatgttggtactaatggcgtaatagataacactttagttactgtttctctgtcttatctgaaaaagaatgtgttgaaagtcgtggggcaggcagaagcagacatttagaatttgtgccggcagccatgtctgtctcttttttttaaagatttatttatttttggctgctctaggtttttgttgctgtgagtgttctttctctagttgcactgtgtgggcttctcgttgcagggcttcttttgttgcggagcatgggctcttaggttctggagttgtggcacaccggcttagttgctatgcaccatgtgggattttcccagaccagggatcgaacctgtattccctgcagattcttaaccagtggagcactagagaagcccctcaggagggcaagcatgtcttgactgggttttgactttgtttttaaagattttcaactttgtttactttttaatatgtatgtatatttattatttaaagagatgggaataccagaacatgttacctgc

SEQ ID NO: 40003 - DNA, 1415 bp, Bovine  19866880439511
  misc_feature (1)..(1): n is a, c, g, or t
natcacacttaattcaaatttattccccagcaacatgacaaatgctctagtgccttgctgtgtgaggccatggtccaattctcaacagcagtcctcaggaatggcttacaaagagcagaaaatgctccttgggtcctgtgccattaaagggtggctccactaagttctttacttctcaggctatcacgttgggaaagagaaattcctagagttgtgaggcaaacaaatatcaaaactgctctctctttcagtgaattgaaagccagaggtgaaatcttgtatgattcaaactggagctcattggaattcaccaaaacctgggcgagttccctagagaccgacaaaagcctaatagtgttatttgtttgtgaagcgggggaaactgcaaatccattccacctgcccacccacattaatatcattttctggtctgggaagttaacgaggggagggatttcctacaacactctggcagtagggcatccacatgagggtgggataccccctccaacctgcaggttacctattttttttttttttttaagattgttggtcaagtagcctatcgtgatttaacttttccagctttaatgaaacatttttagtttcacttactagttcacgcagtcagctagcacttattgtctactaaggcaaggttataaatgaatacagcaagctgtgatggggtttgtagtctagtggggcaagtgtagacaacacacaaagaaacagacacataagaaaaaaaaaatagatggtaatgaaagctatgccgagattaaagtacattgatttgatcaggaggcatctcagagcaggttacctgtaagcttagacatgacaggagggaatcaaccagatggaaaggacaggggaaacatcccaggcagaaggagactggagccaggtcaaggctagctcccctgagggagaggactcagcagtgtgggaggagggggcagctggagatgagatcacatgggcttcccgggatctctgggggcctccgggccccggcaaaggaaagagcttgggatcttactcaaggtacaatgggaaaaccctggagggttttaagcaggaggtattgaagatcccccggagaaggaaatggcaacccactccagtgttcttgcctggagaatcgcatggacgggggagcctggtgggctagagttcacggggtcgcaaagagtcggacactactgagcgacttcacttcacttcacttcattgtgatccaatttacattagaaataaattactctggattggcctataacagggcaaagggggagggagggacaccagtgagaggctgctgtgtttgtcaaggtgaaagacggtggtggttctgaccagggcacagtactggggatcgaggaagtcgacaagactcgggaaatgctttt

SEQ ID NO: 40004 - DNA, 1629 bp, Bovine  19866880457325
  misc_feature (1)..(1): n is a, c, g, or t
nccgggttgctgtttgtcctgacacggcattcttaaggaattaggatattaaagatgtaataaccatttgatatatgcagtaaaaatatttcgattatggcatttctgaaaagtgctgtcttcatctgttacaggaatttaccaagtgtcttttaattaagtcggttctaaatgagacacctccttggtgcggtaattttctgaatgaagctaccctgaagtactaattagtttgtttttaatgcttaatctactctgccaacgtggtggttagggtggggttgacctgctgaaactggatgaggcgtcacctgcagcagctatggtctctcctggctggagacacggagggatttcatctcacgccagatcaacttctaaactgccggctgaactgaccatgggctttaaatctacctggaaatgctcagccacagcccctgctcctgattaacccaaagaaaccactcactcagtacaggaagagggggtgagctgccttgggtgggtgtggccgccccatcaccagaggtgtcaagccaagggcatctgggtgtttgggtagaaaagtgggctggctgatctcagaggtttctttctgtctaccgtcccactcatggttctttattattcattcttaggtcactgactgaacatctattaagtccctcttgtgtgcatataaatgaagagcaaagaggggcaggaccctgtggtggagggacccacagagcaactgcatgtggtggtggagggggtagaaatccagtgtgaagaggccacaaaggagatgggcaggggcctttgggacagcgggtggaggagtcacatggaggctgggagggtagacataggaagttgtttaggaatgggagttacacccagatgtggcacctactgggcgatttgaccagagggaaggcagagcctgcctgggaagagctttcagtcctgggagagacaggagaaatctcttcccccatctcacatgcatgcacatgtatatacacacatgctcattcaagtcctcatggcacaaaaggacactgcttatttttttttaaattgttttttctttttacttgaaagtaaaggcaaggagatccgaccagtccattctgaaggagatcagccctgggatttctttggaaggaatgatgctaaagctcaaactccagtactttggccacctcatgcgaagagttgactcattggaaaagactctgatgctgggagggattgggggcaggagaaggggacgacagaggatgagatggctggatggcatcactgactcgatggatgtgagtctgagtgaattccaggagctggtgatggacagggaggcctggtgtgctgtgattcatggggtcgcaaagagtcggacatgactgagcgactgaactgaactgaactgaaaggcacaccaggaaaaaaaaaaaatcacacaacatagcaacatatagatgaaaaagtgaaagtctcctattatctcaattatcagccccctcccagagaaaaccaccactgatcttcttccagacctttccctctgtacctatgtatgtttatgtgcgcatgcacacacacacacacatggctgtttgtttaatgagattatattaaaca

SEQ ID NO: 40005 - DNA, 1529 bp, Bovine  19866880467682
  misc_feature (1)..(1): n is a, c, g, or t
ngagccatgctcacgctgtccccagccctccacatggcaccccttttctcatccttaggccctgctcagggtccgctccctctaagttggtttctctcactcatgattttcttgtcctgtacctattcattttctccacaaccctatcccaattcttatttacatacaaatgttttttatcgtgatgttttatttactagtctattgataggtggtacgctggaccccaggtacccaaagggcaggaatcatgctggtttatttcttccagtacatactcagccttcatggtgtccggggcagttgtgctcagcaaagttttgatgtgcagatgagggaacaagggagcagatgctcagcatgagtgggtctcaacccagcatttgggttgtgggttgatgtcttctccatcgactgatctttttggcagacctcctgactcatctgtaatccgtaggtgacgctctggagcagtgacacccacgtgaccctgaggaggtaatgagctagaggggtgagtccggcttctggttcatgaggacagaaagtaattgctttatcttcaatttccagtaggaggagttgctaaagggctgagaagtgtgatgcctgtcctttccatgggaaaggaaatcggcatgcctttcccatgctgaggcacctgcctgagacaggacaggcagattgctccataaatgatggacccagaagcagtgtgccaggcgcaggctgtgcggtatggaggctgttccctatgagtgccccattctgaaggcaattagtctaattgcttttgttatttcagaaaacaaattaagccacccgagtgtttcagggcagaaaaacgtctgcagtgtataagaaacgtttcaggagcgtttagttcacagccagcagtgtctgagcagacgggcaccagggaggcctaagggaccaggcgctgaggaggttgggaccttcgtgggcaagcagtgtgccgcgtgggaagaggtcaggggagtctctactctgctagctgtctctgtcctcagggtcctgtcgaggcaagggagccatcctggactcctgccccctgccctgtgcccccaacaaggtctgtggatgctgtgtcctctcgcccatccctgtcatcactgtgggcccaggcccaccctttgcagtcaggatcactagagtcgctgccaagtaagtctccctgcctgcttcccagccgtcacactcacagctaccaagggggctgcctgaaacacaagtggcacaaacacttctgaacagctttgtggggattcccaggtggtgcagtggtggagaatccgcttgccaaagcaggagatgcaagagacgcaggttcgatccctgggttgggaagatgccctggagaaggaaatggcaacccactccagtattcttgcctggagaatcccatggacagaggagcctaatgggctatagtccatggggtcacaaagagttgaacatgactgagcacacaaacagctttgtggcttcttataggacaccaggcaacc

SEQ ID NO: 40006 - DNA, 894 bp, Bovine  19866880536919
  misc_feature (1)..(1): n is a, c, g, or t
ntttttggctgtgctagtcttggatgctgcgcatgggctttctctagttgcagcgagctggggctactctctaactgtggtgtgcgggcttctcttactgtggcgcacaggctctagagcacaggcaggcttcggtagctgcggcacatgggcttagttgcctgtggcatatagcgtcttcccgcagcagggactgaacccgtgtctcctgcactggcaggcagacttttaaccactgcggaagtcctgttcctagctttataaaaaggatgtcatgttgtatgtaatctttcaggacttttttctccacttaatattactttgctaaaaaatccatctgtatcattacattccactgtagttcattttggctggtgtaaaataccccagtgcataaatacaccagagttcaccactcactctccggctcatgggcaagtacattgttgctaagatttaggtcttgttcacattgctgctgtgaacataactgtaaatgtcccctgcggtacttgtacaagagtttgtctgtggaaccagtttatactgcctccagctgtagatgagagagcctctggatctacatcctttgctatatcatggatccgtcttgtcagattgctttccagttggctgggtcaatctacctccttctagtaatatataagaatgccatttccccaaactctttctgaccctagagatcaagtttttgaccatttaacaggaagaaaagaaaagaaaatctccctactgtttaactctgtggcaaggtactgattccactaaaagctgagagagaagggatttggctcagagaactgtttccagcctgataacttcagtgacatttctgggactgaatccccagtggctcagctgctttcccatgtc

SEQ ID NO: 40007 - DNA, 1189 bp, Bovine  19866880591496
  misc_feature (1)..(1): n is a, c, g, or t
ntttacaacaataacatttttcatgggtaaggtgggttttttttttcctttggtcactgcaggaaatgaaatgcaaattaacaactgtaaagattataacataatgaaataggacataaatgatgaactaatgaattaagtgactccaaggcatggaggaacaaaatgctcttcaaaagcaaacaagtagatggagcaagagattagtaatctggggagagggccgcccagcccagggcctgaatttgcccctcccaggggatggtctctctcaatactttatcagactcaatggctctcctctgtccagccagttgctttagccaaaacaaaacaaaacaggaatcctccttgacaccactctctgcacatcccgtcaagtcaatgtgtcacgattcttaaagatttccacttcccttgaaccagcgccctgcctattcctgagttcaggagcccattcccctaatacccctccccacccttccgggtgcctcagcccctccagttcacctctctcagtcactggtgcaaagtataagtacgtgcctgtcattcctccttttaaaaaaaaattaatcaataaagtgaaggacagggaagcctggcacgctgctgttcatggggttgcaaagagtcagacgtgactgagcgactgaaaaatgacaacaaatcaataaagcaaataataagaaaaataatactttcaaataataaaaagcaaagcaaataataaatcaccaaacaataaatatcctctccagtgattctccattgctttctccttagtctctctttgttcagcctcagataaaggaaactactgaaagacgtccctatgaaagaaggctcagtgccccatggaacaggtgtgcaacactgggaaagaggagcctcagaatggcagcgggaggtgttctccacatggacagtatcagaagaggggtgcatcactgctttagtcaaaactttttggttgcaaattcagaaatccagttcaaagtgacttaacaaagatgggaaactaaaagtcgagggatttcgggcacggtgggatccagggcagagatgatgccttcagggctctgtctcccaccatgtctcctcggttttgattctgtgctggctgttcactcttatgggtaaaatgtcctctaacagctccagctaagaaccatgaggcaaaagagag

SEQ ID NO: 40008 - DNA, 2801 bp, Bovine  19866880635250
  misc_feature (1)..(1): n is a, c, g, or t
ngccccgtttcccttctctttaatctaggggctcttgggactgggcagaggtgaaggtgaagaaggggttcctgcaaggcactgggcagggtggaggtctcaagcagtccttcccctactgccctgagcccatggcatcctcctcctcagccgctactgtgcagccccaggaaggaggcacaatgcctgattgcctgtagtccccaatcaaccctcactgtctcccactgcggtcactaggcttgatgcagagcttcagagagggagagggggcccagggtagggcaggcagcaggtaggaaagcataggccctgagcctggcatgtagcttctctcaaaagactgtattcgaggacccagccatcagatctggttctgattccactaacttttcacattcaaattaaacagtgagtctgctttcctctgaagaaggaaatggcagcccactccagtattcttgcctagagaatcatgtggacagaggagcctggtgggctgctatccatggggtcgcaccgaattggacacaactgaagtgacttagcatgcatgcatgcatgcattggagaaggaaatggcaactccagtattcttgcctggagaatcccagggacagaggagcctggtgagctgctgtctatagggtcgcacagagctggacacgactgaaatgacttagcagcagcagcggctttcctctgacatggacgcaccatccacctttaaaactcagagaaagggaggggcaggtgccacctcctaaggcctcaccgctgagatcactccaaggggggtgttcaggtgtggtgcaggtgtgcaccctcagatcaccaccccgcaagccacagaggccttccgtgaaggttcagcctcaccccagtcacctgtgggtggctgccacctcattggctctgcctgccctggtgtctggcacagctctggggcacactgtgtcagccaggcccttctgtccagggatacctggggaccaagtacaccccgtagcagcccagtcagccccacctggagagtatctaagacaccagctcgtggggccagacagctccctcccaggggagatcagcacgtgtgctgggggccgggtcggggggacggaatgcgccatgctggggttttcttcccctagacctgtgagctcacctgccaatgtgcagtagcatgaaaacagagggtgttggggattatttaattgagttctgaatttatgcttgagtttctgtagaaggagaaaaaaaagacaaccctctttaaacaagtttcattgaaaggttataaaacacagataatttacatgtgggagcagatggcaggctgggtgctgttccaggcaaaccatgtgtcccccggcggctctttttaatggatactctgagtttatatgtggtttataaactcaagggttagtgacttctgagtgattgactgtaaggcataaaaatgcctacagccgtgaccttcatttctactgaggaggctttcctcactcctcctactctggtggcacccagagccaacttagcccatcaaggctcccaaaccctcatccataggcaggttttgatgacaacctgactgagactccgcagccttcttctgttgctgagcttgctgctgttgtgtgccccggctcccggcccacatcctccccctctcaagtttgcttcactcttctgaatgacgcctatcaccccatctcctggcaccctgtatcaggagagcctggccctaacacacaatgctggccttcccctccaggccctccatgaggggaagccctggagctggcctctctctgtggcttgcccactgccctgcccatcccagcgccctcccgtttctaagcagaacgtgtctgcgaataacagagccctccctccggctgggtccggtcctcatcagctgcgtggcctggcacacccccccagcactcctggacctcactgtctgggttctctgaccaccagtgataaggctgtggagtagcagagaggagtcaggaggtgtggctgggacagcacaggtctactgcatacaggtttggatgaccaagtagctcatgtagggtgcagagaagcgaggactcctattacttctattacaaaggttcatttccttctaactttgcagggcccgtcccagatagttcaccctgagctcctctgcctgcgccaaggagtcatcaagtgtgcaccatgttggtgggggtgtggtggagggaggaggtggaacagtcacagccaaggtaccaggaggacttgggtgctaaacacgtgacaagcctcactgatggggtcagcatcatcaccagcccatgttggggaaaccgaggcacagagcaagggaaggacttgctcagggccacgtggggccacctagagcccaagttccccactaaaccatagtgctatcctgccttttcccaaggtgaacctttactcgatgtgtcaaagcaggaccaaacacacctcctggaaatttccaaacctggagctcaagagaagtaccctggctggcacaggggacaagacaagatgccaggcaagatggagggtcagattcctgcagctcaaactggatgaagctcatagaaacacacaaaaagcaaccatgtacacatggttattatttttgtatatcattttagtgcaagctatgtgtttctaccattctggtggaaacttcctaatctttcaacagaactcccccccaccgcccttttctttttctttttttctggaacagagggcaagatcttatttcaaaaacttcaacgagg

SEQ ID NO: 40009 - DNA, 2058 bp, Bovine  19866880637103
  misc_feature (1)..(1): n is a, c, g, or t
ngacatggggctcccattccctggggggaaaagggactgtcccttactggatagggtccctggccaaggtgggcctgagtgtggccctctcttgggggaggctgccttgtagcctgtcccacccatggagcctgcctgcttgggctgtaccagcagatatggctttagagtgtagagggagatggtgacacacggccttcatgtcacagccaactacacagccagagctccttggagatcagagaaagcagatgctttgccaaccccttcacccctcccactgaaacaaccatctcttctctccaaggacacgaggctgtctgggccccacactgtctgcttgcaaataacgacgaatgtgtggctagggctgcaggcatggatgggcaggatgtggccccagggaacagtgggttctgggggttcacgtggttagagctgccctagcccaccaccagggcagcctggccagggagggcagatcacccccctcccagggagcccaatttgcccatgatgggaggaggctctgatgggcaaggaagccaggagccaaggccacctcctccctggcgtgtaacctcaagtaaatctgtcaacctctctaggtctcagtttccctctgtaaacgggggtgggagccctggccatgaggattcctgaaggtcagataagcattagtgggagaggcctgctgctctggtgggcctcagctggggctttttgctgggcactgcaagaactgctcctgacccagcctccccatcaggcaagagggaattggagggcgggagggacaggtgacaggagtccagctgagggtattctgactaactctgacctggctctggtggcagcaggcccagcctcccggtctgctgggccgccatctgaaacacattaccaatgctttgtaaactgcacatcactcggccacatgaaagcttgggatctaaaaatagccactcccagaggatgccccgcattggcggggctcagctgacctccgcacgcacacccaccactaggctgtcccttttgccagggagccccgactggcagggccacacccacccaccctcccagtgtgggcagccactgcctgaggccactttatctgagcacagatctcatccagctggtcaatgcttcaggcctcaaggccttacctagggcacaatgtctggaggagccaggaggaggctgcccagagtgtgtcagtaaccgcaggcccccttccccagacctgtatatggctggcatgtctgtggaagccagtggaactgtctcacaggagggacactggggccctgtggaggtgaagcatgggaagggggacttgactgccgtcagatggtggacaggagggccactggtggatgtgctggtatgagaagggcagggtcctgccctggaccccatggtgtcagtggggaatctgtcccagcacaaaggcagggcagctgtgggtctccaggctgccaaggttgactctttgccctactttctgtgggctcctttccctctggtctctatgaccaactgcaaaaccactcttttccctaaaaataaacatgcttatgggattgggggaagctttgtagctatcaaaggaaataatagggtgtttaagaaaattacattgcgttttaaataaccagcatgaaagtcattaagttttaagtttcattcaaatcagatggctctgtggctggcccggtggccaggcaggcagagggtgggtgggcccttagggacgctgagcagcagcctctggagagttttacagtgaggtctctgctggctgtagctggggtccaggcagggcagccctgagtatatgctgtgctgcagcagccagcccagagctcgaaggcaggctctggaagcagtctgcagcccaggaacctcccagctgtggtgggcaatcccctgggtggggctggggcatgaacatagaccaaagggtgtgggacagatgaagctgggactgcagaggccgtagggattgatgaccatgttgggataggggtttagggatggtggtttggatcaaaa

SEQ ID NO: 40010 - DNA, 1728 bp, Bovine  19866880718137
  misc_feature (1)..(1): n is a, c, g, or t
ngcccgggttccctgtttctggcccttactccttgcttatctctccaggcctgagtttcacatctcagaggatgaaacaaggcctgtgaacctctccgtccgctataaagtgctctacgctatgtgagctgtggtggtggtggcggcaatcattttgactattttagctgctcttggcaaatggccagaaggttgcggaaggccttggcagggttcctacctgcagctggggtcatggtgggggtggaataattgccaaataccttcctggcatgttgatttccagacgagatttatgggccctgggagtcattatttcagagcaacttaacaaaaaaaaaagaaagtaaccacggcctcatcataagcacttatttcactggaaagttgtttgcaaaacacaacagacatcaataatgatgttcacggagttgtaaatcttctaagcctgccttcccttcctggggactaaggcacttgatttggttctcaaagagctcagaagtttccaaatagataacagaatcccagagtccattaagcaaggtaatttacaatagtggcaggccaaattcagggaaatgcattagagcagcttcccatttggcttgtagaaaagacattattccgagcacacacacaatgaatgctgttaggcgacaatgaggacactggttagctctcccaatgagtttatttaccctcctcaccgtgcagtgcattaagtttgagtgatagttgtaccaccagatgagattctcaaacccttgactagacacctgggacctcatttccaacccattaaataggcatcactggacattgtaacaaggagaaagcaacttcacgtagagctctgactcagaccttaagccatccctggtcaaaggtgtgcaataaaaaaacaatttcaaactttgtacttcaagagatcctagagagagtttgctgctgctgcttctgctaagtcgcttcagtcctgtctgactctgtgcgaccccatagacggcagcccaccaggctcccccgtccctgggattctccaagcaagaacactggagtgggttgccatttccttctccaatgcatgaaagtgaaaagtgaaaagtgaaagggaagtcgctcattcctgtccgactctttgtaaccccatggactgcagcccaccaggctcctctgtccatgggatttgccaggcaagagtactggagtggggtgccatcgagaagtttttaattccggtatatacaggtgatcaatgttaagaactaaaatagcaatctggcaaatatttctaaggagagcttccagagtgcagatttaaaatctcaagggaaaagggctattttggcatatatttgtcttatcagtatgacccaatgatcaactgacactatgatttaaaaagtgagaccaagataattttgtgaaaaattgagttttagaaccatttcatgtatcagacctggttggcattacctcaaagcactttgttttcatgttcaatatgaaaagtattatattcacacaggtagttgaaagtgtatacatactcacaaatattcacctttaaaaaaaaggttaaagaccagaagcataactcttagcttcaaggataataggatgtgttctgttatttttctgattcaacacagtgatacagagaaagaatatcaaagcattaaaaataattatgcaaaaagatactagggtgaaaaggcaaattat

SEQ ID NO: 40011 - DNA, 1319 bp, Bovine  19866880750302
  misc_feature (1)..(1): n is a, c, g, or t
ntttaggtgagccaataaagcccagaagagttaacttacccagagccactcagccaaggagtggaaggtaaggcgtctgagggtagagcttcccaactcaggccttccacctccactcctctaaggggccatggataagtcccttccctgacacgacctgctgtccccacctgcagaggagggctggcaccccaggacccatgcactgtaccatgggggagggggagccctgtgacctgataaaacacctgtttcctccaccggagtcttgtttgtccacagtggcaggaagcagccagtcacaaggcatgagggagcgtgactgtatggcttcgggaccgcagctgctccccctgcccctccacgcggctctgtgcccaccctgctccacccggacctcagctgttgtgtgacttgaaaccactgcccccagagctcattctcacagctcagctaaacctcccttcatgcggggacagggggtgggaagtgatctcaagaggacccaggagggcatgggctgccaactgcccatgagaagggaccaccaagaccccgcctcccactccaaccccactcatatctaagtctcagggcacctggggaggtgggcagagctggtatggacagccctgtttactgcctgtgacagctggttcgggaaaccctgttcaggcccggggaggaacacctgggtgctagcggccaacacagggctcgccatcagcccctccctctgctcctgagctggaggcacggatgggcagtcctaagctgcggccgaggtggcaggtggggcaggtctgcaggacgggcgggcctccttcagggtgacttcctaggcctgaaaggcatcacggaggcccccctgaaagtttccaccctgggggtatgcgggtgtgggggctgcagattttccaaataccacacagccctccaagtcaggaaggaatccaagtcaaaattacttttaagtctcactgcccagctcgaacctataaaatgaacaacaaaagaggggaaacgccatgtgggctgggcttgggctctgccaggaaccctctgtgaactggggccatggggaagcaaagccgcgattccttcctacctcttgagcccacagttctcacactttgctccaggaaaacaatcagtgagcatcattcccactggtaaagaaggcaacccgtgtgaaaactagaagtcacatgagggagaagcgaataataaacatgaggggagacaagcaaagaagccacacgtgggcactgcccggggtgcaccccacaccctggaagcactggacgagacacaggagg

SEQ ID NO: 40012 - DNA, 1426 bp, Bovine  19866880758866
  misc_feature (1)..(1): n is a, c, g, or t
naatgtgcttgtctaagtccttgcacaaaattagagtagacaaaattaaggggaaaaaaaatctcatgataacatataaccatatggtgatctctataagaaattgtagctcagatgcagactacctaggtagtctgtaaaatctcaaacataaaattgagcttaacccagaatgatggagtccttgagtacctagcacaagtgcttagctcaagatgagcccatcttcaaactgtgcatccagaattttcacagatccacttccaagaagtgtgagctcactcttaaaaaaataaacttgaaatgccatggaggagaaacaccatgcaacaaccagcataaataacaatgtgactcggaatataaaatatatgtttaatgatttttgaagattcaaatatggttgaaaatcaagagtcttgagatgaccattcatcttcatgaagaactaaatagaactttcagaaataaacattcaaagataaacgctcaatgagagagtgcaagagtacattagaaaaggcctgaagaattcaggagttagaagatgaattagaaaaaaattatatagaatgcagcacagagaaaccaaatatgggaaatgtgaaagagataatagatactgagatagaaggaggtagaatgaggacttgtaacgtgtctaatcagaatgcctggggaggggggaaagagaaataatggagcagagacaatatgtaaagatggctgtgatgaactgatgaaaggcatgaatcctcacttcctggaagccaaatgaattgcaagcagaacaaatgcagagaaatctgcatacttacattatagaggggcttccatagtggctcagatggtgaagaatctgcctgcaatgcagaagactcgggttccatccctgggtcaggaagatcccctggagaaggaaatgccaatcctctccagtattcttgcctgaaaaatcccatggacagagaagcctggcaggaggagtacgtggtgtttcaaagagtcaaacacagctgggcgactaacgctttcacgtcctggagaaactgcaggaaaacaaagtgaagattttaaaatgattcaaagagaaaagaaggattacatacaaaagaatgaaaaggctgtcagctgacatctcagtaacaaggaagccaaagagcagaataattaaatgtttattaagttgagaggaaagatctgtgaacatagaattaattacagagcacaaatcactcttttaaatgagggtaatatgggtattttagacagacacaactaagaaaactcgaggcataagaaggaattatgaggaataaaagcagaattaatatatactattttcatatatttaggtcaagggaggagtgattatagttcatatggtcctgaagttcttcctgtgggagggtatagttattagtta

SEQ ID NO: 40013 - DNA, 1972 bp, Bovine  19866880763966
  misc_feature (1)..(1): n is a, c, g, or t
ngaagaaggaaagagctacccctccgtattcttgcctggagaattcctggacagtccatggggtcgcaaagagtcggacacgactgagcaactaacatataacataaagggaccctcctcccactcattatcttaaattccatgcataaggtcagaatggacctagtcctcctcctcctccaagaagccttcctggctgcccaaccttctctggttcctatcatacacccaggaagcgcgtcatggttagaacaaaagagagaatcaagggtgacgtgtgccatgtttgctgattctgtctctcaaacaagacgccactttccttacatgaaggatatgacatgtgtctcctaccctgcatctgcctagtataagagatcaataaatatctgatcattgattatagttattaaaaacctgacagctgattatagttatcacagaaagaacacatcacgtacaattcccgctcatgtgtgtacagctagccccatgcaaggaatatcaagcatgagggtgggtaacaaattccaatgataacccagattttccaaatataaagacacagggcaaacattggccccgaattttttatatgaactgaatttttaacttttcatacaaatgttttagagccaggcatggacagcttaaaatcctttttgcaaagctttgcccacagagaaagtaatttgcacgttctcttctccagcagtttccaaactctacacctcatatctgctccttctaataattttcctctgaacacctgcctgctgctccattaccgtgggatgactaaagaacaagccatccttcactatcacatttcttctacctgacagggccatctcaggatttatgccacctcccagagagctctgtgtaagacaagctgactagctaggagtgcactgggaatcagagaagtcctgagcccagatatcctgagctcaccaataatagccatgctgtgcttaggatcaaagacctctgctttagacctttcttcctcttcaccacattggttttcacaatttctctgaaaaaatcaatttggaaaaggcattttgaaggggaaagcaaataaaattttgttactgaattttatttagaggaaaaatgtagtactttccataaaaaggcaatttgattatattacaatttcattcctaatctgtatttcctatgtcaaagcattctttaatggatcagaaatagataattgcaggccgtatactgtgttgcagcctccggaaacaatgtgtctctaatgtcttctcccagaggcccgcattgctagcaacacagggccaactcctgccagatggatggcccgcccagctggtttgtcttgccaccaagatggctgtgatcatggaggtcgctctgactgagctgcccagagctgaacacttgagggaatggactccccacatcatttccctacagattcctgaattcctcacttttgccccagaaaagatttgacacagctcccactgaactccctgtaggtccaattttcacactgacacctgctcacgtccatccccgagtggctgaactttcaaggttggggcaaatacaggaaaggctgtctgtcccctagacagattccttccacaagctgagaaatggcacccaaggtcactccacagtcgacatcaacaggaagccagagcccgtgaagggataaggggttgcggtgaagatcccagtgggagggcagaggaaggacacagccaccgagctgcaacctcagcgctcattcatttgctgactgtgcacactgcgtgtctgtactgtagagaccctgaagacacgccgcgctgtgaatcagacagacatgtgcctggtgtcaggaaatgtaccttccagaaggggaacgctaatactaaataagcatctggagaaaagtgaagtggaagactagatccaggagctggaatgggcctgcagcaggagtcat

SEQ ID NO: 40014 - DNA, 1061 bp, Bovine  19866880789245
  misc_feature (1)..(1): n is a, c, g, or t
naaaggcattttaccaagctgtaatgaccaatataaatgtcagttacgctttattagaatattttagagctcgttctctggatcatgatttacactatcttagaatacacagaaaatgaactggggttttcacctcactaatcttatttgagaggcaaatgcagttagccacatccaatattgaagaataattactgtttcctcctccaggacagagtgagacaacagtatgtgacatgaataggaagctttcaagcaatcagaacaaaaattatactttcttttacacagctgaggattctgcaattcagtctggcctcaattcatctgcatctttcattactaacactacctcagaagagagggaggctgtgcagtaagactagaacactgggcttaaagtctatacaactaggcaatctgaattcagtcactgtagccaagtctctttacctttctgaggtgtggtttctatctatgaggataactgtttcataagcttgttaagagaaccgtgtacgtgacagtatgatgaaaacagtatgttgtaccatgctggccccacaactgcttgttcttgatattcaaattacctttatggaaatgagtcaaacaaccttttaaattaaacacacacacacagactcacaaaaatatattacccatttcatataggaatttaaccttggtcaagtattttgcaggtcatccaaccagaaggaagactaatactgcattttatttatagtgcttgtacagcaatagaaaatagcatgcctaggtaaagaactcctctggatacaaacaacattctccacaagtttggtaagacatgaaagcacaaggccaaaaaccatacctaaatgaaaccactgctgaacaaaacaagactgtttactagcgctaggcacacaacatcatccttggctttgatatagatcacatcctggggggagaaaatcttaactagttaaaagcataaaaaccatattcactcttgtttataaatacacacttttcttctcataactaaagaaattagaattagccatctccaccaa

SEQ ID NO: 40015 - DNA, 2532 bp, Bovine  19866880831842
  misc_feature (1)..(1): n is a, c, g, or t
nactctttgcacccgccggcctctgtcctggaattttccggcaagaattctggagtgccatttcctactccaggggattttctcgacccaaggatcaaacccatattccttgcatctcctgcattggcagctggattctttaccactgagccacctgctaagcccttaaaaaaaattaaccaagaattacattgtaacaaagtagatggtagcaaagagtattgtgaaatacccaaaggtacaatagaatagatttttccttaataaatcaacaatggctacaagacacatatgtgactcaaataccatggccacagaatagtacagatgtgaggaagatggacacaaatgcccctgactgtacactctactctctgagtgacagatcacaaagattaataaataggtaaactacagaggaacattacaaatgtgatccaacagctgacatatggaaggaacctgaattaggttcctagggctgttgtaacaaaacttcacaaactgagcaacttaaaacaacagaaactctctcacacttccaagggccagaagtctgaaagccaggtatcagcagggtcactcactctgggtgaagcctttcctgcctcttcgtagcctgtgacagtgctgtcaactcctggtgccccttggcgcacagctgcatcactccagtctctgcccttgtcatcacaaggtgtttcctatgtgtccacattttcccctcgtcctgtaaggccattggtcaggctggactgggactgccctaatgacttcatcttacttgataacatctgcaaaggctccatcatcaaataaggtcacattcaagggcaccaggtattaggaccatgacctatcttttgggggaacacaattcaagccgttacagatctcagtgacaaagcaagaagatacattttctttgcaaatgtgcttgtggcaggagaaaacttatcttggattttttcagatacatgtctgtatctgcatatttatcatataaataaagtcaatattctcctcaaatcttacaaatcttttttatattatcagttgtatctcatgtttcatttctggttctattgcttctatatatgttctttctttgatcaattgaactaatggctttgtgaattttttcaaaggcttaaatattggttttatccatcaatactcattttttctgtcttatttattcagtttattattgcttgctttcctaattttcttagcctttttttttacaaatctaagagcttcagtggattcagttcactgtgtatatgggttttttattttgttctgtctttatgtttcctagagacataggaatttagaattatacagtttttctaaatgaactattctggcaacatcccatatggttgatattttgtacttttaattattctggggttttttctgaattttcctcttgacttaggcatacttccaggcaactttttaaatctgtgtagtaatacacttcacccccaaattacttttcatttatttccaaactttttgggttatggttggaaataaagcacatgcaatttcacccatagttcagcgtgttctagggggaatgttcctgtgtggggtgctcagatgtgatcactggctcaacacatgtgaccatggatgggcccaaactctcagactagaggccctaatatataagccatgcagagttggcccacctcatgggcatgcatatgtgttaagtcacttcaaatcatgtctgactgcgaccctgtggactgtagcccttcagactcctctgcacatgggattctccaggcaagaatactggagtaggttgccctgccctgctccaagggatcttcctgacccagggatcaaacccaggtctcccacattgcaggcggattctttaccactgagccatcagggaagcccaagaatcctggagtgggtagcctatcccttctccaggagatcttcccaacccaggaatggaaccagggtctcctgcattgcagggtggattctttaccgctgaaccatcagggagcccaacctcatgggtaagtctgggtaaaactttgcttttaaaaaaggaccaaggggttcctggacggctcagtggtaaagaatccacctgccaaagcaggagacacaggttggatccctaacccaggaagatcccacatgctgtggagcaactactgagcctgtgctctagagcccaggaaccacagatactgaggccacatgccgcaactattatagcccaaatgctctagcgaccgcgctccacgacaagagaagacaatgcagtgagaagcccatacaccgcaactagagaaagcccgtgcagcaacaaaaacccagcactgcagaaagtaaagttgttttgctttttttaagtaccagttcaaaaattaaattgcaaagcaagctgaaactttatctccaagaggaaactccccataaagcatagtaaaaattcttaaaaccttctttctccacttttaagtctgtcaacatcccacctacctgcag

SEQ ID NO: 40016 - DNA, 757 bp, Bovine  19866880831891
  misc_feature (1)..(1): n is a, c, g, or t
nctgaaaactgtgaaatcctgatgtcctttgaagagcatggtctggcttattcacacatttatttctgttaccacacttaaaagaaggtggcctgcggcctgagaaaacccactggtgggatgttaatgtgaatacaacgtcccagcacagagaggcagcagacttgtgtgccaaggcatctgatacaaatgctttgatcagcctggaaagtgaactgtctttcttccctactctcagtcctggaaccgcaggttacatttagcaaatattttgactggtgaggctgcaaacaactgtcttcattctgaggcagaaaaccaaacacagcgtgttgaacaaacaaagaggaggaatgattcctgccttggcccgcagcatcctgacaggaatcagtccggggaacatacacgggaatcactgatgagaaggatcaacacaaatgctcgtctgcttacaaactggctaggtttgaaggactgcagctgatatcagatgtcagagacatgtgctgttaatgactgaggcggggacctgcccaggtccctgtgggcaaggacagggcagggataggacagggcagggaaactctgcaggtaatttccaaggctttaaggtgaaagagcaagtgtctcagatgtcatggtcacacctagagggcagtttggctatcaatgaagagaatgaaataaaactgaacatcaatcctggggacgttcattgtgctgtcgcgtccagctctgacaatgaaattttcca

SEQ ID NO: 40017 - DNA, 2145 bp, Bovine  19866880836954
  misc_feature (1)..(1): n is a, c, g, or t
ngcagaaagagatttgagacagggagagggagacacagatgggacaagaggaggcaatctgaccacagaagagattgtggagtgatatggccacaagccaaggaatgctgagccgccaggagttggaagaggcaaagagtggactctcccttggagaccctggaggttgtgtggccctgatggatttcagacttctgggctccagatctgtgacagaatacatttctgttgtcaaaaagtttgttacagcagccgcagggagctaacacagggcggctcagcctgtcagagctggagatctgcagcccctttgccattatagcagcaactttttggatttggggcagccctgctggagtggggcctggccatggcagcatgtggcgcctctcgtatccatccttccaggcctctcatgacatccgcggcatcacaagctgccatagtctccatgcccttctcgtgtaccccggagtcccctgccttggaacacagcgaaagctgacctgatgttgcacatacatcttttatgaatggattttgctcagctctgaggttgtctgtttcttgcctggaggcagtggcaggaagttggtgctgtttggggccctttagccctgaagtggcccactccctctcctgcctcaccggcaggtgacctcacaggaaagttataaatagcaatcagggatgggttctgagtgcctcgaagtggaagtaccatcatttgatgacagttcagtgcaggggagacagcgggatgcggggggccatcgcttctcctccgctctgatggtaatcagagcaggcagatgtctccgacagctggggctaataggctgtcagacagggccaggctggcctgggacatcttctgcgcatcctggccctggtccagcccagactgagggaaatcaagcatggggccgaggagggaggctgtggacctgctggcagagactgtgcccaccaacccccccacccccaacctgaggatgaaaactcactcactgggagtggggtggggggtgtctcctccatccagtctggacagtttttccatttgtgggaaatggtcatttcaattattgatgagagatgaaaactaggctaattcagttcaatttctccaatggacaaaactatttataattaacctagcatcaaaggtcaagccagtggtaaattactggggtggcagaagaattgcaataaggacccactttgcgctgaggtggaatttatgcaagaaccatcttgagaagtgctctgaaatgtattcctgactcaacaccagagtgtggggccacctgcaagaccatcatctcagcattgggacattttgagcaaaagagggtctgggtctgtttcttcaatgtgtggccccgaagagggagtgagctggtggcttctggggaagggaaaccaagatgttcttgacttgtccatccatgtagctggggctttgtctttggtagggatcctggaccgaggtattattcagcgaacttgacaggaagaggactcaggggtctggcagagggtagtggtttcttccagcacatgcctggatcctcctccagcctccagggtgcacctgcaaactttgggcaagagaaacttggctgtttcggcaaagagttctgtctctgacatcacattgcatctctggaaggtgttctccgtccttctgggagttaggtttctgattttctgaggacttggcttccagtaagacctccccactgtatgactggttccttaagacttaaggtcaaactaaggcctcaccacttctgtcctgggacccctgatgcacgctctagggaggggaggggaggagtcctgtccaacagaatgtgactgtagctcagtagaccaaccaggctgccttgggacactctcttcagatgttttccatttgtttcttatttttattttttaatatttatttatttatttgactatactaggtcttagttgtagcatgtgggatctttgatctttagttgtggcatgtgggctctggttccctgaccagggattgaacctggaccccctgcattgggagcatagaagcttagccgctggacccccagggaagtccctgtccatttgatttgtttcctgggaggctggggctaa

SEQ ID NO: 40018 - DNA, 1605 bp, Bovine  19866880861845
  misc_feature (1)..(1): n is a, c, g, or t
nattatattatattatgaaattcggttgtagtcttcaatgtaaagaatctttcaatgaacaaagtacctttttttcttccaattcctgttttaattagaaaagtgatggaaaatcttgaagtacctccctatagctagttttaaaaatctatttggaaaccttgaaaatattggtaaattataaaagaaattgaactctgatacttttctcttatttcattgttccctattctctgaaaagccttcaacgttgtatttctatctcagaataaggatgcattttcctctcagaacctgaaggtattctaattatatgtaaatcagttcacagaaataaatatccatggttaaaggacatttaaaatgttaaaaggtttttctcaaccgttcactgtttaaaataaaaaagtctatttccagaaccctggcagctctaaccccctttcacgactgcacagaagcacatgcaaagccatttttcccgggctcttctcttccctgaaagacctcaagtggggaatcacagtttgattctgaatttgaggcaattctatgttaatcaacttttttttttaacagtgaaaacttttttcccttttattcagaatcaaaacagacaattggacagagaaactaaatagaaatcaagaaagttgctatcatattggaaagggtatcttaagtattatccttcaagtcctgaaaacactgccacatatgtatgtttaaagtatcatgattgccttgatgcctatattttgctctaattccctggccataaacaccaacaaaatgctgatgatttctctgtctccacccccaaatcctcggctcacagagctgaatgcctatttaatatctgcagttggttatctcacaggcattgtaagctgagcatgttcaaatgtaatccttgatctgcaaatctacccgccccccactttctccctctcaacaacaggcagtgctgtgctttaggtctctcaggacaaaagcacagcagttatccttcattctgctttatctctcagtccactttcaacccatcagctaagttctattggccccatcctcaaaatttgtccagaatgtgactatgtgttatcagctccatgatcattactctggtccaagccaccatcatggtttgcctgcattgcttgtactggtcttctccctaattgtgacctagccctcctagaggctactttgagcaccatagttagctagaatgatctttcgaaaacataaagagagtcatgttacttcagtgctctaaactctccatgacctcccagtgtcagagcaaagtcctattcatgcagatggccatcaggcacatgaaaatatgctcaacgtcactaattattagagaaatgcaaatcaaaactacaggtgaggtaccacttcacaccagtcagaatggccatcagggagactttcctgtgtccaaaggttaagacttcaccttgcagtgcaaggggtgcaggttcaatccctggtcagggaactaagatcctacatgcctcgaggccaaaatacatcaaatagaagcaacattgtaacaaattcaacaaagactttatttttttttttttttaaatt

SEQ ID NO: 40019 - DNA, 1358 bp, Bovine  19866880901070
  misc_feature (1)..(1): n is a, c, g, or t
ntgggccaactctctgcttttctaggaccgtgcatgctattcttcctgctcaatagaggacggtgtctgctccaccaaattagccaaacacagataatgttgtcagagaatggctccattagatttcacagacgcctgacaccaagacaaaagcctctaccctcgcagcatttcaacatcaattttttcttacatgactcaaaaaataaatttgttttgtggggcagagatgatgagtttgacaggtttttagaacagaagataaaagaaaagttagcaatattggctggggggattccagccagtttcattaggctatataacatacacaggcatgtcggcaacttggtgacctggaagggcctttcctactggccgatggatgtgggggggcctggctcctgtccccatggggatgtaacttggtttgcacattctgcctcttggagatgacaatgttgagattcagagtagagaccttaagctaagaaatctggtggggaactgagggttgaagaggggccgtacccacagcctccacatgactgaacttttttttttttctttttgcaactgtgctgcgtaagcaatcttaattctccttccgggatcaaatccatgcctcctgcattggaagtatggagtcttaacccctggtccaccagggaaatctcggaatgtttcttataagactcaaaacagtactcaggtaacagtgcctaggaagtctcgggtctgctgggagaactgagtggagagtgggacacgggcatcccagaaatgggccagctgttcagacaaagagaggtcaggaaagcactgcacccacagtactgggtgggctaatttcagcacacacgtcaggaagacctgagaaatctaatgaactctctacactttattttcttttcattgaagaacctcttataataatagggaatcctaaaaaataattcttccatcttactacccttatacaccagagaacattttgcctgtgtcttcccatatccatgtgtggaagtttggtctttctgttttctcttcctgttccctctggcaggagtcacggcacacatcttgtttctggggcatacaccaagttgggagacctccaggggagaatggaggtaaagactctttctacaaatagcatgcagagttaggcccagggtggattccttggcagagtaaggggcttgggtgtctgctggacatttgatgggaagaccagggtctccttcattctctccctgggggcctggttctcactgttagatgggcaagggactgggacatgggaggagattggggtgcagcatgatggagtatgaagtctgaagaccaaaaatgggatt

SEQ ID NO: 40020 - DNA, 2380 bp, Bovine  19866880932938
  misc_feature (1)..(1): n is a, c, g, or t
ncttcccccgtctatgtgttatttagtagcaggctatgctggttagttgccttgcatgatgggaaattctcccttgtccacaaagtaggcaggactcttagccccttactgggaaatggaggtttttggtgggatacctggaagaaagatagtagtgctcaggttttcaccttcccagaggatttgaggttgatttctaagctctacagaggggacacaggacaaactgtgatgcagaggtggagcccccatggggcttgagcaagatcccataggtgctctgctctgccttgcttccctcacttgccagggagatggaaaatacccccgggggcctacagactttaggtactgcagagcaactggcatcctgttcccaggagaggcaccagtgttgttctccacagccgaggagaccctgggcccatatgagggggaggcttggtggacagtgtgtgacttagattttgggcatctccatgatgagcaatgaacaacaactagagggtcagaactttgggggccctggacccttgcttcttggagatgaaacagtggatgggccttccttgagcagggcttcttcctggcacccagtcccaaagctcccagtcctggaccacccttcaaagctgggctgggtctactgtgttgaagatcatgggcagggccagagcatttgtgcagggcgagcaggggcctctcagaggtggtgtgtacagtggggagaggcaatcggagggcagggtgggtgaaggcttgtgtggcttgctcagaactttgtgacttagttctcagagtagagcagaccccttgggagaagggccttccgtggacattgaacactgcatcaaagagatggctcaacagccagaccccaatcggttgcatgagctgaaatactaggggcctgaggaaggagtcaggtgggatgaaagtttagagaagatttctggaacctaacttctacctgctcagtagttcactgcgatatttcatccttgccggtgttacaaaaatatggtaatagtaaacagctccccaaacagcaacatgtagggtttataaagcagacacttccagggcactcccagagctggtgaaagcctggagagaatctggtacctgtagccacctggctggcaggcctcacacgctgccatttggagggtggccccagggcctccagccagagtctggctttgatgtctcgaaactcagaggcttgttttctttttcattaagcctgtttgtgaggcttccagcagcaagcgagtcttacccaatcctgtcacatagcacatatggcctcggagtcgggcgtcctgcttggagcccaggcagggccccactgggtgtggggacggggaaaactccaagtggtccacatggactcaacctggaccttcttccagtgccaagttcacagaggctgggtaaattgatagctttggctgagatttaattgctcggatagagcagtatgtgaagtctcttgtgggacataagagaaattagacctgcttaactgggctgacccctgctcataagccaccgccactgttcacaggcaccctcttcctccaccagggagactctgtgagtggtattgtttacagtagctgttcgatggggctgcgtattaatctaacattagttacggtggttaagcttttagagataatgaaatgtaaatgtgcctccagaactcgccatgttccccgaaaccgaacacattcgtgaagaaaaattgttgggtaaaatgactacgaatattaatcgtgtggatttacaccctctacagatggcagtgcagatgctgggtagagttaggatgctggctggcaggaaaggggagctgggctcagtggccaccgaaaagtctcacgggagtttcactggggccagtggtggggtggggcctcagcttgactctgagctctgctcttcaccagctacccgaccagggtccctgggtggtctgcccacctgtgtccctccactggtccctgcacatttaccctgatcacctccctcctctgcagccccctcgcactcgaagtcagaaagagccagtgatgtttattttttaaccaacagtagttaattgttgagtgcctatgcatgccaggcaccacgccaggcatctaggttactctcactcatggagctgacatcccagcagttagcaaataatcaccaagtagctgtgcagttactgactgtgagaagggccgccaaggcaaagcaaggagagtgataggcgatcataatatgatggcagaaggaataatggctgacactgggcttccctgcagctcagttggtaaagaatctgcctgcagtgcaggagaccttggttcgattcctgggttgggga

SEQ ID NO: 40021 - DNA, 985 bp, Bovine  19866880934227
  misc_feature (1)..(1): n is a, c, g, or t
nacacgatgtagcaactgagcacacacgcacacaacccatcgagagcagcagtagcaggacactaataaagtgggggacacctctgtctgcattttgggtcttgtctgggcccttggctgtcagggcctgcagaggctgtggttggggtgcggcttgtgctgtggccctggccgctcggtttccggagggcagttcgagaccccgggcctcgtagctcacctcccctagagcccccggtcacgtgacagcccacttttatggcctggcacagccacattttattgtcgaattagtaggaataacagtagcattttagtggctgattgggagctgtatattagcgactgtattagtaagtgcgcagtgacaggagaccagtgagagggagaaaatgagacgcagtatttatcccctgtgcaaaatcttttttattattaaaggcactgggttaactgaggatagatttaatgcctgctggtaattttattggatcagcagcagctcagggtccccactgcagactgagctccagacccctcatccaggatcactggatttcttggagaagctgcaggcctgggacgttgcagacaggagcactttcttgggacttgctctgagccttttctctgtgggcagatgctgggcagttgatgtgagacggggtgaatctctcgcccatttggagatgaacagtgtggttggtgtaggttctgaggtgtctgaagaaagagattgcagggagaacatcagaactggtgcaggcccacccctaactctcaggggagcctcccagcagggggctgcaaaactcaaaagtcttacaactgggggcagccaggtggtacccctcaccctgtgctccattctgtccagtgctagctgggtctgctgcggtggtccagccttggagaaggatgggtgtgcctggttctggctgcaggagcacagctgctaagggccatatgggctggagcttagatt

SEQ ID NO: 40022 - DNA, 1727 bp, Bovine  19866881000816
  misc_feature (1)..(1): n is a, c, g, or t
nacagtcaggctctcactagggtgtttaactgaagcaagccagggaggccatctaggagagtctgcaagccacgctgtacttctgaatcaagctgggatgctcagccggatgagaggtatgagccttgtctatatgtggggaggtacagcctggctgctgtaagcaaatatctacagggctgttgtgtgggaaatagattagatctgccctatattaactctgagggcaggtcttatatctgcagggagaagctagatgaaagcaggtttcaattcaatataaagaactgtccaagagaccttctttgacaggtaataagttcccagatactggaaatatttgaacatagatcaaatgaccacctgtcgagcatgataaaggggtccccatgaagggcctctatcccattctaaggagatgacaccaacaataaagacactggaggtagggcactctgatctgaaggtaagattcagtgccactcttcccttttaattttgcaaactccattagtatgagtcctaaatccattaactccttggtggttcatcctgtcccaaaatgaatcttacctccccagccgatctccaggcctcctgataagagggacactgcctgccctgcccctgcactgagcctggcacaaggtgggcagaagagaagctccgtaaatgtgtgaagccaggtgaatgatagcttgggcatgtccaaggcaagaagccagctgggctccagctgaagtcctcacgcactgagagtccatatattttatgacctcagagtgcttcctggcacagactccttccaatggtgattcatttctccgttgcagctttgccagtatcagggttttctacttagttctcaatgaactagctatcatagttatagctccctaggaaatgccatacagtaactctgtcagggtttttatttgcttggacaaatcgttttatttcagcaaggtgttttattagcttagagagtcataaatcacttcaaaggtagatgaaagatgacccaagacacacaattttatatgagatgttgttctttctgctgaagatcatgtctccttgattatgactgagatcaaattagtttcatgcaaattatgaaaagcaaataacatcaacatacctgtttagtcacctggccagagctaagaagctgattccaacacccatctggttaccatcactcaggaaatctgtcatcaacatgcagggttataacctgcatgtccccaaaaaggcagtttgaagttccttctccaaaacataagtcctcctgggcccaaatcacaccaacgatgaagacactggtgtgagaatagctatgagaaaggagttgtattagctagcataggctctgctatgatgcagttacgcctaaacccttaaatctccatgacttaacccaacatatggttatttctcatcctcaccaggtttccagtgagatttggtcacgccataccacagggtgactcagcaactgatcctgctgtcttccatcttgttagagcaggaagaggagagggaataaaaaactctacccacttccttcccttccttcctaccttccttccctccttcctttctttcatgttaagactttttttttttaagaagtttcaggttcacaggaaaattggaaggtgcagagatttcccatattccccccatatacatgcataatctcccccgttattaacattgtccac

SEQ ID NO: 40023 - DNA, 2699 bp, Bovine  19866881006142
  misc_feature (1)..(1): n is a, c, g, or t
nacttgtgccctgcgcaggaggcacaatcccaccttcctggggtgctggccacagcctctccttcctcacccactatccactccacagcctttagccccagtctgaccacacagagctgcctcaaaaccagttaaaaagcatgacccagacttaggtacctagcttgtacaaaaagtggttaaagcatgagcaaatagacaagcagccaagcatgaaggaccagttttagcatctgtgagtttgttaagatgagagtggagaaccatcaagttctcacaccatcaggatactacgatggcactttgtccccagccttcaaataaatactgtacaaaacttatatatataaacttgcaaagtgaatggctgaacaagcaaacatggctataaataagcaagtaaaaagcaacagccttggcctctatctgcattctgcgggcagagccgtgctcatttctgagttctgcagcctctccaagtccaggtagcatgatacctggctgttctctcagccagaaagtttagctaccaaagggcagtgcagcctctctccatcccctgagctgagaggagagatggtagaaagggactgctgacatttgcaaggcttggggctttaactcttctcaacagtccaccaaggtcttctcttccttttacaggtgagaaaactgagggcagctcagagaggtgatggaacttaccagaggtcacacagctacaaaaataaccatcccagtcctttggacatctctccccaaaccaagtcttccccaggaaaagcaacaatggagatgcaaggggatatgtgataactagaggcagtgagcactccaatccagagccagcagttaaaatgcatcgagggcaacccaagagttgtaactcttgtcgccactcatgatttatgcagacatctcccattagctctaatggatgtagggagcataaatctcggggcgcagctccagacaggctcttgtgatctaaacgccactaaaatcaatgacatcgccccagtattgatatggcaattgtggcgcttcataaataggcctggcaggttgggaagaaggttggcctgcctgccacagcctgaccgcaatgccgctgctggtggcaaccacgtcccttgggagctgctccagcagagtgggccagaagcacggatccagagccaggacactgggttcaaatcccatcttcccatctcactatctttgtgacctgccaagctactgacgcaccctgaggctctgtctcaagatctgtaaaatgagaattaagtgaattatcatacatacagtccttgaatcgttgtgaagtaaagcttcactctgagaaatacaaaaggcctgcgtagactattcaagagagagaagcagtttgtttgaatttgtcctggaggccttcccggcagagtgcaacaccaaagcccagccggcaagagggccaggattcctgagagggcctttgaaggttgatgcccatgagttcatgcaggcatctggaaaggtgggtgggaggctggaccccaccaggagtgcacacccaggcttctgccccagcaggcacagctgcccacaggacaacaccgcctgtaaggacccccccacccctctgggttaaactcagagctcacagccgcgccacctctttctctgcccctgattgaagacaaacgagcacataagaagctgggtctgaaactctctggaagacgggaattatgttctattctttacatcgatatttcgatcagtgttttaaaaataaatctatgaggaggtctttgctctccaaagataactggtaacagagacaaaggcctctgtgagtccactcagttcacaacgaggagtgaagaaaagctcttattcagactttgtcttgaaaattaaaatgataaatgataaagatatgtttatttttagcttatctttttaaacgtgatcattgcaagtctgctaattattagaatgaacaaaaggtaagtgatgggttggcagaatcactccagcattcgctctggacaaacccacagaaaagcaaagcagggtgcacggtgtgatggaaaggagaaagcccagcagcttccccctcgcctggcttcagctgtcctaagcctgcgggctgctctccctgcaggtccagagctgactgatgctgcctctgcaccataggaaacaagcacagaacggggacgctgagaaccggatgaaaagagagacaacaaaagcccgcagaaggtaggctagatgcgctgaatcaaggaaccgtgagctcaagctggctaccaggcagctttaggggatccttccatcttctccccatttggtccaggccagccccccaccagagagctttcatctggctgtataaaccaaactgctgggtcctagatgggggccaggagagagtgggtgtgtggagtccttgatcttcctgccggatctgaggacttcagacaagatgaaccaccaaacagggagcgatgagactgcctatttctttccaatgctgaaacccgggaagcagtattggtgaagccatttcagccctgctcttccactgtgctggacagagcacgtctacaggcatctcacacaccagcccacagacagcacctggacactgacctgctctaccagctagaaccctggagccccagacacagggctgccagtttctccatacc

SEQ ID NO: 40024 - DNA, 2112 bp, Bovine  19866881007932
  misc_feature (1)..(1): n is a, c, g, or t
ncttgtggcccacctgggtaacacaagatggtcaccccatctcaacatctttagcttaattacatccttaaagatgtgggaaaagagcaagtgttaagtctcaagggtcaggcagctctgggtttgaagcccacctctgtactactcaataactaagatttagttctttcttagaatgttgccaacactcgggttgattccaataaagggcccagcagggctgtgatgtgagaacaggccttgctgtccttctctaacagcacaggaggtgcaacctagtcccagatgggggctaggacctagtggccctgcaggatggcctgggatggggccatgtgctcccccacggggggactcggcacctctctgtcacctctcaggataccatgtcttcctgggccctggaacctggcggccttcccgctggtttctgcctcagtgcccccagcaacaccaacaggtctccatccgggctttgtttgcttttaattactaagctgcctaacgagaccccagcatcaccatgtacagacacacctggctgcctctgacagataatgaatcctcagccacgttcaagggcaggccttcctgacagcagggggacaatcgactgaaccaaatcagggtgagctgggaggtcaaagaatattgaataaggagtgctatccccaccccacacgtgccctgcctccctcctatcgtccgggagctcgatgcccacgtcacctcagaactatgtgtttctgacaaggaggattgattctccgggaaaatggaaagtggacattgaacaaacactccctcacaaatcgaaactaaggcagagagcctttaacatcacctgtgagtgactgagggaagaaaagtcaagttctcctaaggccggctagaagaccgaagtttataggctccgctggtattattttcctccacaaggtgaaaggcctgccaagcatggatttcttccaccctccccactccaaattctgcaccctgcatgcaaggccacacaacctccctggagccatcctcaggcagaagggcctcctcagtgatctagggtgaggcaaagggcagagcaggaggcatgggaacaactgggggtcttgcagtcctcaaggtccaagaggccagccagatagggccccgtcaatatccatccagccccaggcagggaagagccaccaagaggcatggaactgcttggtctttcctgagccatcgaggacaccagggcagactcagctctaactcttcccccacgagaatcccccagcaggcacagagttttaggtgttggtgacatgtggtccatttcccatcaccctgctgagtgttgagatggatcagattccctaggggacagtggtggccagggaagaagaaggttttgtgtgagctgacagtcagccagcttcctggggaaccaaagacaccatagctgtgaggataaaagccaaatacacttttgatccctttcttgtaaaaattttaagtacatatgtacgggagcgcatgcacgcacacacacacacacacgcgcgcacacacacatctggaagagcctctagaaagtcacacactaaagtgttaacagtgttttacactcagtgatgggacctagaatttgtttttcattgcgctttgtctctatttttcaaatcttctacaatgcacaccataatacttttataatgtggggaaaactgctatttttttaaactgtacagatgcaaagaattggcagccttagtaatcctcacatccctacatccattctgcaagaactgtttctaacagactgttcctaattaaattatagagaaaatcagtcacacttttgctgatcgtgtccaggatgagggaccacgggcgctacgattcccctggggcaagggggacactggaccctctactcagctcccctgcaagtactggagcctcatgccaatgtttatcccatttaagaataaccaaaggatccaaatagatttcataaatcacttagtctctgcagctttctcctcgaggacatgcaggcaggcttctagcaaagatgacgcaaaataacaagacggatgtagtaactaatacaaagtgcttggttca

SEQ ID NO: 40025 - DNA, 734 bp, Bovine  19866881014663
  misc_feature (1)..(1): n is a, c, g, or t
ncctcttataagtggctcctctctgtctacatacctatgtttcaggcaaactttccctagagccttacccacccatatccacgtgtggaaatcccatccatcctccaagagccagcccatctcttccgtgaagcccttgtagccagtgagggtacttgccctgagtttcttgcccttgggctgttccacagctttcctctgcccatatccccatcccactgagcaccatcataaattgtgatctatcccttattccctgctaacctctgagatcctcagtgtcagaaccacatttgctcctctcagtctcgcccgctgtgccagaaaaactgagacgtgcacttgcaggcatctgcatcagcccataaatgaagaagtcaaaagtaagccctagttttggagagtcagctaattcagccctctgagacaagagtgacatggaatgatgcaattaccttcctctggcctggatcccagccccatcagcagccccggaaggaataagctgcctctcctggagatgagtctccatcacaccaacccaagtgcaggcccctcccctgccacagtgatgtgcagccctccccttgcttctgcccccaccctggccccatcaagacagcccccccccccccaccattaccttggaggaaaatccccaacaggactctgggcacttcagaaaacaaaaatgctacactcggtacacatgtggggctcttcatggcgccaca

SEQ ID NO: 40026 - DNA, 4423 bp, Bovine  19866881049678
  misc_feature (1)..(1): n is a, c, g, or t
ntcagaaaatggaaagagagacatgctgtatatttctctccctgctccctccttattttatgactatagctcctgccaggaagctccgtagcttagctctcataggactctgttggcattatttccccgctcccccatccctttggtcctcagggtggtaagaccttgcccctggggaccccattatcctttgtttgtttcctttcccattcccacactaatttaagtagtcttctcattaaacctcttcaattgacctatctgggtggatactgtttcaagatcttaaacgatacatatgccatccttttgtctttgagagtctgctttttcatccctcctgggtgatgtagatggttcctgaacaaaaggaagccctaagagatagccatggtggatgacgggtgaagcacaccctcaggtacaggtaagcgctaatgcggcaagcccagcactcacttggaaaagatacctgaaggtaaacatttctaatcaagggtgagggtcactgagacaagctggctggtttctctgatcacagcatcccttgttgttatgattcgttcatccactcaacacatgtttttgagcacctactggctaccaggaactttgttaggtatagtgggctgacgagtagcccctgaaatatgtccatgtcctgatccccaggacccgtggatatgaccttatatgggaaaagttgtgaccaaggattttgagaggagtttatcctgaatgatctgggtgggccctaaatccaatgacaactgcccttacaagagtgaaggagaaggaaatgtgacagaagaggagggggcagtgtgaccatggaggaagagactatagcaatgcagccacaagccaaggggcatcagaaaccaccagaaattgggagaggcagaagaggaccctctactagaggctttggagggagcgcagccctgccagcatcttgatttgcgacttctgatctccagaactctatgagaattaatttctcttgttttaagccacccagtttgtgatactttataactgcaaccccaggaaactaatacactagtttctgagaatagaatactgatcaaaacatacatggtccctaccctcctagaatatacagtctaggggagcaaacagacaatgaacgagtgatcaaaggtaagtaattaccgactatgatgaaacaacaaatatacttggatagagaagagtgcagaggagcgctttatttattggatttattggagtttagggtcagcatctttgaggaggtgatctttgagctaagttttgaaaggtgagaagaaccagccatagaaaactctcagaaaagagctctccaggcagaggagacaacaagctgaagactttgtgattggaaacagattctagaaacatgaagtagtccagtataggtagaatgaggtcagagaggtggggagggctaggacacaccaggctcatgggccatgataagctcttggtattttattggtataaaggcatctgatggttgagcgctggataccgtgggctactttaaggttttacgtcaattcctctggttattggtgggaaatagcttgggacgggggatcagggagagcatggagaccagttagtagactcttaaagtcttctatttgagctctgaagatggactatgtgatcccttagagatggagaagaggaggtgaattgaagacatattttggagctagaactgccgagaattgatggatactgggaaggcaagaaagacatgagttaaggacgaaaacaagattttagctttgagtaactgggtatatgttggtgccatttattcagatgagacaatgaggagcacagtgggaaaggaatgaaaccaggaaatatgctcccactcccatcacagtgtcaataaattcttctgagataaagaaagttagcccagtttctgttgttttagggacccagcgaaaagtgtcctggctcctgcaaaaggggcactaagaccattggccacctagatctaagcccctaataccattcaccacaacacacagagaaaaccaggagtagggaatagggtcttccagagacatacctgtcctgtctcccatgcggcatccacagtctgctctaattaagggttccaatgatcaggatctaatttaataaaccctcgccccatccaattgactctactaatcattcaccatgtttctgaccctgctggaggcaccatgagatgatctgggggaaacaatgattgaaagatatctcctgaatacctgaacacaccactacttaacaaacattcccactaaaacattttatgttctaggtcaatgtcaccctcagtttcttgaattctaaaaattgactacccttccccaatcttccctacaaacatatattataagaaatttactctataaaaagatgacatgtccacatggtctaaacctgccttcaaggcaacagagacaaggaccatgatgatgatggagcctgctcagggtctgccggacagctgaaatcttgtgttaaaatattagatgatactctttctggagaaggtgtctgaagaatcacctcccaaatccattatgtgggtcattttccttcattcctctctaacatacaccatactgctcagatccaggaagaaggcaaaatatacacatggcctcatgccatttgccaaaagtttatgcatatttctcattagaaatccattcactctagcttcactctgccctccttagcatttatttaatctcttattttaaggccatgtccgatactaacattcttgataatttgatttcccactcacaagaaactaaaaacagtaactatgaatggctagctaaaagcttgagaacaaaggaggagacagacattaaaaagcagaaataagaataggaaaagtttggggccagatagtaccagggcaaacaatcccactcaattcagtaaccctggggggcagcactgcagggtttaatccctggtagttcagttggtaaagaatctgcctgcaattcaggagaccccagttcaattcctgggtctggaagattcccctggagaagggatagactacccattccagtattcttgggcttccctggtggctcagacaataaagaatctgcccgcaatataggagacctgggttcgatccctggtttgggaagatccctgaagaaaggaacagctacctagtccagtattctggcctggagaattccatggacagagaaccctggcagtctatggggttgcaaagagtcgaacacaactgagtgactttcacttactaattagtagtgccaggacagctactgggcaaagacaagtctcctctgactaaggttgtcaggaccaatcttttccaagatgaactctctaggctgacccccagaaagagcagtcaatatcaactcaatacggtaggatgtgtcatgcacctatagcgtactcagcacagttccaagcctggaagaagccaatcacagctgcctgctgagtcatggggtactcctcagcctcagttctcctggcctcaaggggtcttctgggcattgatgctataggcatagaaaggaactcagtgctgacattttaaaattaaaaacaaagatctgtacttactttgatgaacactgatatccagacaatattccaatagctgtattaagtaaacataaatgtgagaatggctagttaggagaagcatccatggtcactgtggtgccagtgggcaccttgctcacaccccatcaattagatgtttcactttgattataaaatgatccactgtgccaggagtgagttcatatacccagaaattaccacgtacataatgctcaacaagtcatatatcactcacacatgttcatagtccagaacacacgtgtgctgagtcgagatgtaagttgttcgagcaagaagggcctttagcaatgaaatggctcagtctcttccttctgtgagtgggaaattcaggtgaagggagaaggaggaatcctaaaatcccctccaggccaaacaccatcaactcaactcacaggcctttatgggtcacacagcattttgtccctgaggccttgaatcctcagcagacaaatgtactgaggtcaagcgcaccccactaggcacccacgtcgagtagctggaggcctctacagaaccccaaactctttgagtcacaaggaggcagccctgttcgaacactggctctggaaagctcttcctcaggagagtatcccctccctgctccaacgcaagctcctgtctagaatcttctctcctgctgaggattaactatgctgcatcttgggcaggaaatgagttctttgctgcttattgtggtcaaatcctaaaatgaagtcaatctagcaggaaggcggataaacttatgtct

SEQ ID NO: 40027 - DNA, 762 bp, Bovine  19866881056506
  misc_feature (1)..(1): n is a, c, g, or t
ngtaggattcatcctgacttgcatagccagagagggacagaggcaggccagggacccagtctttttgcctctctgaccagggctctcctaagatccaggctgcttcttcaatcaactacatagtttggtttgaagatttactaagacatttctggggaggaagcagaatgttaaattatgcaagacaaggaatactgttccctgcctattcccaccttctaatgtgacctcctggtctggcttctaactggtattactggggactgtctgatttgcccaaggtggacttgacccaaagccagggacagagtaacttttggtagaatctgatccttctgatccccacagctgtgtgtcatctctgggaatctaatgtgcagctgcaatctgaaatgacctgtaggagacttcattatttggcagcagtttttggtcatatggttgtggtgttggtaagattagagacagaaaaaagttttaaagctggcaaagtaaaatccctaatacatattggggattttaaaacttcctgacctggtaaagaaacacactgataagtttctcttgtgtgtctctgagtctgcctggggagtaatctgaatttatgttgccttttaattttttcctttcaaacttactgaattgtatgatttcaacatttaagcatcacagttggctactgagaatcatcagtgtgctcgcaagtccagaaacaagatttcaggcaaattctgaaattctatgtgtaaaatctagcccatt

SEQ ID NO: 40028 - DNA, 806 bp, Bovine  19866881084231
  misc_feature (1)..(1): n is a, c, g, or t
ngctagtaagctgggtcatactcagaatgtctggctatgcaagtttgaaaaaacacatagaaaagttagagaacaccatggtaaaggatgtgagattatatgagaaataagagtagagagagtacacaggtaacggtggctggaactgctgcagaggggccagctgataggcagaaccgactgggggctgctctgcactgcagggatggtcttcctgcccgctgcagtaattaatattccccgtgatgtggtcactgcacacttaacgcctcttcctgactagaggggcacatcctgctcctctcctcctacagcctgccctctggtaattatggtgcttttatagtaaatctccttggcttcatgtaagtcctttcacagcacagcagccaacaaattgggaagcattgttcctaaaggcaaggggtgggccatgagttgtaactccaactctgttagaggccagcgatgtttgtctgcttcttgcctctgctgatgacatttgggggaaaaacaagtatggaagggaggacaagtcacaagatagcttttataaaatgcctattatggaaataatgagaacccaataactaccaactgcagaggcaagaaaaataataaaaataataaagcagaaaatgcacaaagcaaacaattaagaccattttattaaaacagtacttgctactcggcaagcattaattctcaacacacaagggcagtaaatgtttatcaaccgaattttgcatgttaagaaattcacacagaagttaatatgctccccaagctcctaggatacttcacag

SEQ ID NO: 40029 - DNA, 1784 bp, Bovine  19866881110379
  misc_feature (1)..(1): n is a, c, g, or t
naaggtgagggaaggtgaaggttaatgcactgcgggttttacagatcagccatggttgtagaaaggacaaagactctgcctgcagcctccacacacctgctggaacagggacccccttcctctgtctgtccgcagccctggcttccccaggcctctgtgaaggtctgctctgctcctgtctctggggcagactcagatggactgtgagtccttctcagaggatccctgccaagcactatgggatctaggccaatcttgtgtgttcctctgatcctgcagggaccctgctggggagctcatcaagggcaagctagggatgtggtgttgcacccacagagacccaatatttgtctgaacagcatcttcaattttctctctccccctattatgggtcctctggcctctagccagagctctcgcccatctcctcaccaccttccttgcattattcaggatccaaacaagttgcctctcttccatagagttggacttccgtgtctgtctctcttcctccttccctctcctcactcccctccccttttcccttctcccagtgactccagtacttctcagcaactggaatcattcatatggcatgaaacttccaataatggaaaagtacttaataatacctcttttactaagctcctttcctaactggtgaggaaaagaatgttctggttaattaaccatctaggttaaaagaaagttaccagagctgccatactaaaactaccaatttttgcaaggaagaaaatagcatatactacaatttaataattgatgaatccgaagatatttaagactctcctaaggcttttagtcaccactgagaaccctgaccattttgtgctgggaaatgtcataaatgccatttcacagggttttttgattgctggaaggagatttcacccaaccttatagacctgccatatgcaaatactcatgagcatgtacctctaaccaggcccctcccccacagctcttctatctccaaccaacacagcaaaaatggatagtttaatcccatccctccctcctggtatgccagagctctcaagtttagaaaccgtgggtacatgactcaggaaggatgacatggggtaaccttcaagcagttctgagaggccccacccaaacaacttccatgatcctctgatagccatcaggtctaccttaggccctggagaggctacaatccccaccaggtgagccgagttccctgactcagggagaagggtgcagggaggcccggcagtggctgagcccagaaaggcatgctcatatttcatcatccttcactcaaaagcataatatcatttctttccacagaagttaagcaaccatgacaattccagggcttagatgagctcccctctcctacatgaaggagggtgtcaggggactaaattagtgcccactcagatctgggcgactagctgactcactccttttttctgccgttctcctgctccctaacccgatcctggtgtatttaaataacagagacgattttgggccccagctcctccgggatccagcccatgagctgttgccaagctccttggcccacgggaagctcccccctcacggctgtcctgccaattatagaagaggtttgctcacatggcccacgaggcgagggctgatgaagcccacagaatcccccagagctggggagcggcttctgacatttcaaaaggtcaatcaatcacactatttcatgggaatgtaatcatctcccaggacctaaatgcaacaataaaaccaaatagcgccagaca

SEQ ID NO: 40030 - DNA, 1396 bp, Bovine  19866881186849
  misc_feature (1)..(1): n is a, c, g, or t
ncttgactgacagagacgccttttcctccaagactttgcattaacacaaggaacgagaaaagctgatccgacaaaacgctaagaattatgtctttgatgtatgaacactctttgcccctttggaccttataaaccagagttcactccacattcccctgatgtgttcaaggtgcacgtcttcaataacaagcggtctctgaaggtagatttcctcttacaatcgagggactatttccactttaggggcttagaaatgcttccgattaattgttaatttagccttttgagacctcaatttatatgtagcattgaccagtgtctgcaaacaatctgagaaggggaaggaagaggtcccaaggaaattaatgtaatggtttcatctcattactagaagcgcttgttccaacagcccaacaacttcactcattcattcaaacccgatctgaaatccaattaaaattggaggtcacacacagcagcagcggttatttcctcattactgagaggtgagtggacttcaaaactacagaaaccaaaggagatgagagcagagctttgtgaaataacacagggtccagcacgaaggaaaactcgaggtgggaggtccccagggactgtcatggaaatgcacagacatacggtctgtggaaagccttgtttcaaaaagcatatggaacccatcttgaggaagtagtttcatattcctccagtagaccctttatcagaacccacaaactttaactccactcaaaaagaggcccaaaaaattaaaacaaaataaaattaagaagcagagaattaaccttccagagaaaggttaaaaaaaaaagtctgtaggtctatgggaaagaaatgctagtcattcgttcactcatccttttaacaatatctgttaagatcttacttgggctatggcagtgaacaaaacagtatctgtgcccgaaaggagtgcacagatttgcagtcatggacatggaaacagaccataagcaacagatatgatacatagggaaagtatattgtagattgaaaagtaaaagttgctcagtcatgtccgactctgcgacttcgtggactatgcagtccatagaattctccaggccagaatattagagtgggtagctgttcccttctccaggggatcttcccaacccaggtattgaaaccaggtctcccacattgcaggtggattctttaccagatcaaccaccaggggagacccatatggtagattagaaaggtgtcacttcatggaaaatagatggagaaacagtggaaacagtgtcagactggattttttggggctccagaatcacggcagatgatgattacagccatgaaattaaaagacacttactccttggaaggaaggttatgaccaacctagatagcatat

SEQ ID NO: 40031 - DNA, 2150 bp, Bovine  19866881322035
  misc_feature (1)..(1): n is a, c, g, or t
natggaccggaggagtcactgaaccaattatctagtgattagcttcttgcagaatccagagagttactggaagaaaattggtaaattcttttcattcttaataaaacctaaccattatcttgctaatgccttatattaagagttcaaagtcatctctataccattgatcttcaaaggaagatatttcctaatttatttaacaaggcttgaaaaaatgagggtgaggttcctttcagatgggaattttatttcaattttgttaaaatctcaagcattcttgtagaaaaagtgaaaatgttgtagtttcttttttttttttaatttgaaaacatgaaagtgtgggtgtaacagtgtaacatatgcccagtctgactcttcgcgatcccgtggactctagctcgccaggttcctctgtccatgggattctccaggcaagaatactggaggggttgccatgccctcctccagggtatcttcccaatccagggatcgaacctgtctctcttatgtctcctgcattggcaggcgggttctttaccactgagccagtagggtgggggagggatgcaaacaaataataagaaagatgctcttataacactattattactgttgaaaaaaaggaaaatcattccaagtactgaaaagtccaaagatgacatcatttgattttcttctctaaaggctttaaagggctctgcctgtggatcctatctcttgcatccagtgaggccctgtcactcttcaatggactggggggttcactattgcggtaagatcagtccaggtgtccaggcacacagcttaaacagaaaggtgggagcaccagggtactaaaacatttccccgcagaaatgctgtgggcaaggagaccctttcgctgaaccaggaggaggaatgggacagcatcgctccaccctcagagcggaggacagcagagccctggggtcccacttcagcttccattcccttcccagaacactgtgaaaaaaagtcaaaatgatatggctgtgaagaaagtgcaacatatgtttagaaataccggtagagggaaacatctgaggagtaagaaaagctttgccagcttttactacaaacgggggaagcagtagatcccagccccaggtaaacagactcccccttttctgaaactcccgtagcctaggaggtcagtttcaatttccccgtctagtgcactggacttttagacaaggcatagtggctgcctgtggactgaaaacacaagactgtaatccagggcctgattccagctataaaatcgcttgcatgccaacaaatgacgtgatggtaactgatatcccacagctgggagatttcacagtattccagatgagtgttttggaacgagaaataaacttgtgtcacggctgacttcctgccacttctggttcttggcctccatcgaatcactgggttcagtggcagcttgtaatcccctgagcattctgagcccaccgagggggaggggacgcccctccacccgggaggagacaggcacccttgtttccacaggaggcacagagaggctctgtgtcatcagcctcttgggaagcggacgtttctgagatcttaatattttccctcctattcctgagaaaacgctctctccataaaaatgagttgtcagctgctcttgaggccctctgaattgattttggctctgtccattacaggtagcttctgtgtgaagaaaccatataaatcttactcagtcagggagtgtttaaaatggcaaatttcagagtaaaggcttaacaaaaaccataaataaaacttcagaagtaatggaagtgtttataagcatctgtggaattccgcacaagaacaacaagcgtggttcgagtgccgagagattgactgaggtgctgtgtttgctgggagagagaggatatccatctttatttggcctctgtttagggaggctggacttggagaagcacagatgggggcagggctccgtggctggtacatgagaaggacttcatcaccatcaagggccggggtgagtttggactggggaggctgccaggaggagaggaacttgccaaggaccaggcctcaggtcccaagcatccaggcctactgtgtggatgaatggtggataggtaccaccttcacagtgatcgtgt

SEQ ID NO: 40032 - DNA, 828 bp, Bovine  19866881375301
  misc_feature (1)..(1): n is a, c, g, or t
ntgtgaaataagggtaggaatggtgccttcttctagagttgttaggaggattaagtgaaatataagcctgtagcacacacagtatggtggctggcatacagtagtcctgaaatggtggccatcaccatctttattgccattaatgaagacaacaaaggtggagaaatagtaagatcacttgggggagggcaatgagtgcaatttctccgtcaattattgtggctcaatcagaatgtctttccagtacttgaaaaagtactcccccaaaacctgtaccagaactgaacagaagagaattcactgacagaagtgacaccaagaccctgaatgctttgcttaaggaagaaattatctgctgcagaagcttcaaaccagatggttataaatgagagttagcacatgggcattatttaacgactgaatttctttaactaaaaatctaattttattatggtataaatcacactttcttgaagtagggaattaattttagattttgcatttagtgttcataacctttccacgaatttgacagccaaatcatttaaaacgtcatttaaccaatacaatacaacagctttattcctcattgtgcccttcctgaatccattatctttcactataacgtaggggaacttaaagtaaaaaattaccatcccataaagctgtattttattgtgcagttgaactgcataatctttatttttgaatcaatataatgtgagtgctgagtaatatttttcataatccaaaaatctattacagattctcagctaccaaaaacgtagtttgcaagctgcgaaagaggacaaagaagatcctcagatt

SEQ ID NO: 40033 - DNA, 1570 bp, Bovine  19866881378551
  misc_feature (1)..(1): n is a, c, g, or t
natacgcatacgtgggaggcacagcctcttctgctataataaaagaatcccataataaacaccctggaaattacagatattcattttccaccaataaaaatcatcagcactgacttccaggtacctttttcccccaggtgtgtgccgtctcctgcttcttgtgcggccagaagtggaaacacccagtaggtttttactgacagcagaccagtctgaccttggagacctcttctcctaggtattcccaggattaagcacaggcccagaatatggcagggagtcagtcagtatttgctaaatgaattgattgtcaaagacacactcccatgagccagctactttactgaactgcaggactcttgccaataagacattatctccttacaaaatattgactgctaggacattaaatacactgaatagaaatcagggcttttcagagtatcatattttccagacaattctgatttcattcattcaacaaacatttatggagtacctactatgtgtcagaatggactcaacatttcataaaacatttgtattttatgggaacccacttttagagtatcatattcctcacagaggaaagagtaaaacctacctacctaactaggcaactttttcccatggaaggaaatgcaaacacatccctcccaaatttaattcgaacaaacatctacttagtgccaatgtgactttatttttaaaactatcaaagtactacttgggattgatgtatatcactatgtcagtccacaagcatttattaaacacctcagtgttcaaggaaggcaagaacttcaaaatagtcctcaccctaaggaccaggctgtgttgctgggagcctccgcatcgacacattatgtacccagaattaagactctaatctggatggcacacaccccgtgctccacccaggaggagaggggaacgggagaaagcattatcttctgcatcttcttcatctccaaaattgttagcctcaactgcccaaaacttcaagtaacccaaagatgtatctattttaaatacaggacacctaaattaccaaactggagctgcatccacccatgtaaagtcacatacaaatgtacccacataaataaacatccacagggcatgttcctggttcagtgggaaaccaatgaaaagtggtccaagtgaccccaggggagcaggatcacaagtgcaagttcagcctgaccaaagccttaacttcaaagactctgcagggagcacacagaaccaatgagcataatgtttaaaaacaaacaaacctgtaagcctccacaatttaaatgctaaaactgtggtccaagtcctagtttacttttttcagaggttttgctagctctgtcccagctcccttttgtatcagagcagagaggagcagcccagtaagctgtttacgtgatcctatttttgttgctgttgttatttctcgcacatgatcaggctggaaccaaaggcaactcagtccacattaggatcagggcacaaagaacatgggggaagacccattttaggcggcttcgactggttttttcccaagtctgcagactcccct

SEQ ID NO: 40034 - DNA, 725 bp, Bovine  19866881385994
  misc_feature (1)..(1): n is a, c, g, or t
nctgatacccttctggtggttattattgttgtttagttcccgagtcgtatctgactcttggcaacaccatagaatgtagccagctaggctcctctggcccatgggattctccagtcgagaatactggagcaggttgccaatcccttctccagggaatattcctgtcccagagattgaacctgcatctcctgcattggcaggcagattctttaccattgtaccacctgggaaacccgcccttctgactagaaagtactaaatttttctgtgctaatatcagatatttttgttgcactccatttcttgctttaaaggaataatcaagaagtacatattattcagttttgtaagatacaccaatgacagctgatctaccaggataatgtgtcgacctgggggcagcatttgtacagcaggtaaatggccctggaaggatttaacatcccttctgtgttcataggtctaaagtgttaggaagcatcctggtggctcatgctgagtgtctccacaataatcctcaaaataattggaggcagcccaaggtgtcacggccttgaatcattagctggtggagaagcaggaacaaacccacataatgaggtatcagcgagagaggggacccactgagagaagcaacatctgcccccctcagctggaagactcagggacccccgaggacccagagaaagtacaagggagctgagtaccaggaggaaaaatgaggg

SEQ ID NO: 40035 - DNA, 936 bp, Bovine  19866881400388
  misc_feature (1)..(1): n is a, c, g, or t
ncctcttgctcttccccgcattctgtctttttcctaaaatcccatcctacaccgcaggcttgagcttgtagaaaataaatgccaataagtcaagcaggcaacttctgcctacagcctggccatgcaattccaccaaggcaatgaaaccccaaccctgctacctgcttgaatgggaagcaggagggtgaggggtagacaggaaaaatgaatatctcaaaacatgattcagcccacaggcaatatttgttaagccatgatggcttcacgtgctagtgaacctgagccacagtgagtggcacttcatgcactgacctccagattcaagtcacgccacagaacagtgaacagagtagccagctccaggcagaggagtgtggggaagtgaccttcaggctcagcatggcggaagctcttggctcaccagctccagcccgttagagctgagccataattgatcaccgcagcaaatcaatgcaagtgaggtcctttccaaagctctgtacaaaccaacttcataatgaaatatgagcttgtgaagtttctcattttgtactattctgacacttcttgcaatgtgattaaaatataataagatcaagtagaaaatactatttgctcaatcaccaccaaacctaacacagtcaatagtccaattccgtccaggaagaaaagtcatttccaagactctataaagaaacctacatttaaatttcatgttctctgctgttactttgaaaaattacatgttttaaatataggacaaatacagggcaagccaattcttgttataataaattttttctaacattctcggtaaataaaatctgtaagccctagccaatgaatggctgcttcaaggttcattcaataatacataattccaggccaaataataatttgctcaattccttgaagtctaattcaagccccatttcc

SEQ ID NO: 40036 - DNA, 826 bp, Bovine  19866881425121
  misc_feature (1)..(1): n is a, c, g, or t
nactggctgcaccggtcgtcctgcagatacctttatggaatgaggtgaggttgtgtacaaatccgtcacaccagggactgtgatacccccaaatcactcatcttacaagacagaggtgcaggggtcagagggcaggggtgattctgaagatagctacatggatatgggtgaatcaggctgcctccaacccctttctggtcaggagagggttgtaagtaaaaatttggatttcaccaagtgctagtagacctgcggacaggtgttcaaacaattgagaagcaacttccttcctcctccaagctcagtgagctacaggcgtgaactaggctgtgagcctagagatactcccagagaccttccaaaacattcagcaaggactgagggctcaagcggctgggggcgcccaagaccttctgacgtttggattatgctgctaacaggacttcatcagtagccaaggactggctggacctggggaaacttgggccccacttgggtgacatcaccagctctgccaagtcctggatgctctgccttgtggtctcatcaagccggaggtgatacttagggatacgatcagttgtcactgatacaaatgagctgggtccaccgggtgagctgcttttaacatatcctgaaaaattctaagatgtgatgagatctaaacatgtcacaagcagaaagggcaagaaatgtttccaagtctcatttgctcttatgaagtgacatctagaaagaaaatgaattcgatgaagaggaaaaggcgaattatgatattaaaaattcatttccatttagcaaattgctattagcatcacaattcagg

SEQ ID NO: 40037 - DNA, 1650 bp, Bovine  19866881452971
  misc_feature (1)..(1): n is a, c, g, or t
ntgattctcctgaattatgaaagaaggacaagactggtgatggttctcagggctcccctgagcccatgagctcagtgtgcagagcccttgcacgaggtgtgtgcagatggctaagtggaagtggtagggctggagcccagggctcccccccaccactgactggccaggatggtgcagtcctggtggggcccccagctccagagggaagccagtatagggtgaagcactggggtagttcagagtggagcagaggcacagccctcctgccccccaggactgccctgagcttcagtgaggtgcagcaatgttgaatgcatgctgtagggcgcacacaccaagggatccaaggaatgggggctcaggcacacctccctgcccgccccccaccgaccccattcctttttcagtgttcgtctgtatgcctaaaggccaccattaaaaggtaatgttctgggagagaaaacctgttcaaacgattgtcagaattacctccccagtatgaattaaccagttggccattaaacatctggatgtgaattagtcgattacctgaaacaccggtggcagctgtggtttcaaaagagcactgactattggaacctgaatttaaatccctgttttatccccgccagtgggtgtcaagctgtcctgtgcaccctgatacatgaagtgtttgttcagaacacaggacattcagagcctgcaccctgggatcctgaatcccattcaggacacattttaacaaatgctgctggaggtcagggccacccttggagaaatgctgaagaacatctgaccttggaagtcatcggccgtctctgtcagcttcagcctctgtctctaagtgaaagtgttagtcgctcagtcatgtctgactctttgcaaccccgtggactgtcacctgccaggctcctctgtccatggaattctcagggcaggaatactggtgtgggttgccttgcccttctccagggaatcttcccaacccagggatcaaactcaggtctcctgaattataggcagattctttactatgtgagccaccagggaagatgagggtgtttatgtgtctctgaccatgcccttgggaggagactgagaaacaccagcctttggggaaagatgaggtggtggggaggccctggtcttggatgtgaccccaccgtcagccccaggggcagaggagcactgacactatgtgtgctgggaggggctgtgctcaagagtgtgagcgctgtgctgccatggggcaggagtgacacccaagaggacaggccagcagaggccttctgcacacgcttctgcagcttgtagagcaggaagccaagtgcctggtgttcagccctgggtgcctctccccttcagacgggtgggcactggcccagtgctctcccatgtcactgaggaaggtcgtgcaccttgaagaagacagagggtgccgtgagaagggtggaagctgtgactctattacggagtcggagtcgacaggaaccatcagcagggcagccccggggaggaaagtggcatatggtatcagcaggggcaaatgagtgcggtgttatcttcccgctactttatgatcactgtttgcggagagtgcttaatttaaagtgtcttctcggcatctcaagtgtgagcaaagactaaaca

SEQ ID NO: 40038 - DNA, 1652 bp, Bovine  19866881639001
  misc_feature (1)..(1): n is a, c, g, or t
ngtgttggctgaacctgagctcgtaaattcctttaaagaagacagtcacagcctgcatgccagcacttcattctgcatcactccacccctaaatggactgcactttcctttatgcaagaggtgagaccctgaatgtgtgggtgccaaagctccatctataattcaattagatatttaaagtgtcaaaaaggcttccccggtggctcagtggtaaagaatccgcctgccaatataggagatgcgaattctatccttggattggaaagattccctggagaaggaaatagcaacctattctggtattcttgcctaggaaatcccaaggacagaggagcctggtgggctacagtccatggggtcgcagagttggacacaactttgcaactaaacaactatttaaagatggaatctgctaactaaaggaatcttacagagaattctatatcaggagacagcttccttcctcccctgcaagtcttcagtctggacaggaaggcatcctgtcctccttccagcctgtctccaggctcacacagagaaaaagctttgagctaaagcggacatcgcagtaattctacccaaaacttcttcctgccgacaatcaccacatgcacaatctaaaagaaactactaatttttttcttttaataatcatgtggtatggaacacaggtcaattttgaaataagatacataaggaaaaataaatcagaggcctgcctcatattcctatgagtagtaatagatgctgaattggggacctagtagcttggttcccctggaccacccattccacagaagatgcaataaatgtgacaaccacaagttgccacaatcagaaaagttcctttgtttgccactcagatggaagttatttattatttactgatctacaataaatatccatactccatgtgggccagacaacttaccagtccattctcagattttgttttcagatcaagttttattaagccaaatcctaaagaaagaacatggtcactgttaatagattaaataactcaagagcagcatctctgcctcccttaggcaatcttaaaaatgccatgagtgtagagggtaccagtctccactgctgcctgcctctgtgggtggagcttggttgccatggagcctggttgccacggaacagtggcagatagaacaggcacagcccccacctgcagtcccagaggagtctgagaaaaaggtgtgtgacagcgtgagcaccagcctaaggacaggctaaatttagaagctgcagtccaccgcagcggcacccagacctgctcccgcctgggagaggaaacaggaaggtccacttgtctgagcaattcgctagcctacctggactgggtgcacgaccaaaactgcgtgactagccacagaaggcttatcctttttccctgacatgaaggttctaagagctgactgacccagctctctcaaactgtgacgggtagaataccaaacaagcaaacccagtctctgagctgaaaggccactccatgcaacactcaccatagcccttggtgaagacatccctggcagatttgccaagatcagcatacgtgggaggcacagccatcttctgctataataaaagaatcaccataataaacacccggaaattacagatttcattttccacca

SEQ ID NO: 40039 - DNA, 915 bp, Bovine  19866881958319
  misc_feature (1)..(1): n is a, c, g, or t
nagctgtcttggtgtaaggatgacgactggtcgaaggaactatgccgcctatgggtgaggtcttttgctgcaccacgaaatacagagagtctcagtttgtatcctccctgaaagcagggctaaagcctttcttccattggctcatgccaccatgaacccgttagcaagagggcacgttctccatgcttggagttcatttcctgagcatggcttgctggttttgtcctctgggtctgattacagggcagctgcaagggcagacttgtcagtggcctctgctggggccaaggggccactcccaaccatttctataggaggctgagtcaggaatgctgtatctttcagagagtgggctcaccccgctaggggtgaaacaggagcttccagcagctggaatttcctctggccttgcccctccccatcccttcatctgatgagcagcatttctaaaaatcacaatttgtaataatcagctctagggacatgctagtcaagtatatcacatcatcaatgacaattgtcatgtcaaggtctttttcttttccctcagtaacaggacgatcagagagtctcccctttgactttcaaagagtacatcactcttaaatttggcttcagaatatcttaacatttccaggaagggatcaccgacttgatggggccacagctgagttcttctggtagctgtttatgggaagcatctgacccagggctgctggaatcaggaagggccataacaatcaccttttatttccctgaggttggagaacatatgcctgtggggtgaaggtttgccctgcttcacttactactcctggcgcaaacctcacattgttttgcatgtctgctcaggaaagcagacagtggggtgaccacttgccaggtctgttgcacagtcacacagcggaaacaaag

SEQ ID NO: 40040 - DNA, 3418 bp, Bovine  19866880392068
  misc_feature (1)..(1): n is a, c, g, or t
natggtatcatcaactcaatggacatgagtttgggtagactccgggagttggtgatggacagggaggcctggcgtgctgtggttcatggggtcgtgaagagtcggacatgactgagcgactgatctgatctgagcaactgaactgaactaatccaatatgactggttttaaaaggaaaagacagacacacagggaagatgtccatgcacgaagaggaaggcagagatggagagatgcagctgcaagcccagggttgccaaggatggacagccactgccagaagctaagaggtaaggaggattccacccagagtctctgaaggaatatcagcaggactagagtctcagagggaccttgcccacacattgctttcaaattttcaacctccagaactgggagagaatacatttctattgttctaagctacccaggttggggtattttagtacagcagccttaagaaatgaatacaacctctcagttcaggtataaggcctgactttcatctctggagagttctcccctctatcccttcacaatgagagccaggctggaccagaatgcactcaagtgataggaactgcctgcaggagagtgagaataaaagcaacaggggcccgggcagatggcatggtctcagtgaatatgttacagagaaggaatattattttgaatcatagcattatctgtacatgtagcacctgtggtctggctccagaactagaatgtgagcactcgggaggacatagttaaccaggagcctaggaacctgccatgtttccccaccagggctcaggccaacagtctgcatctttaaaacctcccaaatggctctatagcttgagttgagacatgggaaaaactgaggttcggagacttgaagtggcccaagtcctcaaatctggctcaagacacagcactgcagaggaatccaaaaggggatgtttccagagaacaagtgtggtccaatatacctggtggtgtatgttgggtccttgtggttgggaaaagttacttttttttcatactttttggccacaccacagtggcaggtggaatcatagttccctgaccaagatcaaacccatgcccccagcagtggaagcagtcttaaccactggaaagaagtcttggaaaaattacctctgtaagactcagtttccttatcttcgaaatgggaatagtgagggaattatgagaattcagtgcagaaatgcagtggaagttcagcatctggccctgggaatagtggccgtacagtggcaggcagcagccctgccacagttacaagggaaggagctgggtggaaggagacctatgctattttgcctcttagtccaacgtgcctctcaggatactgttccatctttcaatagtctgaacagtagttactatgacacccagcacaatcttagagtgagctggagcatgggattttagactgagacaggagggcttgggaactctggacagtatctctgcatttggaatcctgttcatagatattagagctcaggtttttaggtaataggtcgcgctcttgaaaacaaaggtcctttaccagcctcttgagtgccttgcactaaagatgctcagagagtcctcaccataatgggtggctgacctcatccggatcttacacagcaaggaggggctgtcctgtccccggtgtgagcatgcactggcaggcaggctgtgttccagcccaggactgtaagtcaggcttggaggttcaaagatgctggtattcagtatatttccaaaatgatttgttctaagctaatttatcttctgatttctatacaagtcatgagcaagaaacactttcaccttcagaaagatgccttttaacttgaagatcattttcatcattagaaaacagaaaccattaaagatgctctcccctgttagtgctcaggagtgggcattcatatacatacagtttaatcttctgacagatcttggccaaaaatgggagtgaacaaataccagcaccacttctggagtacgtctggagagaaaagcaaaaagagaaagagttatttatttcaaggaatggttctccagtttctaaaggtacttcctctcttcttggctccacaatttgaatttctggactcttctctctccagaatctgggccatattacttaactcaatttgccccttgttcctgtccccacactccaagttcattgcacctgtgtgctggctccttcgcttgaaggtctctcttcccccagccagctagtcccatcttcttgtcttttccagctcttcccaaaagaagagacccatcttggtccattctattcagacaacattcttctcctccctatcttcagtggctttaaaaaaggatttgaaaaataaagactgttttcaaataagataattccatcctgttaagagataaaataaagactaatgggagacatggcttaggaagaaggaaggccccttccctggggggtagaggggtggaaggggtgcagatgaagcccccagagtttcctgaacaaagggatttcagacagcagtttacataagactctagctgggggataaattaaaaacccgggcttttttttttttaattaaacagtgcttttagaagtattgcagttcctgtgatgcttttcacagacaaaaggaaaaacaactgggtagaaaaagtcaggaactggcatttatcaacaaagagagaaagggagacaggtatcccctgcttttccaacgttcacttctcgccaccttgattcgatgaaagacctacgttagtatctattgtcatgaactgaaagaaatccaaagaggagttttcactttcataaaaacagaaaaaaaaaagcgaaaagcaaaaatagtgttcatcatctgttgtccaggagccagagtggagccaatgagtaacctcgagtactgagagaggccccgcccagctccttccccagaaaccacactgaacacttaggtatcagggagaaatagctttgaaccatgtctgtgagcttctgtgcttgatctccacttattgtgtgcatctgttagcaagatgagtgctaaggtagttgctgcttagccttaggaaagacttcataggaatggtctatttttggatagcagggaagcatgtggtaattctcaccaacctagagagtccttcagatggctgtgagtgttactaacagttgtcagtattctgaccctagcaacggcagacaagtaaccttttctggctacaaatgagatatttaaggatctttgtgatctttgtacaactttctagaatgaggaacaatcctgactagtgtcctcaactaaatgcaagaggtggagcagaagaggctgtccttgtcgtcatggagcttactgtctagtggagcataggggtggataatcccagctcttagcatgct

SEQ ID NO: 40041 - DNA, 1151 bp, Bovine  19866880392845
  misc_feature (1)..(1): n is a, c, g, or t
ntcacatctgaatgaagcttaattacccatctattttcttcataaggcacatcttggtctcctgcacttaagcacacaatgcagcgcttcagctctgcactcagggactattttaaacagtggaatcaccaacagaaagcataaacacgaccaaaatgaggcagtaaatacgttgtagaaaggactcttgttttccgtgtgagaactgaaacaagaagtcaaagtcctgcctttttcaatctcagcaatgggaacatgcaggttaggtgatggaaatttctcattgctcgaatgaccgcaaaagtgtcgtgagtgttaattgggaggttacaaatatattttagccagtatgtgaatttacagatccagaatttgtgaataatgcggaatgaccatatcttgaaatatcatttatggccatgcagtactttgaaacacctgtagttattagacccaatgtaaaagaagtacatatgggaagaatgggtacatgcatatgcatggctgagtcccttcactgttcatctgaaactaccacaacattgttaatcggctataccccaataatggacgcccatttttaaatatttcaaaatatttttagtactgtgatactttcatttcgatacgaagggtttctttttgtaatcctttgtgtttgcaattaaaaatgttattctgagaaaggatctccagcttgcccagcctcccaaagggctgcatgacacacacaaagtcatacattctggggtgttctgctttgagaaggaagaactccacggtctaaaatgtctgggagcacagcagaatttatctgcttcctgggaagtcatagggtgaaagttctacagtaaaaagatctgcttagctcatcatttgcccagcagttttgaccgagagccccttctcctcaaaggagagctattaacactgtgggcatcatggtctacagaaacaccttggaagatgctatgaagaggaatcaacctctaacacactcaccagcagtatccagagagaatttcccaggtatatttagactagaacccccactcctcatctcttgagtaaagcgggatgtctttggaattcctctcattgcaacaaaagctttcctggtagaactaaaaatgactaaggcagcatttctc

SEQ ID NO: 40042 - DNA, 1917 bp, Bovine  19866880429568
  misc_feature (1)..(1): n is a, c, g, or t
nccattgggaggagagtatatagggacattcggaggctgccttgaaggcttcaagtcacaacccctgtccctgatgctgctcacatctgtatctacagctcggatcccttcctggagcttgctgcagagacattctataggatctttaaatgcaacttttactaagacctcctcaaaacccaccctatccccctaaagctgttcttgatctcagcaggcaatgtcctgctgctcatctatccaatttcccaactcacaaaagaagcatcatgcttagcatctctttctctttcaccttcacatccaataaacaaccatgttttgttgatttaacggtctgaatcactccaatagaggctttctctctcccactctcactacctctgttcaggctaccacactctcccacacaaaagtgtcctccaaacaggtctccctccctctggaccaaaccattctccacgccaccacctcaggtatctttttagagcacaaagtgaaagaagtgaaagtgttagtcgcttagtcatgtctgattctttgcgtgaccccatggactgtagcctgccaggctcttctgtccatgggattctccaggcaagaatactggagcggactgtcatgcccttctccaggggatcttcccgatccagggactgaacccaggtcttccacattgcaggcagattctttactgtttgagccatgagggaagccctaagtctgggtatttttccttcttgctgaaaaaaccttcaatgtctccacttccatagctgaaaggtcaaatcccatacagaccctatgtgatctgtccctaaatctctctcttcatccttctctctccgctccactctcgtgttctgtgtctcagccacactgaagcacttttacttcctccaatgtgctgtgctttcttttgtattcaggtccttgcctttgcactttctttggctcaaaatactttctgcagccccttccctcttcctgtcacttgacaagtccatagtcttaattctgagttccctcatccaaaagtttttctcgtacccctttgctccatcccatctcccataatgctcccttagcatctgtgcttgtaaattagaggcattgactactttacatttaattatctgtttacttctcattctcccactctatcctataatctccttaaccggcaggggtagttttttgttcatccttgacttctcactgtatttgataccggataggcactcagtacacattcttgggtggcaattcgccatctagactgttcagctcaacatacaggctaagtaggcaggctttaggcatatctctccattgtcatccactttagtcatagctccgcccactgtggcccactccatcacccactcccagcatgtgaacgaatttctcaggaacgactgaagattatagcacacactgattttcagcttttgactctgttcacaacaattagttattggtgaaaccgtctgagtgcaagaaagagccccaatctgacagaacttgaaccctaatgctattttaagaggcagggacacaatactcttttgatagatcagacagatatgtcccaagggatacaacaaagctgtctttgaccctcttctttttagtttgttcctcattactccccatccgaccatctcctctcgtccctgttcttggtagagtcagagggtaaaattctgtgatgtacaaagaacgataagaactactacctcattactgccagaaagcaggtctccacgtgaactattctaaaatcagacatcattgagggggagggggcaaactctaatatttaagcagcttctagtcaataattctctggatcaacatatccaagcgatacacagggaaacttagatattctgaagtgcattacttaaatttttt

SEQ ID NO: 40043 - DNA, 2437 bp, Bovine  19866880482275
  misc_feature (1)..(1): n is a, c, g, or t
ntgatatctccacggaaagagggaacaaaggaaaagagtgagcggtgagggccaaaatcaccaaaatcaaaaaaagctttgaatgtgttgaagactctattacatattactatttcaagaagaaatggtcataggcagttaaacatatgaattcagaaattccagggttggttgttcctgaaaatacagatttaggaaacataagcatatagatagtactgagagaggattatattctcaaagagagattatagatgaaagggattctaggcagtttcctggggcttccctgctggcttaagaatccgcctgcaatgcaagagaccagagggttcgatccctgggctgcgggggaggacatggcaacccactccagtattcttgcctgcagaatccccatggaaagaggagcctagtgggctatagtccatggggtcacaaagagtcagacactttgctgagcgactaagcacagcacatcacacaggcagtttcctggagcactccaacactaaaatgttaggcagaaaatgagtaagaaagatcagtcagtgaggaggaaagaaaactagaagggctgaaggttattcaactgtgttaaatgctactgaaaagtcaaatgaaaaataccagagatgtgaccataaaatttggaaataagattactgataattctacacaagagcagtctcagtaacacagtgaggaagaagacttactagtttgagagtagataattctctgtatacgttaactaatataattcttaaaataaatatatgttacaaattattttaaaattaagcatgtcatttgccagtttccccatatgactgatttcccagaggaagaaaatcatgtcatattcatctctacattcctaacagagtgctgatacacaggagttgtttaaaaaaataaacaaaaatacactttcaggaaaatttctcctgagaaagaaactgtgtctaaacacaaaagacagatttagggaatatactaaaatataacactggctgactaaaacacataaacttttcacatttcataagaatcttgcctttcccaaattctaaaatcaaccacagtctgtaattcagaagatttaaccacccactgattctttttctggacaaatataatgctcacagtgccagtgtgaaatataatctctggataaagaaacattatttatagacccgagtgacgtaactgtgacacttataagcatgcaaatatagataaaagtatattcacccaggcttcacccaaaataccttaaaagtattacttgatttcaatcatcagttatgtaagaagaaacagttatcaaatcatcttttctaaaagcacatgttaaatctttcggtaactatctaaaagatatggcaaatctctatgtcaaattcacatttaagaaaatcaaactacaattccattgcttgctatttcactacctgtgggaaaatcaacttaaatacaatacccagtaactgcagtcattaatttacttaaacttacttctagaaatcaattatattcaaagaaaaagatgcctcaaaaaggtttcaataatagattattggaactcttaagatttgtttatattctctaccatttgttcttatttcaaagtaaagttatcaaaaccttggcatctgaaaacccattataatttttaaattttgaatattaatatttataaattaacatatattttccaaggagaaaaacagcaccttattttgaaaattgctaaatatgcttttggggaacaacaataaaactgagttgtaataggttggaagcaataaaagtgagaatttgagggaaaattaaaacatttttataggatctactataaaccttcaactctctcaatcactcatgtagagccagacatcctggaatgcaaagtcaagtgggccttaggaagcgttactatgaacaaagctagtggaggtgacggaattccagctgagctatttcaaatcctaaaagattgaaattgagagtgaaaaagcactgtttaagtgctgcactcaatatgccagcaaatttggaaaactcagcagtggcctaagagctggaaaaggttacttttcatctcaatcccaaggaagggcaatgccaaagaatattcaaactaccacacaattgctcatctcacatactggcaaagtaatgctcaaaattctccaagccaggcttcaacagtgtgtgaactgtgaacttccagatgttcaagttgaatttagaaaaaggcagagaaaccagagattccaacatctgttggatcacagaaaaagcaacagaattccagaaaaacatctgctttattgattatgccaaagcctttgtgtataagacaacaactgtggaaaattcttaaaagagataggaataccataaccaccttatctgcctgagaaatgtg

SEQ ID NO: 40044 - DNA, 1505 bp, Bovine  19866880518678
  misc_feature (1)..(1): n is a, c, g, or t
nctgaccccccaggaggttctaaccccacccttctatgcagcagccttgactgagggcacctgttaccctcaggtgtgaggcagagagtcggcacagttggatgttctttttccatccttgtctgaacctgaccaacctgtaacttggctgcagcattgccttgtgaagttgggcaagtttctggaagcttcacccctctgatctgaaaccagggagattagaatagtttgtccttgtctgaaaatcactttgagacttgcaggcagcagatggccctccaaataaaatataatctcccctctgccagaccaaacatcctcaaggtcaggttcacaaatcccacaagaagtatgaagcttatgggtcattgagggagggactggcatcaggggcttggactgggaggggggctccaatcccccgtacctcccaccattccctgaacagtgaaagagcccgaagtcttcttattgattaggttgatgaggccatcagtttaatgataataatatgacttgtggaaaagatcctacattttcaaatagaataaaaggagaccagctgaataagagacaagattgctttttctccctccagcataatctcctaggccccctctctgagtcaagagcgtgtctcctgtgaaatttcgccctgaaaatccgcagggtctttaaatttcacagttcctgcctaatgtcctagggaaatggcttcattgagaatcccctggggactcacagggggcaaaggacacttaaaagaggatccctcctttaatagctactggaagtggtcagatgtaagccttgggctggcctttgctgcccttggtctctgttcccatttttgtccccagttgtgctgggtgagtttggcagagtctttaaagtcctggcatgaatcactgggaggcacttggcagatgccaagcgtgattgtgacaccatcagaataatctccactccaggtaccaaatagctgttgctaagaattggaaagaatattattttctttctgagaatttgcaatttggccggcaatgggggaggaatttcattaaggactgtgggtgggtggtgggggattctatttgtggagttaccgtgtttctcctcaccaagcctcattgagcactcatacccacacagtcctgcacagcagctgcggctgctcccatcttacagatgtttctcagatatttatggtttaggtgcagcagagccttgaacctctgagacttggattcacacctgtctctctaacttgaaaaataccattttcttacctccatgctatcttgggggcttccctgatagctcagctggtaaagaatcagcctgcaatgcaggaaaccctggtttggttcctgggtcaggaagatcttctggagaagggataggctacccacaccagtattcttgggcttcccttgtggctcagctggtaaaggatctgcctgcgatgtgggagacctgggtgcgatccctgggttgggaagatc

SEQ ID NO: 40045 - DNA, 1160 bp, Bovine  19866880734946
  misc_feature (1)..(1): n is a, c, g, or t
nctaagcagctgagtcttcacatgacaagtgggcacgtgagtggctgtcctatgggatgtgatgattaaaaagataattctgtgcctagtctggggtctccccccacaatgtgcccctgccagagaagagcccaggcaccccagctgtgtgaacctccctgaaattactggtctgggaaatttgtcagggggactaggaggaggaacatgctgtggtttggggatgtgcttttgtctcagaaacagcccccaggcaggtcacccccagacccagcgtagagtttgctactttccctttatctccccctggccttgcctgctgttcttcagcttgaggctgagcaccccaccagacagacctctctgcacactaacgcctcgtcttctcccgcagggtgccgggtttgcagggttcctgtgggacacggcggccggggtggagctgagagatgccgcctggcaggagagctcgcccggcaacgggcatgggaagccggtgggccccagcccatacctcgcgaggttcaaggtatcgctcctattgctgtgtggggccactccttctgaaaaggagaaaagcccactttgaactgtgagccagagaagcccacctttttgccttggttttattctctcttggggctgggtcagcacacacacttggggttccctcagctggggagcttgtccagagaaggaaggagaggaatttgggggagatcatagctctggtaacttggacctctgggtgagaaggaagtcaaatggctgcttcccaaacctgataagcagcagaatcacctggagagattttcttaaaatcaggatttcctggaccctgccccagacacacaatgtctgttttccagaatcacctcctgcacttcatcagtgctctcagtgctgggtaaggaagctgctcgtttgggaatctctggattagagggcagctgaactgctctgaggacacccttctcttactagggagaaggggagccctccaggggtcactggggcttggaaggggctcagaaggagcttctgggtggtggggccactgacacttccagacaagccctctctctccagagttgggagcagcaagcagactgacctgagctgtctctcgattcccctggatgccatgggaagtattcatg

SEQ ID NO: 40046 - DNA, 864 bp, Bovine  19866880734997
  misc_feature (1)..(1): n is a, c, g, or t
ncccaaaaatatgctcctattgaaatcaatgtagtataccaaaccccaaaacccctgtaaaacaattcattctctttgaacacaacccagagaaggcgtgcaaattactggctggagtatacactgtcctgcaaacacagataaagtaattattgcagactaaggaatttaacttaatctaacctttttaattgcttaattaagacagaataatcattttttaagtccctttgaatatgaaaaacaagcatgagcttatcttaggaatgatctctcattgaaagaagtaacactaaatctaaatgctatgtcactgaaagaataatttatgagccaaatgccttccaaaacacaaaacctttatcctttaaggtcttcaacaaactcaaaagtgacagtattatacaaattaaataaaataaatcattaatcacaataaaatatatcattcctaagatacaaaactagcttaaatatgttcatttatggacacacccacattccattctggtcagttagaatacttatgagtcagtatattttcagttactatgagcaatgggtcaaaaaaaatgaggttttgcaattcaaatatacacaaagtgttctattgttacattagattcaaaaatttcaagattaaaacaaattaaagtagataagcaaaaaagttccctaatctgtaatataaaacttatagataccaaagattttaatgtaaaagaagtgatatatctaaaatacataaagtcaacagctacataaatgtaagttactctttcttataatagtatatcaggaatttaagagttttttttatttataaggtacattccttcaaatatcacacctcctccttcaagg

SEQ ID NO: 40047 - DNA, 1042 bp, Bovine  19866880746934
  misc_feature (1)..(1): n is a, c, g, or t
nccccaatcctgacaaccactaaatctactctgtttctatcagcttgttatttttttttaattctacatataagcaagatcatacagtatttatctttgtctgacttatttcactcagcacaatgacctaaaaaacaaacttcttttaaattttaaacttttaaaaagaatgttttatacttttaaaaaattccccaaatcctctagcaggaagagacataatgagtgttaaatgtaagaattataaatgtctcgagagctcaatatcccaccaagaccattctcagtattactagttcaccaggaaatagtggaagcctcctactagggtaaaacagggcctcacacaagcaagagccttctagaccacaaagcttgctcttaaaccacagccacataccccagcctcacatgagacttggggaggagcttgtgcttggtttccatgataaacaggtctgcacctgtgtgactcttgtgaattttttgacataaatgtgcatgtgtgctcggtcttttttggagaagacattgtgatgtggggcattgatcttcagaatctgcttgaaactagttatttcagttattagagtgaattaaaattactaagccctacataaaatacattttggccagctgagcctaattttagattgttggtattgatacccatcagcacagactgataccacccccgcagactctatagcatctgtttgcctctattaatatggatggaagttttttgtgtgtgacttgagaacagaccctccactgatgttgctggaacagccaagaaccatgaaggtttgaggggtggtacagattgtttcccccacctagatctttgaacttagttataagccccagggtttagaaagatgaaagtcagaaactgggaaaactattcacaagaaacatttatgattctcagtccagagcaccactcattcagatcccaggtcacaaagcagagcacagaactggagggaagaggccattttctctgcttgctcaggaaatatcattctgctctgacaag

SEQ ID NO: 40048 - DNA, 1371 bp, Bovine  19866880751574
  misc_feature (1)..(1): n is a, c, g, or t
ntgcctatacgtacatgtcttctttttttttttttttaaacaggaaataggttagcaaatcttagcttcaaatcccatctctccaattttatgtttttaatgccccaagtgacttgatttggagttatacattgcttttcaaaattgttctctcacataatgtctattgggttggagagaatagataacctttaacactcagattctaggacacttctcatcaaagatgtgtgtttaaatgtccttgaatagcattactgtgccaccttataacaatggctttgtctatttctttctaggtgtttgacttgtttctggcccaaattgcaaatttaagtcagaagcagagggagcagcagctactctagaaaattccatctactttgcaccaatttatgttggcccactggtctcactcttatctctcgagcttgatatggtaactttggtcattgcttttggttcttttggcttttgtgactttttaaaatttatttttggctgtactgggtcttcattgctgagcatgggttttctctagttttggcaggcgggggttacactctagctgctgtgaggggacttctcattgtggtgggttctcttgcagagcacaggctccagggcatgtaggcttcagtggttgtggctcatgggcctagttgccctgtggcatgtgggatcttcctggctcagggattgaacccgtgtcttctgctttgacagacagattcttgtccactgagccattagggaggccctggctttcatgactttttaaggctaacagcagtttcttacttttttttttttaagttgtgattgttgccttgctcttccctccagctggttctgcctcccagctttgaagaacttctttatcatttagccctggcaggcagaacttctctgacttctggcctcactttcagaaggggagttggataaccataaatgctcaggttagatgtgttgggttcaggtgattatttctgttaaggatttggagtcacccgttttcctctctggctgttgcttggagaaaatagtatgcatgaaagataataatggagaaccactttaattaatagctggtcaaacacctaatgcagggcttactatgcatgagctcgacttctattacacagtaaccctggccctacataaatttggttcttagaacatttcagactctgacccacaaaattagtcacaagccacagttagctaagggttggagaaaagcataggaggtggcaagaaggaggagcacctctccccagcagttttcctaatggctctaattcaagcagcagctaaagaaggacacggactcaaacgtcatgttgccctaacagcaaccaaacttga

SEQ ID NO: 40049 - DNA, 831 bp, Bovine  19866880767891
  misc_feature (1)..(1): n is a, c, g, or t
nccactccagtgttcttgcctggagaatcccagggacggtggaacctgatgggctgctgtctatggggtcttgcagagtcggacacgactgaagcgaattagcagcagcagcagcagtagcttaaaaagaatggcaatggcaatgctaaagggagagaaggtgagaaccagaaaagtgcatcataagttgaacttggcacggtgttgacattggggctgatgttgccaagcgagcctaaaatgggaggcagagcagagaaggcccgcctgttgcctgtgtgtgtgtatgagagctgtctcccctacctccagccagaggaacttcctcctccagcccatgggctgcgtgaaggaggctcctcaccccactcacagaagtgcagggcccaagggcattgcctcattccctcctctgcttctggggcattctgagctaagcaaagtctcctaattaggcacccagaaatcaaagtgctaagctctaccaagaagtatgtttcagaaaccctccaatttaatcaacagtaaagaattagctgtactatgagaaagcagaagtctgaaactaactgcacatgttgcttttaagaggaaatgaataaagcaaacaggagctagagttcctaagtgtgatggtgataatcacatcgtctttaaaaattaatgaatattatttcctataataataactctgggcactaccaccaaaggcaacgtagagcctctgatggtaatgttctccattctggtactgtaaatgaagccaccttgttactgttgggagctttgctataataatctccagccaaatgctccataagaaataaaata

SEQ ID NO: 40050 - DNA, 1980 bp, Bovine  19866880792560
  misc_feature (1)..(1): n is a, c, g, or t
nctgagtgctctttagttttgggatctgcagtttgtcaacactgtgtcgtgaggaaaaatgttgaggtatgagtgaaacaagaataaagctttagcagagaacctgacatctggaaaaagcatcttctttctcaccttcattggttctgtccacatttcagtctgctcctgtgtcttgtcttccaaacttcccagggataaacccgcccagtctactgtaattttctctcctgcctttaaaccatgccgttaacttcctaatgggctttcttgtggggcctgagaccttagattaggccaaatgttttaacctttttagaaagtgtcatgaagtaggcaatttgctgctgcagaggagaagtgttggttggaaaagcctttctcagtctccaccaggagcccccctcccctccactgtccaccattagccctgctcatcttcagccattttcagttaaaattgcctttggcaattcctgtggtttgtgcttgctgtgatttccagggggcactggcctgattccacacaacggggcttcctgagagccaggatctgggatgcctgccaagtactcaagagcctggaggcctgaagtgcccgaagcttgactgaacctgccctcaggaaaacgggttctctttggggaacttctccacatgtggaggatccagagccctgcagtttgagggggagcctgtcttcccatctgctgaacaatccagttgctaaaaatagagaccagacatcatcttgcccttcagagatgctctctctggaagcatttggctgttgccgaaaccatcgtcctgttcatcagaaagacacaggctccaccctggttccaggtgccctgtgacttgcagctcctcctgatttctccctgatatacccatgatgacacagaaaaataacaaaactcccaagtcagcaaaaaaccagggactgacaaatgccaggatcttggaagcatcaactgatgatgtcgagaagacagagctgggccatggggctctgtctaggatgtaattgatgacatgaagattcatgggaaggaaccctcaaccccctctccctgagaaaagtcagaaagtactttataccttctcttttgtttagttcctgactcatgtacttgaagtaaattctaactggttgccctccccgccccccacacacacttatttttcctcctctcagctgcaggcctcagatgtggtcttttgtaaattcatctctctctgtctttgttactccctgtatccaagtagagaaagaaaccatgggaagaaaaccagatggggaataggagaaactggcagggtttcagtgtattctagtaagtatgtttccccaaagcaaagtgctgtaaggagggtgccctgggagctgtgcatgcgggaaaatagaaagctttctgtcttgagttaagtctcagggaaggaaatgaactttgttagagcaagggttctgaatcactggaagctatgtctttgccctgtcctctcccacagtgggtacagaaagatccattctttatgcaggtgggcagaaaatggaaccattgccagtctactcataacatctgttgaactttcatcactggtctggacaaacttttccttattcaaggatgaatgaagacaaaaaaagggcttctctggtggctcaggggtgaagaatccacctgccattgccagcaatgcaggagacacaggttcgatttctggttcaggaagatccccaggaggaggaaatgggcaacctccactctagtattcttgcctggaatatcccatggacagagtaacctggcggcctacagtccatgggatcacaaaaagtcagacacaactgaacaactgagcatgcacacaaagacaaaaaagactgtggggaaaagtcctccaggataaggtaaaggcaatagcttctaaagacccagaaccaggtctgtttttggaaaaatcacctacagcagg

SEQ ID NO: 40051 - DNA, 2638 bp, Bovine  19866880824414
  misc_feature (1)..(1): n is a, c, g, or t
ncctaatggaggaaaatatgatggagtaggaacaagaaatctgatgcctggggctttactggaaatcctaccttggctctgggcagttgggcagatgagatcgtctctgggtctgaagggcaggcgggtcccacctggcgctgatgttgtggaaaggaagtcacactgttgagtccccctgtgcacccagtcccgtgggcctgccgcacacattgtctcacacaatcttccctcagtcagtaagagatagtttgtccgtccgtcctttgtagataaagaactcaaggctcagacaggttaaacaacttgtcaagggcagtaacaactattaagaacagatttatctgatgtcacagcccttcctgattccgtggctcccctggcctgaccgtgatattcctttcactttggtccatttctagatcctttgctgccaggtttcaccataagaacaatagagcattggacacggacaagtccaaggcaactggctgacagtcaccaggcccccacaaggcaggtgccacgctgtttcctcccagcttctcctcttccttccctcccacccttctctgttaggtttctcatggaagccagtggagtattactaaccagtcacccactcccaccttttctgtggggacattaatcccccctgctgcccaggttgtccctgaatgatccaccaagtgtgtggaagcagttttatttttttaatttatttttggctgtgctgggtcttcgtaactgcatgggcttttctctagctgtggagagcaggagctattctctagctgcggcgcatgggcttctcattgcggtggtttctcttgttatggagcatggctcagtagttgtggtataagggttaagttgctccacggcgtgtgggatcttcccggaccagggatggaacccgtgtctcctgcattggcaggcagattctttaccactgagatactagggaagccctggaagttgtttttaagtgtgagttatcattaagtgaaaatgctaacagcaaataggtattattttgtgtgtttgtatacatgcctcttcacagaaattgagagaagaacatattactgaagttatttaaacagatgaggtctttcaaaacttgactgtaggtaaagtactgagtcacgccaactaattttaatgtgttgaccatctgactgccaccaggacacagccgcttggttttttcttggtcaagtgttaaatagctgtcaagtcagctattgagtgataataagcatccaattatcactgaaaatggagtctggtcccagtatcctgcctgtgcttggagattcaaggagagctccattgctggtagaactagccccacacgtctaggagggacaaataaaatggttctttactgagtgcctcttatgtgccagtcaccaggcaaagcatgctgcatccataatcttgtcccagctgcttggcaaagtgtgcaccactgttatcctcacattagagaagaggaaagtagtgcctagggttgccagcttatcagtgtagggggtcatgtttagggctcttcacaaacaatcccaatccagttattcagttctttttcccaaaataagggagggttgtacttccctggaaaaccccatggatggaggagcctggttggctgcagtccattgggtcactaagagtcgggcacgactgagcgacttcagtttcacttttcactttcatgcattggggaaggaaatggcaacccactccagtgttcttgcctggagaatcccagggacagaggagcctagtgggctgctgtctatggggtcgcacagagtcggacacgactgaagcgacttagcagcagcagtacttccctaccccctcaagggttggtaacacatgtcccttctgggtagaagtggtttcctcatctgccactgaggagaaatagtatctatcctataacgtgctgggaggatcaaaatgtagtaataaatgcaataatgtatataagaatatatattaatagtatagtgtatggcacattgtaagggtttaaagatgttagctcttactattttcatgatgattacatgatattgctccttgagaatctccagcttcttcctgttatgtattaagtcacagccaactgtctcagccaggcattccgggtgtcacttcctgatgtttctgtcatggctcaggaagctcggaggccaccttggcacctagactgtatgaaggaagttagggaggtgaagacaggactgctttgagtagtccagcctctggagtgctccgttagcatagccccaggtggtgttagtagtaaagaacacgcctgccaatgcaggagacttaagagacgtgggttcaattcctaggtcagaaagatcctctggcaaaggaaatggcaacccactccagtattcttgcctggagaatcccatgtacggtggaacctggagggctgtagtccacggggtcacaaagagtccgacacaactgagcatgcacaagttagcacagtggctgccttagccaatccctgatatggctggaagggccagtccagcaggaagaacacagctactgggggctaggtgaaagcaatcttgggagttagtgtttgacactgtgcctgctg

SEQ ID NO: 40052 - DNA, 1500 bp, Bovine  19866880831965
  misc_feature (1)..(1): n is a, c, g, or t
nttttgccatctagttgctctttttgatcccaatattttaattatgtttttttttccaaaccttcagtgaagtttctagaactatgcagtgaacaccccaacacacctaccgcccacattccacaactgttggcgttttaccatatttcttttctcacatatttgtccttctaaccacctaccaatccatatatgcatatatatattaatattattgatacatttcaaagtaatgctacagtccaattatttgatttctgatatttcacacaaaggctggcctcaaaataattcttcctctcactttcaactgacccactccctgcagaccccaggtcccagtgtgaaaccccagcctctaacaccactgcagacctgatgaatgcctctccttcagggcctttgtctggggctttgtctgaggcttttgttagccctttctaccctggatgaaatcaccattcaccctcaccctctcctcttcaaccatctaatgtttccatcctaagcctgtcaggctaccatgaaatgaatatttctaaagcccaactttacatttgatttcagccaagaagagtggtattttcacacagttctcagtataaatgatccctccagctgttcttaaggaaatgagcctggctctgctcttggcccctccagcccattacccaacccttaggaacaagcagcgtcacttgtgcccagtgagacttagctactgctgctttcaacggtcactgccaccgtctcaagagtttagtttcttgtttcatttttctgggacagaataagagccattaactgaatgtgcaagagaaaaaaatttccactttcagaacacactggaaatctgaaagttatctaacacaatatagggtctgtgattccagcttaatgctccagccaaaattcttcatctggctttcagtgctgaactttcacctcttaccaaaggcttctcttccatttaggccagatgaaattcacctctgcgttttgtcagaggcaacggcctccttccccattaatcagtaaaaagcgaacgtttattccttcttgtaatgcaaaccagccagttagatgctctgggcgcgaagttgtttaaagcagcaattatgagggcatatttcataagagtcttttctttattttttaaaagaaataatttactaagcccatatttattgcagaaaattcagaaaatacaaaggaaagagagagaaaggaaatgctaaccataattctgcaacctaggaattaccattaacattttgatataaatccttttagacataaaaaaaagtgaaaacatagtttataaaattggaatcataatgttatttctattatttttaaactgttaagttataagttattgtcatttttattaattgatatgactacatgttattaagtactgtctgatgtaactgtaataaagatatatatatagatacagatataaatatagatatatgctataataatccttgttgg

SEQ ID NO: 40053 - DNA, 4325 bp, Bovine  19866880853937
  misc_feature (1)..(1): n is a, c, g, or t
ncaaaatgttgtgggggaacgaaggcattcaccattttgaaatcactactgatattagcagtttagcaaaaccactttcttactatggggccatgggcatagataggattggctgtgaatcatgtgtaggtttctttgcaaagctctaagtctgtgctatctcaaccacatgcgtaagtaaatcagaagatgagtgaagaagctgttcttatgggatagctgtgattttgctttattttatttcaaaagtcacgcttctcagtcttagatttttggctagcagcagcatatttcttgtgatgtaattcagagttgatcatgacacacccatttgttgtgaagcagagcaaagaattaatgggatcagatatttttcagagggtctttcagctttacaggttgattctattgagtcgacatgtgtccagaacttgttaagatagggaagcaggctactataatggagtggagatgaggggaaactcaaagaaccttccaaacattttttagtaactcacccactgcagacatcatttccaatcatggcatatatgacaatggctggataatccaacagctggttcctagataaactgagaaaccatagatggaagttgaatatcgaacacttggaaacctagctttggaaccaaccaatatgagaaagaatctttaaatggccatcctctgggtaactttttgctatttttctttcattctagtgtctccattcccacttcccctcttctctataatctttaactcacttctccattaggaaaagaccacataaatacatacctacatttagagtaggttgaagtctccagtagggggacacgctaccatctttcacaatatttgtcatcagtaaatccagatcagtttcctgaggtacttatgtccagatgtgtaggacattatgacagctgtggacatagtcaactttgaaaaatcaaggatttctcaaggttcctattctggacaccccaggccttgctaatgaattttaagtcaaatatgagcaaaaacttgttttctcattcataaagcaggaataagaagcagtctttttttgtctttttcagatacttgggccagacctaagttttactcactttgtatacatttttatgacccttttgaaagtatacatgtaaattaaccatatcctgtggtcactggcccaagaagtgaaaacttcccagtgtttggagagtgactaacaagttatggatgttcagtataagtggctactggataataacagagagtttttttttttttttttttaatttttcagaatagaaacccaacctaaaaacaacttcttatatccctcccttttccacttacctttctataaatctctccaggttttgggaggatgcacctgaatagttaaaattgagaaaataattaaagttaataaatccaagtcagcactattagtatgagaattagactgatggacggaaatcatggaagaaccattattgtatggtcaaaggtcatccaaaccatcatactgatgagaatgacttcatcctacaactttcttaatgggccttctgtttacttggcattatattaacataatcctaacatttttggattcatagatttaaagacatttactgagcgcgaatgggtacactttctaatagatgtgagaaaaaagtataaatctatcagcagagacagaaactatccacagattaaggaatgagttagggaatgagagggacagtaaaaaggattgttcaagaactgcacatctccctggaaatccccatttaatagcctgctggtgttcctgctcactcctgaggctcctcctgactggctggcctgtgcaagagtcagattgtagagctgatttatttaagctcccatagtgacacatatcggagaaggcaatggcaccccactccagtactcttgcctggaaaatcccatggagaagcctggtaggctgcagtccatggagttgcgaagagttggacacgactgagtgacttcactttcacttttcactttcatgcattggagaaggaaatggcaacccattccatgttcttgcctggagaatcccagggacgggggagcctggtgggctgccgtctatggggatcacacagagtcggacacgactgaagtgacttagctgcagcagcagtgacacatatgacttcattcccctattcttgataccatcaataatgaatctcttttatgaaaattgtattcattgaatgtcctttttattgtcaacactctgctaaacacttattaattcatttaggccttagcaccacagtacgaggtagcatcgtgtgtgtgtgtgcgcgcgcacgcacgcgcgtgtgctcacatgggcgtgtgcgcttgtctcttgcatctcttgcactggcaggcaaattctttaccactgtgccagcttggaagccctaggcatagtaggtctccattttatagaggaggaaactgaggctcacttaaagtgactttcccaacgccacataactaatcatttggagagttgcacttcaaagtctgtcccttctgtaagactgagctctggttccctgtgtgacacggcttctctagactgagttcactgtttcaaataagttctgtttctttgtccattggaggatagtctgcagtgattagcgagtaatcctcaggtgcgtggtacaatttaagtggcaagggagattttcctgtaacttctagccttggaagcttggggggaaagccagtgggtttcttgtggaaacaaatgggcaaaagggcagtgcacagctattaggaactaactagcccatgtcccctcaaaattgtgtgaccatgcagggtaggcctccttttccacatacaactagatacaagctatatgtgcagcattgatgttctcttgactgattcaggaattatgcataataaatgaatattgctttatttcccctctcattgtggtaaaatatacaacacataaacataaccattttaatcctttttgagtgtgcaattcagtgacattaaatacatttacattgttatgcaacgaccatcactatccatttctagaattttcccgtcataccaaatagaagcagtctctgataacaccattctatcttctgttggtatatattgaactattctgggtacctcagataggtggaatcataccttactcatctttttgtgttggacttatttcacttagcataatgttcgcaaaggacctccatttgtagcctgtgttagaatttccttacttaaagactgaataattttccatttttgcacataccacattttgtttatccattcatctgtcaatgggcattcgagttgcttctaccatttggttattatgaatacgctgcctatgaacatcggtgtgcaagtacctgtttaggtttatttaggttattgaaatcattggaccatatggcaatgctacatttaatttattttaggaatcgtcatacactctttgtttcctttttgtggtggggctttcctgatagctcagctggtaaagaatctacctgcaatgtgggagacctgggttctatctctgggtttaggaagatcccctggagaagggataagctacccactccagtattctggcctggagaattccgtggactttatagtccatagggttgcaaagagttggacaccactgagcgactctcagttcagggtagtactaaatgtgcacacagacatgcaaattaagagccgtcagttcaccttagcatgtaagcattcattcaccctctccattcatttgttgagaacctgccatatgcctgacacatagtagggaattaacaggtgagttggacacagcctttatacctgaggattaccatctatgggggcagacacacgactgagcactagagtaaggttgagtgcagatccaaaccagaaaactcaatgtgatttgagcctattatctctgctcagagaaggtgccaggttttacaacactgagtcctaaacatagactcgaagtacttctgggcgtgaggttgttcccttttgctctcaagagggaagataagaaggacagccactgggagcctacagtggctgactcatcttatcagctgggcccttcattcagtgccagctccaggactctcaacttcccattttcagtaagataataaatcaagaggtgtttaattctcactctttgatttttttcttaatgagaaatgaaaactcaagccatgagtgggaaaaaaaaaataaagggacaggtcagggatgtcaatatttccctcatatccaga

SEQ ID NO: 40054 - DNA, 817 bp, Bovine  19866880882930
  misc_feature (1)..(1): n is a, c, g, or t
nactggtaaccactgatttgtcatgtgaaaaatttgatgggaccatgagtacaactatcactacaattcagcgatccttaaaataaaattttgtgcttgattttttacaatatcacccctatgtctgaaagaaccaaaagattcttttatagttatcatagaggctttctggtcttagactgtgacttgccctgagagttgaaagacatgagcttgtcattttctttctgtaagtgctaaaggacactcagaagactatcccatatcattgtccttacagacatattaactgccattaacagtcaagtgtagcaactatttgggcaatcatttgcttcaagattaaccacagttgaaagtctggttatttgtaatgccctcatcttacttctcaacagggaggagcccagccaaaggacctgaccaaagcaaccctcaaattctttgtgtgtttatctcctgggatcactactgatatcaattctgtatcagttagggtccattcaagggacagaaatcaaacaatattttgaacacagaaggttaaatataaagaatcaccacttataacagggaattgaactgataaggagatggccagtaaggaattaagagaattctaaagattacaggaaaatcagatatagtgatcatctactgcccttagggctgagatagactctcctgaagaagagcagtaactgtggctcatttcacagagaagtctgctgaggatgcaaagctgcctaaggggtctgacaggaaagctgttcaaggacagctttgtactggtggtgctccatgtgaagccatttga

SEQ ID NO: 40055 - DNA, 2107 bp, Bovine  19866880913633
  misc_feature (1)..(1): n is a, c, g, or t
nctttcctggtggctcggacagtaaagaatctgcatgcaatgcaggagacctgggtttgatccctgggtggggaagatcccctggagaagggaatggaaagccatgccagtattcttgcctgggaaatcccatgggcagaggagcctggtgggctacagtccatggggttgcaaagagtcgatatgactgagtgactaacactttgactttcaagcatgacaatatctcagtttattagagtgaatttacagagttgattatagaaattttggaaggagatcatcactggaggaagtaacgctgacttaatcaaataacctctttcagtctaaggattgaatttgtagcagctgaaagtggtacacaaatacatttgtagctttgagtttcaccagaggatggcgcccatacttctctgataggttttgccaagttggtttggcatcctttcaagccgtatccgagagacgttttagagactggttacctaaactgttaaccaaattaaggcctttattattaattcagttaaaatgagtgtaagtgtataacatcttcagaacaatttatgccaaagaattaagcaggctgaaatgaatggaaagctacttatttcctgtaactgtactcacactttaaatttatacaacttttaaaaaccaatttctacaagtcagatctttcaacattttcattttcttgccatctgctgctttgtaaaccagccatttaatatgaaaacttgctcagaagctgtacttttaatgcacttactagctcatcaggtgatatctctaattgagctgtttgctcctcaattgggaggcaagtgcaagttgctggtctgttttctcggctttcctggtggacttgagccaaaggtatggtcatcttctcgtttcctcttccttgatcccctcatttgttcagtggtgtcttctgatcagcagtgaccataatttttcctccttaaactctgtaccctggatactcaagggctgtctggaggtagcagaagcctgtgctcagaaactgtgcttctctcttgaacatgaccccaaccttacttatatcatacatagatgtgcttagttctcagtcgtgtctgactctttgcaactccatggactgtaacccaccaggcttctctgtccatggggattctcaaggcaagaatactggagtggattgctatgccctcctccaggggatcttcccaacctagggatcatacctgggtctcccgcattgcaggcagattctttaccatctgagtgcaacagggaaacacttatgtaatagaatccactcacaccacaatcagctcacataaagtctttcaacataagttaaatccatacatggaaggttttgctgtgccatgaagtaggaatatgctatgctaagtctcttcagtcgtgtccgattctgtgtgaccccatagatggcagcccacccagactccctcgtccctgggattctccaggcaagaacactggagtgggttgccatttccttctccaataaaatagataacattcaaggacctagaatatagcacaggaaactatacttaatattttgtaataaaagacagaggcttccccggtggctcagacagtaaagaatctgtctgcaatgtgggagacccaggttcaagcctgagtcaggaagaacccctgaagaaaggaatggcaacctactctggagtatttttgcctggagaattccatggacagagaaagcttggtaggctaaataaaggaaaagaatctgaaaaagaatatctatatattatatatataatatatgtgtgtatgtatatttatatatattgctccacattgcccttctctttgcaacaccctagactgtagcctgccaggttcctccgtccatgagattctccagacgagagtgctggcgtgggtgtctgtgccctcctcaggctcgaaccggcatctcctgtgtctcctacattgacaggcaggttctttaccagtagcgccactgcaccaaaatactgccaggcatgtatgtggtaggtacttaattttgctcaggaaggattcgtgaatgtagacttataaacatttaagatcagcc

SEQ ID NO: 40056 - DNA, 1056 bp, Bovine  19866880955221
  misc_feature (1)..(1): n is a, c, g, or t
ntaaacagaattagtacttatggaccctcagggagactgctctggcggccatttttcttataaaatgccagcctccagctatattctaaatggtgtttatgcagcctcccatcctcaagagcaataatcataaagacttcaaagctgtgggtgaaagtattatagattcatgacttattttattttgatttgcattatgccaaattctagtctctaaagcctgcatatttcctattttatttcagggcaaaccacatagatttgattcatcttttctgtgtgggcagccagggatagaaagacctacaatttttcaatcccagacactttatggcagcaagaactataggcggaagttcgcgaaacagcgtttcatcttggagaatgttctgagactccttgattctcaattttctgtgctaacagggggaatggagagacagacccccaaactatctttcagttaacctcctttctcatcacgtctttggccaaaggaaattaaaattagccaaactgtctgatgttactttcacaagcttttcagttcagttgctcagtcatgtccgactctttgcgatcccatgaaatgcagcacgccaggcctccctgtccatcaccaactcccggagtttacccagactcacgtccatcgagtcggtgatgccatccagcccatctcatcctctgtcgcccccttctcctcctgcccccaatccctcccagcatcagagtcttttccaatgagtcaactcttcgcatgaggtggccaaagtactggagtttcagctttagcatcagtccttccaatgaacacccaggactgatctccttcagaagggactggttggatctccttgcagtccaggctccctttaaattactggaagtgggtggagtgaaagctaacaggacacaggggagtgtcacagagatcaagctgcgccctggtgggggccacgtggacaccaggaccgtgccctgaaggcacaacgatggatgcctttactggcacgcttgccgcatgccaagcaccactgcggctcttcacataca

SEQ ID NO: 40057 - DNA, 1968 bp, Bovine  19866880961401
  misc_feature (1)..(1): n is a, c, g, or t
ncaggctcctaactcacgtaagacgacacggttgagtagggggctgctgccttcgcattgtctccattctgtttctgctccacctccaatctttggagcactatgacccgggaaccagactcaggtgtttgtctattgattaagacgagattcaccctaacctgggcaaagcaaccaagccctgagactgacccagcattaacctgcttcactgctggttcctgtcttgtgggaacgaagatccaaagatcttagaccagacccagacaccctaacctttaataggcagaaataccagagagaagggaaaccaacccattacatctctcctatttatcttctaactacagttaatatgcccttatcccatccacagacctacctactcacctaagaacttcctctccatcaacctgatccaattagacacagaaccagaatagccaggacatagaggggaaggaaaagggactaggagatgatccagaaggaggatatgccttgtagtctcatcctaacttttgctgggacctcggcagtagcatagcaagaagaggggagtaagctgggacgcagaaagactatggatcggcttagcccccacaggggagacagcagatgacttctccagcatccaggagcaggataaactccagtccctgtggatatcagtgaagtccagtctttcagaggaggaagaagatggtgtagaaatgtttcttgtgatcaggcatgaggtgccacttccagcaggttgaagagacttcagccaacgggcaggggaaagacagagagaggccactgggtgagagtcagggccaagcaggctgtcagggccccagccaagctctctaaggtttgttacatggccccagtaccaacaaagaaacaagatggcagaggaaaggctggcactcaggggctgggtcagcaagagccaaggcctcccggcagtggagagttaagggtggcgatgcaggttggaggtgtcagtcattgcagctgggctaggctgagacaggcagggacacacgcagaaaagaggcaaattgcaaaagtacatgcacacacacacgcacgcacacacacagacacacacacacacacagggaaagcagactcagtgacggagagcgggatcttggagaaagatgggagctgagagctccatgtggagtccataaaataaaagtgaagacaagagccagtggcttgggattcatctaaaatgtgaaaacgcagacaccttcggagcacagagaaggccccgcatgtcactgtgactttaatggcgataataagcctgcagttttccagtcctgggattcactcacccacacagagacataatatatttttcccctacgacaagaaaattgaatctatctttcagtctaactgatctgaggtataagtgaaaaataagactgtgttctatcaccttcaatctttctcttcgctccgagataggccctattattttcctttattttttcgggcgtgagagaagtgttaatggataagacatcagtcattcacccctgaaatgccggagagcctggattttgtgtcccagctgcagcatgaaagttgaattgcctctggggtgaagtaggggagggagcgggtggggagcaggggatatggtggaagggccaggggtgggaggtgtgaagagaaaataaattatgcccccagattctggatctagaggtgatatttggaaagactctgcatgagcttgcatttggtgcttatcactttattcttatgtacttctttaacttgctccaaaagcaccaaaaatagagcctatctatgaatgagggctcatgtaagagaacttgtgggccgtgaaggggtataacattagctgctcccattcgatggctgcccaagcacttgcggaaaccttcagttcaccaaactataaaatagagcagatcagaccttcagacactcgattgt

SEQ ID NO: 40058 - DNA, 1487 bp, Bovine  19866880981033
  misc_feature (1)..(1): n is a, c, g, or t
nacatagttggcagtaagacagcattatattggattgctatataaaattttatttattgctatgagtcatggtcagaaatgcttgaaaattgatattctagatcatttttgtggcttgaaagaagggaagacagcctgctctaggattttttttccagcaatggaaaggctctgcttaccgtcgggtatatcctaagcacttttccctcctgcctcattagtgtcttaactcttttttgcttttcaacagtaagaaaatatgcccaactcattgcatgtagccattatcttatacaaacactcacatagccatgatgacaggagttatatgcaatttcctattttatttggcccaccctcaaatgcttctgttatcaggaaatgctaaccatgagttggtactgagagaactttcaattcactgttgtagagaattctgagatgttttgtgaatgattcattcattcatttcttgagagcatgactttgattcagtaatgtgtaagccagttgggaattttaaatgaaacagaagggcaggcaagtgaaactctttggctcagttgctaaaaagacttatgctgaatgttctcagtaggtaaaatcatcctgattgagttggtcattaaggccagctttgccagaattaattcagtggagagatctatcaaattgttaactacccacttagaatgagtgcttcctacagttgataaaatattttttgtgaacctttgggagacattgaaatggtgaatttggaccttaaccagactccaaacttctgggaaagcatccagcccacctttagagatgttgatctatctttgtagaaattcagaacaacatacagatatcccttatgagaataatccaagaccccttactagattctagactcatttcctcaccacactcagtgttgccaccccatttcttctcttgccctgggtctgtccccactaaccttaatgtaggcttattttcatatgcagaattaattagtttggaagaagacagccagaggaaacaaagcagcaccccatgtatgagttactctaaaagtacaagtggtcagtcaccagatttcagtggtctgtagaaacactatggggtcacagagcatcttcctgacacgtccagctccagggatccagagggaccagaagtactcaggactaaaacaaaatcccccaccatttataagctgaagggctgaacctggaagggaaggtaacaatttctggggttttgcctgaattcccaaatttgcaccagctctgaggttgagtggggctggaggtgctagagccttccctcctgctttttttattatgaaatcatgagacaggagttttacattactgctcatcttctctatcagatgtactttgtctcactccctctctccatctggctgaaacctctagttagaaaataaattgctgtgtattgattgttcattttcttcctaatcacccagacat

SEQ ID NO: 40059 - DNA, 2127 bp, Bovine  19866880984313
  misc_feature (1)..(1): n is a, c, g, or t
ntggtttggctgtactcctgattctggttttcttctcctgtttactttcccagagtcctccaacatctttcccatagattctgtctaggttttatggctgcatttcttgggacagacagggtagagtgtgcttactccattatacctggaaccagaaaacctgaatgcgttataaagagtataaatagttcatgaaaaatgtggtgtcatacagtgacctaaaataaatttaataatgtcatttaactttaattaaattttaaataatgcaggttttgcttataaatttaggaagcattttgaagagcacaattcgtataatttagtttaaaaaagtcagccatgagaaatttaaattctttcttttctctaaaagtgttgcttgtaataagcagaaatattcaagctaatacattgacctccaactcaaaatagtaggtacttaataattgtttgttgtgacagtttctgatggtgtttctactactgaaaatgctttcaaattcacaagtgtggttctgaatttctgtgacaaactagataaatgattccccaaaacacgtatttttagaagaatataataacctccccagagtggctctaatctacctgctagtctcaaaacttgacatagcttcacaagtatccttcagctatgctaaacttctctctcctttttccccaaagatactttgcccttggagcatgtatgcactgagtcaccatctccccatggtttttggatttctattttttttctgcagggctctctgctcaaatgtatcttctctgaagatttcctctcctccaggcagagctaagtggctcccaccttcagaagacctcaacctccctctcttttagtgtcattttctaagaaccataattgtttccatcttgtctctcttttctggttacttatggtctccttaaagatgggcactttgtcttgttcacctttctgtttctagcacctattgcaacattggagaggaaacagagagagtggtggggcaaaatccaatggagcgtgagaggaagggaagtaaaagagaagagaagaccagtggtaaaaggcacagcccaagatactttgaaactgacaaaaaaatccagcaagttcatttcagctatcaacacaagtagcagtgaactttccctatgatggcctttatcttgagccctaaaccaaagggattgattgaaaagagactccttgccatggacagttacatataaaagtgtaagatatgcttctgaatctgtcctctgcagatgtgctgattcaagaagtacagcatgaaaatcctgacctaacagaagaatctcaagcatacgctcatcactcttccgtattataattgttatcagttacgctgccctgctatgatgtgttgcatgggacaagcagaagccagaaagggctgtgtagataaatcctaagaaatagtcccaatggaatcacaatatctccattctttaatgattctttgaaattccagaaagtattaaaaattggaatgatgtcctctaataaaaggagggaaatgtatccctctatatgacatatgtaacactaaaatagaaacttttgaaatcactctttcaaaaatttctattatagttaagtgctgtatcttggaagcatttttggtctttgagagaaataacaagttttgatgcctgcagtcctcctatagtatatctgtgtgcatttgccttttagatcaagcatctcaaaaattggtattaaaatctttgtttgttgttgtgatcacactagatcatagctcccaaacagaaatatcctagttgttttgttataaataatttctgttatttcctctcaacatcttgggttgagaccaaatattccacccagtggatgggttcatcaaatatttactgagggcctatttctgtttggcaaaggtgacttctttgcttcttccaatactctgtggctttaaaatattgtcttaaaaatttcactttgaaaaaaaaaatttcactttgaaatgatttctaaaaagttgaaataatttccataagttagaatactaaacaagaagttgcaaaaatagaacaaaggatttgcacataccctttcatccagattccctaaat

SEQ ID NO: 40060 - DNA, 2363 bp, Bovine  19866880995614
  misc_feature (1)..(1): n is a, c, g, or t
ncagcagcagcatcaagtactttacagatgaggaaactgaggcttagaaagattaagcaatttgcccaaggtcagagagctaaaatttaaaagcaaaaatgttaacacccagttatttggccctcagccaatgttttcagttattctataaaactaaatatcaaatcagaaatttacctgtggtggattcattttgatatttggcaaaactaatacatttatgtaaagtttaaaaataaaataaaattagaaaaagaaaaagaaaaaaaaaagaaagaaatactagagaaaaaaaaaaaagactgtaagctcccaaactttagagtataaatgggatcataacttggaagaaggaaagacataagggaaaagagaaaaaggataattaggatgcaaaaaaaaaaaaaaaaacatggctcatgaattaccttgaaagcataattttaaaacacaattatcttaattcattcccatcctgagaaaaggtacagaataaagccaaacttcctccctggccggctgacaactttattaagccaaatgacttctagcagtccccattcaaagaagcagaatccctttatgggaggccaggctggtgcaacatttgccagagaaaagtgcaaggcattaattacatcctgggttatattgcagatgatgtcaaagctgagtggctgtgtggaccaagaccacaagggaaatgtctaatcactggaaaatctgacatttgcaacattgactgtttgcttcccagccaaacaaggctgctccttgaagatgccagagaggcgctttacctctctccatcatggtgttaatagttcactgggccatcatattctctgtcacagaccccaaagaaaataaagattagcacaaaatatgggtggaaaactcaaaattggcaaggaagctaaagcattttagaatattcaaaatttttagtaactgtgggagacaatgcaacatattgccttttggaagtaaagccaaaatttgaacgttgactctgctgtgtgacctggggaaagttatttaaccactctgaccccccgattcctgggtctcagattcttgtatttaatattgcattaaattaaattacattctcagccaatggcaccccactccagtactcttgcctggaaaatcccatggacagaggagtctgctaggctgcaatctatggggtcactaagagtcgggcacgactgagcgacttcactttcacttttcactttcatgcattggagaaggaaatggcaacccactccagcgttcttgcctggagaatcccagggacaggggagcctggtgggctgccgtctatggggtcacacagagtcggacatgactgaagtgacttagcagtagcagggatgaggactctgtgcctcgatttttcttaactgaactctaaaatacagcgctgcccaataaagcatctcagaagccaagaacatacagtctgtagtgctctctctgctctaatggcagccaagacactctctgctgattgaatgtaaaacagagaaagcaaaggagaggtgtctccgattgcaaggaatcccaggacaaatccgagcaggaacccttggggtctggggtttgtgattctttctgactctgcaaggggtctgccagggctgtggtcatgtcctttgctgctgctgccgctaagtcacttcagttgtgtccgactctgtgcgaccccatagacggaagcccaacaggctcccccgtccctgggattctccaggtaagacactggagtgggttgccatttccttctccaatgcgtgaaagtgaaaactgaaagcaaagtcactcagtcgtgtgcgactcttagcgaccccatggactgcagcctaccaggctcctccacccatgggattttccaggcaagcgtattggagtgggatgccactgccttctccaaatgtcctttgagaagtctcgaaatacagcaaatgctgtccacctacctgccatctgcatgagaaccagatctctctgattaccatcctatcaaggtgcttcttaaggatgactttttttttttaacacttgcttttattcatcacccactggcctcgttttctaggcaaaggcagcctgggcaggatggcagatagcccagcgccacagccagcctcactgtcctggcttgcaggcccttgctgctcctcacctccctactgccccggggcagctatctctccgccaaggcaaagaaagagggatgaacaaccccgcctcaagggccaacctttagagcaggtccttcatagatggagctcattctttataaaataaacaagcatacttctgacattacccagccagggttctgatgttca

SEQ ID NO: 40061 - DNA, 989 bp, Bovine  19866881007237
  misc_feature (1)..(1): n is a, c, g, or t
ntcaaacatctgttgtttctggatggctttaaaattccattgcaagttcaaaaatgcttaaattgcaaagcatgtccttatgagaagtatctacttggtggatgtttgtccttctctctcacgaatcttccaggaacacttcatttaggcctataatatctggtctgtttctctatgcttagcagtaacatgaagtgtttctttttctcagatcccagtttcaaagattcagctttgggcatggaatgcctttccctactaagtttattctttatgtgtttggaatgcactggaatctatgtaaatacttttcaaaatcagaacttgctattttctttcactcttgtacttgccattgcctgactacttcataccaatttctatagaactttgcaagttctagcaagatttttttggagaaagataattgcaatcagataaagagcaaatgtagtacaaacttctttttcagagaaatggttgcattatggctttcttttttttttaaaatcattccttgaaacatcccatctaagagataggattgcaagtggaaaatgaattagaagaataaatgttctactgaaaaaattgagtttttgatgaacatgtattgaagagggtcaagttcttacaactctctcaccaagctactgaactccctaactctgcgttcttccaaaatgtttgagaatattttaaagttaggatggatagacatttacaaaaagtaggatggtttttttttgggggggggaggttaaactactccattgccaatttgactgggatttaagatcattcgaaaactgttagagtttaggcaacccttaaataatgagtcttggcattcatttcctacattcagtcctggatctaaagaaaacaatttgagacatattttctttcgtatacaaattttgtgttttctctttcaactcgataatggtcataaattaatacagagtgtattatcctaagaactacag

SEQ ID NO: 40062 - DNA, 1548 bp, Bovine  19866881111227
  misc_feature (1)..(1): n is a, c, g, or t
nattttgcaaccaccaagtccaacatttccctaactgtgtccaggaactccgctgtcaagtgggaggttaaaagatacaggaggaggggtgctatacccaggtttagaaagtactgggtcaaataagcctaaacagtttgctttacttccgaatttctcagcgtctttaatgttttattgcacactgggagcccccaagaccaagagagtgaacacactgtttccaatacattctgaccatcaggctcttcctagaatcctgttaataccattactatctagtggaatgccagtgttctccagaccagagtttgacaagcaaaacaaaacaaaaaacataactatatatgtgtattaacttttccttagggttatccagactctgcttgaaccttccaaggaccagttactctactaatgcacagacctagcattcagtgttagaaagtgccctcagctatggtaaccctgtccaactcacaagctcaacctcactgatgggtttctcagtctcattgtatcaacatttgggatgatgtcttatcgtccaggctgctttgaaaaatgtaggatggttagcggcatctctggcctctccccactaaatgcctgtagctccccctccccacactgtaacaaccaaagatgtctccggacattgccgaagtcccctggggatgggtgcagggcaggggcgggttgggggctgccttaaaaccagccctgttgagaatcactgctgtagaaacatcactccttaggcactggagaagtcaggatacttagagctctagtttagagaccgctgagcccactctgaccctgtgtcccagcattgactggaccctcagtgctccctccagtgacacttccagcactcagagccctgccctgcatccttctgaacaagatggtccagtttttggatctctccttattcctgcccccaggtccttaaagcctaactcacttacgtagaatgttgctaccttggattaagggctcaagagactttaaaggattttatctactgatttgcctttgtgctttaaaagccatctggggaggattttgtacttgtgtctcataaatttaaaagcaaactgctaatctcatcacttctctcttaaagggtgttgatccaaaagatggaatcccatacgagaagaaattctgtgaaggtatgaatggtaaaagtcagtgtacttatcctaatagaatattcttttctagtctgagtcaaattgagtcgaagagacaaatgaggaaatgcctgatgctacagcataatgagtttaactgattcctttattgggtgactggaaagttattagagggatagttagggagttttggatggacattactacttttaaaatggataaccaacaaggacctactgtatagcacagggaactctgctgaatattatgtaacaacctaattgggaaacgaatttgaaaaacaatagatacttgtatatgctcaactgaatcacttttgttgtacaactgaagctaacacattattaatcaactatacaccaat

SEQ ID NO: 40063 - DNA, 1216 bp, Bovine  19866881199594
  misc_feature (1)..(1): n is a, c, g, or t
nctcagctggtaaagaatccacctgcaatggaggagaccctggttcgattctgggttgggaagttcccctggagaagggatcgggctacccactccagtattcttgggctttcctggtggctcagatggtaaagaatctgcctgcaatgcggagacctgggttcaatccctggagaagggcatggttacccactctagtattcttgcctggaaaatccccatggacagaagagcctggcgggctacactgagtgatttaagtacagcacagggtagaatggtgaggttttattgctaccatagtaggtgatttcaggatgtttataatgaaatgaaacgagcccctaaatagcagaaattcctcccagcccgcgaaacatccaccactagggggttagcatgctgtgtccatatgagagtgtgttagatggtgcgtgaagagagtttggaagagtgtgtaatactgtggcaccattagaacaaaaccgtgtgtgtctttatgaataatcagctatgaaagtgaaagtgaagtcgctcaatcgtgtctgactctttgtagcccaacaggctcctccatccatgggattctccaggcaagaataccggagtggggtgccatttccttctccaggggatcttccccacccagggatcaaactcagatctcccgcattgcaggcagatgcttaaatgcataggaaacatcctagaagggaatccaccaaaagtgttagcagtggttgtctttgcacagtgatattctgcttaaatttttctttgtttctctaatttacaaattgtcctataatgagcttgtgtttgctgataccagagcataagcctccatttaaggagaaggaagggaaaaagccacagaattactagtacaatcttaactcccatctcagattaagagtcttagcatccaaagagctttagagaagaaaagaacctttggaagcgtccctgaagggtggaaacaaggggtgatgaggtgatgacaagcacggaggcagcaacataggagtataaaatccccataggagggccccaggccccaggccctgtgcctctcactccccatcctaacctgcctctccaggaatcttcagctttctcttagtctccattttataatttcctttgccaaaaaaaaaaaaaaaatctaactgccttgcaaagtaccctccctccccctgtgcttatttttaaccat

SEQ ID NO: 40064 - DNA, 1173 bp, Bovine  19866881272411
  misc_feature (1)..(1): n is a, c, g, or t
ntaaaactataatctctgctcccacccgattaggaaaatctgagaacagaatttagtcatttgcggaggggcaccaggttgggggagatgggtcatatgggaaatgaactgaaaatgtcatgctggtccaacagggatgcaaggacaaaaatccaggtgggctgtgactctaaaacctgtgttctacacttctctggtacccaaaccagaaatgaaagagtcatccttgattctgccttcctcacatttctcatcagttccttaataaatccccttgggtcaacttccacagtagatcccagatttgtctactttcttccactcccactgtctctcgttatgctatccaataaaccatcatctctccccaggcccaaaacagcctccttcttcatccctctgcccccatatttaccatctaagatccttcctcctcaggacagccagcatgatattttcaagacacagatcgaatggaaacagtcttctcctcaaaaacctattcacagcttcccattcctctcaagttgaatccttacctctttggccatctacaaaactctgagagggcagaaaccatatcagcttgttctcagcgtgtactcacagctcagcatggtgcctggcatccagaagggacccagactacattctgggttccagtctcagttcctttgctcactagctacatacttggaaaggacctaacttctctgagcctctgacttctggtctgtacaagagcaataattcctacagtgatgagtaaagttgttgtgaagtttaaatgagatgaaaatgtatgcaaaactctttgaaaacggcaaagaagattctagccatgtaatgaattatttatgccccaacccagggtcaaaaaggaagtgtagtcacgccgactctggttctgataactgccaggtgctttcaaggcttctcgatgaagtgcaggcttcagacaaatgggaaatctaatagacctctctctgcagttggccgcatctccagccagcacagatataattataattagagttttaagagttctgtttcatttcaaaaagattccatggtacagtctgcagtctacctgagatgtgtgtctagaagcagattcctgtagcaggtgtttttattctagcctatttgcttcttttcttacaatgtcaaggg

SEQ ID NO: 40065 - DNA, 1486 bp, Bovine  19866881483903
  misc_feature (1)..(1): n is a, c, g, or t
ncaactattttattcagctgaatcaacagagcttaaactcacctaaagtttttagcagaattgagcaaaggtaaataaaattaagtataacactggctctaggggaaaaaatatgtacttatcagaaaatatccttgcatgtacgtgtggatacacacacatcaaggagcaacagataaaagatcaggcaagcacacagggagaaaacacgccctggaaattaagaagctaatgaatttataataataatcaatgagaatacagaaaaaaagaaagacaacttactagtaacatcagaagtgacctcaaattaatttattttgtccaaagtcactctaaattcaaataagaatacagacatccaaatagtgttgaattacctaccctattcaaacttataacaaacaaactgatggctaataaacctaaaactagctccctgcctgtactggtggtttaatgttacactcactaccagggtccccagcagcagtaaagggacctgaaacaaaatgtgctacacggctaccaaagcagacagaattgccgtggaaataaacaagaccacgtatcttttataactgggttatgtatctagttagaaaaaaaaaacctaagaataaatgatgaggtgtcagattatgtgccaacctaatgttggccaaaaagttcatttaggttttttggtaagctttctgaacacactttttggccaacctgatacatgcctagaagaaaaaacaaagactagtagctagctctaagagcaatggcttttagtcagaggttgtatattaaaatagcccaagtgagcttcttcacgataacaaatacaaagctgtatcttaacctacaaaaccaactagtagagctgtggtccaataactcattttgaaaaagttctctacatgagtcggagtaaacacctctggttaaacactacctgtccctgcccccctgcttttttttaaagaataaataaagaaaaagtaaattgacaaccattgcaagtgaccaatttggaagtagagatcactgcttattcaccttttttatttcttcatttttagtacaattccaaattaagataaaagagaaatattactaatactatatgattagtatctgaacttagaaacagcaaattacaaaataaaaatggagctaataaatgtaaaataaaaaatttcctggtagaaatatcagatacagtaaaaatgatgtagtaaaacattctaaaaatttatacagatttaacacaatttcaaagcaaattttcacaggtttttgtttttccaatagttttcaagttattctaaaattcatactgaaaaagatgaagaaccaaagtactttgctacaaaaaactagaaggacagtaagagataataaactctaaaatctattttaaaacattatacaacttagcttcaatttaaaagacatatagtgctagatgctcagttgtgtccaagtctttgcaacc

SEQ ID NO: 40066 - DNA, 1820 bp, Bovine  19866880473572
  misc_feature (1)..(1): n is a, c, g, or t
nacacgttaggagacccaggatgcacctcagggagaggtaagaagtctggtttcgccgttgatattgtcaaattactgatggctttgcttaaaccaggtccaaaggctacaaccacagaccttgcctgcatgcctgtagcctcagctattctgagtcgtgggacttggaaagcatgggcagctctttcagttttcatagttccagttctgagaggcacattatttaagagcctgtttgctttttgcttttcagctaccatgctgggtttgtgggagagcttcagccatcagcttgctttatagggaaggcaggggcagaaatgagactgaggaaccctgcctgcttaggattttccttaacactctaaaagtgttttcttcctgcaaaaatttcagtaacaatctgtaatcaattagctaactagctcccccttttgaaacttttctttctgataaaaactgcataatgctgcaaagagatgtctaacatgcttagaatcaattgtatcgaaaaaaaaaaaaaaaagatgaatgtgttaaaatctgtccacacataatatctgcaatcatgccattattttaattaggttttcagctcttagctttagatcttctttattgaaggtactttgacacagcctaaaaggaaaggaatcaaagacaccttcctgtagagttaactgaaagccaccactggcttaaagagtttggtaggaaaaatggtgaaacaagccaaaaaataagaatttgtattacatgtcagaaatgtagactctcaacaaatatcataccacctgcattatttattttgtattgttgttttatttttgttttgattcagatattttctcctttcatcttacactggaaacaagaagagttatctttacaactcaagcaaataatctgttacgtggtatattatataaatttcaaaaacaagcaatgtagccattatgtggtatacatacttcagatgataagagtaatagcagagagagaaactgaacaataatgcatgttgaaatattaggacaaggcttatatatattttttgtaaatttacaatattaggacaaggcttatatatattttttgtaaatttactgttttcttcacattttttattgaagtataggttcctttacaatgggtatctgctgtgcaacaaaatgaatcagttatacgtatgcatgtatcttttcttttctagatttccttccatttagatcaccacagagcactgagtagagtttcctactgctacacactaggttctcattagttacctcttttgtacatagtgatatacatacatcaaccccaatctcccagttcaccccactccctcccttccttggtatccataagttcattctctacatctgtatctctatttctgccttgcaaataggttcatctgcaccatttttctagagccaatgtataagaaatatgatattcatttttctctctaaaggtgtaaatctctttaacccaggtatcctcaagcttggccatgtatttgaatcctgtgaagaactaacttgttactgatgtctgggtcacgtccctcagaggatctgatttcctggttcggggtgtgacctggttgttgggagtttaaaaagttctctgattctcaaagaggcagccaccagccattactgagaagctgtttcaagtggattagtacccaaacacacattctccgacaactttattgaagaataattgacagtgtgactgtatacatgaacttctgacaataaaggcaaacacccaggttcctgttgttcatcctcgtcccacttttacgc

SEQ ID NO: 40067 - DNA, 1219 bp, Bovine  19866880500377
  misc_feature (1)..(1): n is a, c, g, or t
ncaactgccaaattgtttcagcctgggagaaagggacaaactcatcttctgggctgtcagtgggccttgagtcaggacaccaaattctgtcagaaacgattcgccttcttaagtcagcaagacataaacaaacaacaacacaaactggaaaatgcagagcactgaagttgaaactgagacctcacgtttctcgctgatgtaagaaagcacaacacgcttttggaaactgtcagaacacaggtgcacaggaaacccagcagctctcactcaccttttggctccttcccaggtcctgtgtcagcagggactgtggctgccctgccagtgaggggccttatgattttaatgaaacatgcagcagagataagtttggggtggggtgtctcctgaaatgccaagtaccctcaggaagggtcactttaattatacatacatcgcttttcccataaatatggaaacccaagatataaggaaagaggaagcttaatggtgtgtgttagtgtgtgtttccccagagctgtgtgcaggaggcgggatcaggttattgacttggaaggactcagactctaactccgagatgtccttatgttggccggtggagtccacactgcctcttgcagtctgagttgcttcctagaatcacgatcctgggtccctcttatgacttgtaaaatcagaaactccaaggactgcagccatgaaattaaaagacgcttgctccttggaaggaaagctacaacaaacctagacagcatattaaaaagcagagacattactttaccaacaaaggttcataagccaaagttatggtttttccagtagtcatgggcagaggtggatgtgagagttggaccataaagaaggctgagtggtgaagaattaatgctttcgaattgtggtgttgaagaagactcttgagagtcccttggacatcaaagggatcaaatcagtcaatcctgaaggaaatcagtcctcaatattcactagaaggattgatgctaaagctccaatactttggccacctgatgtgaagaactaactcattggaaaagaccctgatgctgggaaagattgaaagcaggagaagaagggacaacagaaggtgagatggttagatggcatcaccgactcaatggacaacagtttgaacagactccaggagatgatgaaagacagggaagcctggcgtgggtccttcacggagtttccaagggtcgga

SEQ ID NO: 40068 - DNA, 1945 bp, Bovine  19866880513076
  misc_feature (1)..(1): n is a, c, g, or t
ncctgcagcccatgacagctgcagcctgctgggggtcccggtgtctacatattccgtctctgatgtgggtgaaccagcccactccgggcattggccagtcatatggcctagaagagcctttcattgcttctaggttcacagcgaaaatacagtccgttccttctcaagagtgaccctgggaacagcttgcaaatcagtggccgacttggagccctttgcaaacaccctgtaatcctttggcctcctcgccttttggcctggcatcagcatccgtgtgggttctggttgggtgctccctcccgcggcccagcactgagagtccagtcacacttgacagagggcccataggacccatcatcaggctcactgtggtggtggtggggtagctcaggaccctttatttaaagaaacgtgagatgtggacgcagatgtgaaggcatgtgactgtcacgggtcctgtttttcaaaattagctttctcactaatttcattaaatcaggctccacttcagagggaaaaccggctgtcgaagaatgaatttcacacagtccttagctcagggttttgatgtgaatttgggatggaaaccgttgtaggcggatacgccctttgatgaaaagaagagccagccatctccttttcatcttatccttccatccttacccaacgtttcagggtgcccacagcacaccccgcccaaggctgtgagccttcggacgggttgctgtggcaaccccgtgttctcagggcaggcaggtgggggcaggaggtgctggctggaccacggggtttccaggatggggctcttgagccttgaggactcggggggtaattggggatttgctctcccaccatgcgagtgggctagggagtggggagtggctgaagggaggaggcacccccaggtgggtcccagatcctaaagggcatgttatatctgaccttgattttcttttctcccttaaatatgaaaagctgtgtgctggtgtgtccgtctgtcctaagccctgtcagtttcctggtcctgcagaccctgactcgcctgttttttctctttgtgtcagaggtgctcctggacccctgtcggacttggtgcccggcgtctacgtgccaggcggtgtgccaactccaggagatggggctgcacaccccccagctggtccagtgcaaagcctgtgacacggagttctgttctgcctgcaaagccagctggcaccctggccagggttgcccggagaccatgcccatcaccttccttcccggggagaccaggtaccttccagtgtgtctttcctggtcaccttgtactaatgaatgaaacagaacctgttaaactggtgtacacctcacagtggaagagtctcgagcttaggaagaccccaagggtataatcgtttgttgttggtggtggtttagtcactgtgtctgactcttttgtgaccccatggactgtattccgccaggctcctctgtccatgggatttcccaggcaagaatcctggagtaggttgccatttcctttttcaggggatcttcccgacccagggatcaaacctgcgtcttctgcattgcaggtggtctcctgtcttgcaggcagatgctttactgttgcgccaccagggaaacctgtgtaattgtttggaagctcaccggtcctcagataaccatgtaaagtgatgacatatttaacccttacagtcattatgatgctcgtggaaggtcctgcagtcagaatgtattcaaaatgccagaattggctctcaatttcagtgaatctctactcataaattctttaggttttgcacaatctgctcagttctgtggagaatcacgttccccttggtaaatgcaatgagttcataacgatatagcaaattcaccccatgatcggtgaatttgaaccacttcttcagatgactctgcattttcagcgacataaaattta

SEQ ID NO: 40069 - DNA, 3423 bp, Bovine  19866880575430
  misc_feature (1)..(1): n is a, c, g, or t
nactcagttctgctccagccccagcacacagaccacatgtggagctaaccctccctaggtggtgcattcaggtcagggctgggctgtcttttattctaaccctttctgtttccctgtctctgtgtctctgtctatctctgtgcctcttcctctgtctctctgtctttgtctctctctctgtgtctttctgtctcttcatcatttggatctttctgtctgtctctctgttttaaaatgtatttttttaactggaggataattgccttacagtactgtgttgatttctgccatgcagcaacatgaatcagccacaggtatacatatgtctcagccctcttgagcctcccttctacctcccaccccatcccacccctctaggctattgcagagtaccagatttgagctccttgcgtcatgcagtaaatttccactggctatttaattttacatatggtaatgtatatatttcaatgctactctctctctgtctttgtctctttctgtgccactgccattccaatcttgggacattatggtgaggatttaagaattatttcaggggcttgtgttcatctaaaagtctcccttgatattttcaaacccaatattttgtcactctgtgattttatttttcctttgcaagtattttcacaaacacccaagtctaaaattgcacaaatctccattaccaagagattgctgaaaaggataaaagaaaaaaaactccaccatgaaccaatgaaaactacttcctttaaaaatgtttaaagctaaatgaatgttttacagaatgcttgtcaggatgaatcttatttcttcttttacttattaatccggaagagggggtgtgccgtgtcatttccaagtttgcagacaatgctaaaaatgctattgaacagaaagacgtcaagctgacaggcatagacggcagcaaaaagattgctcaggctggcggagtgggtggaaggtggcagctgagcttcagtgtgggcaagtgtgagcagatgctccccgggggaaccagttacaacatgactctcccagggatcagtggcctgacatgggaaaggcggcttcagttcatcagtgtcagtgccctgcgtgtgtgtgtgttagtcgctcagtcgtgtccgactctttgcgaccccatggactgtagcccgccaggctccactgtccatgggattctccaggccagaatactggagcaggttgccatttccttctcccggggatcttcccaatccaggaattgaacccgagtctcctccattgacatgcagattctttaccactgggacagcagggaagtccagtgccctgtacataactctagtgcgtgcctgtgtgtttgaaggtatctgcatccatatacattaaacttgttgtttagtctctaagccacgcctgattttttagccaccctgtggactatagcccaccaggctcctctgaccgtgggattttccaggcaagaatactggaatgagtttccattttcttctccaggggatcttctcaacagaggaactgaacctatgtctcctgcattggcaggcagactctttacaactgagcctccagggaagtccccatatattaaataacccctcccagaattttacatgtacattacatgcaaatcaggttaacaacttggttatgttacatggctatttaatggtgaaacaatttgatatttttcttgacctcagcaattcatcatctcaaagggaagtcacacatataagccaagtagtatgtgctccctgtgctgctttacatgaaaatgcagactcccgcatagcattttagcattcctaagagattctttagacagtaaacaaagagtagaagaatattgtgtagggcaggtccttgaagttcaccactgcatttacctgaagaacgttgtgaaaatattaaccattctattacacaatgccttctttacgatttgactactgtatcgagatttgtgtctctgaggtagaaaaataaaagaacattttgctttatttgttcttatggatctgtgaattttaccattgctctttttttcttcttcttcttctctgtgttaatttccaggaagcaaaagtcaatttcacaacccacgtgcagcaagttcaggaaaagcttacagaaaaagggaagacgatttatcgttgactgtatgagttgggtcgactgtagtctgaagcaaacacacaccatacggtctacagtggaggcggcaagccacgggcgcttgtcttccgagaacagtggtcacacggaatccaacgcaccgtggcacagaatgcatcgtgcgattcagtctgtccccatcttaaacattttctctgcgttttagccctgctcctgtccaccctccagtggaactgtaacttgggtttcctagcttccatctgtaagagtgtgcgacatatggtctgtctcaccttgtagcttttcccattctcagctgacaggctggctcagccacacaggaggcgatccttgtgcctctgagataacaagagattctttatgcttctcaggttgtcctggtaaattaaatcatgtcacactgattaatgttttattgcaggccagtttaatttcttaaatagtgatttgacacaatttgtgatgtagttcaaagaaaacatttgtccctggtttttggaggcaaacaatttggtcacaaagactcacttgtctactaggcatagactagctgttagttatactatctatgggtcattgcaagattctccctgagtctggagcgtgtttgctggagggaacgtgccctttgaaggagagactttccagggaaacgagattcgaggtgacaacatcaataaacttctatagcttcctatctgaccatccatcactaacactttttcccacataacatcagataactcaaagtgattttccatatgagctttgtatatatttatccttgacatttccttaagttcttttaccggaatatcacagctcaatggcagcacattttatctatgtattaaaggttagttaaaagaaatgaatttgagttcaatcaccttggatgctttgcttgaccatctccagtgttctggaggcaagcaattctatcatccacacttgatacataaaaacaatgagagggacatatggggtcgaaaatgtgtaaagtgaacagtttgcgataaaatggccaatatcttcatatgtatattattttacaagtattcaaagactaaaagagtccttgtgtgtatgtagacacgtgtgtctgtgcacgtgctcagctgagtctgaccccatgtactacagcccaccggactcctctgcccatggaattctccaggcaagaatactggagtgggtagccatgccctcctccaaaagagtcctttggattttgcctaatcaaaacatttt

SEQ ID NO: 40070 - DNA, 855 bp, Bovine  19866880638762
  misc_feature (1)..(1): n is a, c, g, or t
ngcttgccctgcccagtgcccttcatgcataatcccgtctgccatactcacaccaaccagaagctggggctcagagaggttgccacccagcccatgtgcagaagagctgcacttgaacttgggcttcagtccgtctatgctcacccctgtggcctgcccagacctctcaggaaaacaattttgtacagacaccaaatagatctaagtaaatgattagcatgtgtgtgtttttaacatttctttccttgataataacaaagagcatactatgtattatcaaccttttgtaaagtatatgaatatatgaataaagatataaaattagacctcccttctaagcctctgccctgttttctttggtttgtctgtacacatctaaatttagatctgtgctgaccttgctcattttttccccccatagttgctgattcagttttttcttttttttttggtgattattttccagagtttgagattctttggttttgagttatttcacttaataacaagtgacttcataacaacccactccagtatccttgtttgggaaatcccctggacagaggggcctggtgggtgacagtccctggggtcttagagggtcagacacgactgagcacacacacaacctcagcccctcagctacttgagctcatgattccggggtggcccctgctggcaggtcaccccggagcctccgagcacagcctgacagggtctcttctgcttcagctctgctttcaagctggacgaggacgacgcaccaatcaagcgctgccccaagtgcaaggtctacatcgagcgggacgaaggctgtgcccagatgatgtgtaagaactgcaaacacgccttctg

SEQ ID NO: 40071 - DNA, 1368 bp, Bovine  19866880647331
  misc_feature (1)..(1): n is a, c, g, or t
ncctggaaaatcccatggatggcggaacctggtaggctacagtccatggagtcgcaaagagtcggacatgactgagcaacttcactttcacttttcagtctgctgttgagggtcgttggtggggggaggatcttcatagtccatgcgggtataatttccccactgatggtcgctcgccaagccctccagcctgcaatgagtgtaggagcatcagagcacagagacctcctggcaggtggagaatgtacgacacgagtcagatgggctgtgagtaatgtaacatcagcatcaggaaagcagcgctcactggaacatttctcctggccttcgctccacaaccacccaaggcttcaactaatgtgattttggaagatgctcttgtttcacagtccaaaatacttgggggaaaaaaaggcataaaattgacgtggtggcttgctttttctccccagtccctcaggagattcctctttaaaaacttacatatgttcccttttattattttacttgcaaagaagggaatttgaacctatggaattattataattgcacatcaggcaaacccaactctgagaactatttctgtacacacattaaactaatttatacactgaaaggcctgaccaatgggctgacggaggggcctagagaaatactgatgattcccacttcaactatcctctcactagaatatttctgttttcttgaaggtaaaataattttgaaaaaaaaaatcgacactatttcccagatcttgttagtcaatcacacctagttttgctatgtctgtttccatctttttagaaacattatacagctgcagaaaaacatctctttctgctttatatactctgccaaagcctttgactgtgtggatcacaaactgtggaaaattctgaaagagatgggaataccagaccacctgacctgcctcttgaaaaacctgtatgcaggtcaggaagaaacagttagaactggacatggatcgacagactggttccaaataggaaaagaagtacgtcaaggctgtatattgtcaccctgcttatttaactttgtgcagagtacatcatgagaaacgctgggctgaaattaagatttccaggagaaatatcaatcacctcagatatgcagatgacaccacccttatggcagaaaatgaagaactaaagagcctcttgatgaaagtgaaagaggagagtgaaaaagttggctttaagctcaacattcagaaaactaagatcatagcatccagtcccatcacttcatggcaaatagatggagaaacaatggaaacagtgtcagactttatttttggggctccaaaatcactgcagatggtgattgcggccacaaaattaaaagatg

SEQ ID NO: 40072 - DNA, 1290 bp, Bovine  19866880832265
  misc_feature (1)..(1): n is a, c, g, or t
ngatctggttagaaagtatgaaatcgagcgtgtgacccaggatgcactaatgcccaggggtgacaggagcttacgcacagtggcccggcaggactcgaatgtcaaatcccttgcaccagatgtgcgttcaccagcagggacccaagactgccagctctttgcacggggcacctggctcaaaggaatggatgatgtgtgtactcgctctaacagacctgcaggtagctttgcgacaatggcttctgtctcttggattgttccttaaacaagtactctcttgattgaaaaagtgatgattttatttcattttatttttagaaaaaaaaatccctgagcgctggatgccgaggacagctggagtgtgtgggacgcgggacgctattttttccccatcgctttgggaaccaagcagatgggctgccacttgattagatcgggggccatggatggcgccttccagctgttggccacgtgaccacgtttactacgggcaaaggggagaatttcccttctgttttccctgtccccttggtcctcagcttcttgaaattgtgtttctgggctgctgaaagcacatctctctgcttctttttgaaacatgcagccacggactctaagggaaaagaacttccaaacacctctgtaaaacacacagagggactctgtagcagtcaggtaacctgagcagaatctgggcatttaaatgaagtggggcagtttctcacaagtttggcagatagacaaagccctggttccgagagagtgtggcctgtagcagagaacaggaagcgatggtccaggatccgagagaggggtccttcctgcaggcatgggatgagcctctactatctgatcggacactgacaatgaaaggtaacactttctatgcacactagaactttacaggttatatgtgatctatgggcttcccatgtggttcagtggtgaagaatccacctgccaatgcaggagtttcgggtttgatccctgggttgggaagattccctggagaaggaaatggcaacccacttcggtattcttgcttggagagtcccatgggcagaggaacctggcaggctgcagtccacggggttgcaaagaggcagacacgactgagcgactgaacaaagtcatctatgctttacacctcacacacgcggctccataaactccccgcccaacgccacgtgcagggcctctttgctctcaaatccatccatcctcagacacaggctcggcagttcatggtcgaggaaacatgaaagctcctcctgccatcagagcatctgt

SEQ ID NO: 40073 - DNA, 1059 bp, Bovine  19866880880287
  misc_feature (1)..(1): n is a, c, g, or t
nccagtggccctgcttcttggaaaatacgtagaattctatcgttagggtttcctgtatgaagccttttccctgtgctctccagataacagtgaaacagacacagcctttttctttttgtgcaagtaattctgtaattgtagaagagaatctttgaactaccgggtatatgtttattggagttttcatttattacatttccagtttttaaacaggatttgcattttagctttaagagaattgaagctttaatgttaactttaaaaaggaaaacaaagaaaagggaagaaaacagaaaattccccccaaacccaaactccaagatcagaattaggagagcctccatcaccaagcacttgctgtgcctagtctcatgtggccatgagtttaccttgtttttatttcatgtatagtaagaaaagaggagatttattataactgacggtgtgagtctcatggtgacaaattggccagaagcattctggaatattttaaacttaggggcatcttctcaaagtgtatgttttctctccttgctggggtacaggatccagccagcaagcacagtggtcagattacaaggtctccagtcaacatccctcctccccgccctgccccgtcttcccagagcctggaagggctgtgctttgaggtttgttttgggagaagggtaaattgccactggagaaatccccaatccccaaaatatcccaaagagtctattatgaaaagattttttttcagatagaggctaatagtagctaaattcctttcccataacaggcctcttcccttgcatttgggaggtacagtcaatattggtctgaaagggtgagtgagcagaggctattttggggtggtctgaagaacctcaaggttgtcttgtagagtaacaactgaggagcttgttctgtgaacaggatagttgggaggtgagtgttggggctgctgagcagcttgcagcatggcacgggctccttggaccgtgggtgcccagatgtgtatatgagctacccagttccctattgatagacctcagttgcctctcccgggtttgtgtc

SEQ ID NO: 40074 - DNA, 920 bp, Bovine  19866880902061
  misc_feature (1)..(1): n is a, c, g, or t
nctgagaaagagtggcctgtttccttaaagtagaaaaaaataacaaaaatagactttacttaagcctcttatttactcagatgatatcaatgctgcttctagcacaagacgaccgactgtacctgctgcccagagatttttagaaagtcggagagaagagacagcagtggggctttgctgtgagttgtgcctctcacattgctcattagaaggtaaatgcataattaaacggcacactcattcaagagcaatacactttacgggaatatttataaaacagttatgtttacatcaacggtgctatataagtaacaaataataataacattgtgaagaaaattagctgcttagatgcataacatttaatatgtagttctgtataattaatatcctggcaatttaatgtgttactcattttcttttttttctccctcccctttcttacgacgaaagaaacaatttgtttaatttcatatggcattttcatcgtagtacagagccaaaatgtttcacgccagattaatctaatttcctaccccataactttgaaactggccactggattattaatgcccatttagatgacatggaaataactatttgctcttttgttgttacctttcatctctctgctaaatgtcctgatagaacctcgcaaggcacggggcaccccttgggaaaagaactatttggccccaaatggcaaaagtgctgaggctaagaaagcctgaattagctcatcgatctttacaaccatcctggaaggcagggatcattattattgccttcattttgtgcatgaaaaaactgtaacacacagatgagccaagagattgataaaattgcacagcgcaaagggcttgactccaggcttgaactcaggtcttcagagtctaaccgctggcgcacctgcctccgcc

SEQ ID NO: 40075 - DNA, 1701 bp, Bovine  19866880991802
  misc_feature (1)..(1): n is a, c, g, or t
ncctatgaaagtgacttataaactctgaaaaactgtatacacatcaagtatttttaatactagcaatcagtcattaattactgagtatccaccatgtagaagttgacaggctaaataccaagattcaaaaatcctagtctctgctcttaagtaacgtgcagactacttggaggaaaccaagcagagaaatgataaactatcagcaaaacgcagagtatagtgggaagccaagaaaccctgccaggagatttcaaaggatgggaacattcattatgaacactttttccaaggaagtagacttaaagctcttggtcttaaaaaaaaaatggcatataaaaagtatttattagggttctagagtatgggtttccagggtctcagccctctggggtcttttcttccctgtttgacctcccatcattgagtagagagagtctctggttatggagtcacatcactcttgtgattagggtctgtggtaggacaaagggtaagggattttgcaagtgttattaaagtcacaaatcaggtgggaccttgagcaagtttgagatcatactgggtgggcctggcttgatcaggtggtggccacttcctaaagagagaccctccagtgggccttgcagaggcaaccatgagcctccaggaaatgaattcagaacaagctctctaatgagaaggcagcctggcccacattctggatacagccctgggagacctggagcaatgggcccagctaagctctctctggattgctgacgcacagaaactgggagaaaaggaatgcggattacaaagtctgcggtggtttgcaggaaacaagcacaaccaaccaccactcagggttcaccatcttgaaattgctccagggctacggtgtctggcttcacaagtcaggcttctctacagaaggccttcatcatctgagctgcaaagaggcgggcagaaagcgttgctgtgggtcacatcctgccaggagcaagctttctgccctaggagacagtcaggctgcgggcccgaaggagagactgtgaaacatcacacagcatgcagccaggtttgccactgcatctgagaatcacagactccatctctggaagggacgttcaagtttccatttcagtcctctgcctttacccctgagtctcagagtggctcctgaaagagctgcaggtagaacccaagtcttctgacacccacatgagcattctcagcactgtctgaacatccagtgagtcaaggcaccatctcaccccatggaccacaatcattataagaggacgagatggtagacagcatcaccgacttaagggacatgaatttgagcaaactgcgggagacagtggaggacagaggagactggcgtgctgcagtccatggggtcgcaaagagtcggacagggcttagcaactgaacaacaacagcttggcatctcgttcaagtccaaaacaacaagatgaggaattacccagttttccttgcttataccacaccagcggttgctttttcatgataaattagtaataactctcaggcacatttggcaagctgaagaaaaatggattttttttacactgcattgaataaacatcttctgcttgaatatctcctatacttcactgacttcaatacagcggaagtttattgacgtgtgtactgcaagctacgtttgaatgatgcttcatatattatgctatgcta

SEQ ID NO: 40076 - DNA, 855 bp, Bovine  19866881024315
  misc_feature (1)..(1): n is a, c, g, or t
natcccccaccaaccttgtacccttgctctgagtgagtcagtgaatctgtctagcaaataaatcatcctcggagactgtctcctctgagtctgcaagccctcagtcctgagtctctgtacaatgcctgaacctaaggcattcttgctgtatacacagcaatagcaagacatcttcacatctgactctgaaataacacgtgagcagattaacaaaatgatgtgcattcactcagattcgcaagattcttccatatatagcatatggccagacttatcctcagataggtagtattaataatacgtttttctattcaggagcagatctcccttgatttgagatgagacaaaccatgaaaatgttctataccttatttccaaaaataaagacttggctctatttgattcagctcatatcagtaattaattaggagaataatataggcccatagaatattgtatttaatcccaacaaaatataattttcaaggataactatttgattagcaagagtgaaagaagggttattagcattgttattgaagctgcatttaaagtcacacaatatgtattttttctttaatgcttctcaagtaacactgcaattcctcaaatggttcattacagaaatagagcttcagaacacacatttgtatttcatttgtcggcaaacattttagtttcccataaagctaatgaatttcttccaaaaccctgactcgccttaccaaatacaaatgtcttccccttgaagcaattactcccaaatggttgatttatacagcctcacaaatcataaatttccaagcaaataaatcactttgcattggtttcaacaaagaaaaataaaagattttt

SEQ ID NO: 40077 - DNA, 1989 bp, Bovine  19866881248312
  misc_feature (1)..(1): n is a, c, g, or t
ntatagtgtatgttctcagcctcactaagcaattactctgggtaaaaattgctgaattttcttttaaaaaatgatgtacagggcagtatatgccttactggatatccagttcttaagtttaatatttggatcacacactcaaatcagtagaccattagcacaagtatcttttcttctttcttttttaaaaaaattatcctttcttcttcaaattattaggattattattgatgattttgaattgttaaacaactaaaaatatttctgaaaaagtgtggtgttatctattccaatccaatagactcactcaatttgaaaaaatctaaaggccagggtgagatatttgaaatcaaagatgcatttctcctatcctgtcctgaatcttccttttcctcttatatgtgtattatcccagatctgccttcattttcttaaattactttcttactccccacttgcagctgaggttcttaaatgcctctaactgcagggctttactgtgggccattgcctaacccagaaaaccaaacaagacctacaaatagaagtgacatatgtggtttttacacttgaggggctcatagtccaatgaaggaaatagaaacaaacaaaccaaaacccccgaaaatacagtgaggaaagttcccactgaaactttcaatgtatgatgagaacaccaaggaaaagggagtgacctgaggctgggtctttgggaagagagaaacaagggccagcttcatggagaagaatgggtatcagagagggactaatactttaacttacgatcttccctaagaatccttgatccatgatttcacgaatcaagaactctccagctgctattgagattttctgttttcatgaaatccttccttacatgtattgtctgagcaaacatcattgagatactggtttaattgccaagtaataattctaatgcttggtcgcagaagaaattggagtttcaatgtcatgtagatatttataacaaacaatagtgcttgatgtaatagacttcaaattattctcaattgtcctattgtgtgaattatttatgaacttttacacatctgtaaactatgaataaaacacttttaaccattccatacatagaaaaacaaattatcaaagatctttccatgtgatttacttacacttcatagtgcgatttcagcatagcatttcacatgtacaaattatgtcataggcttaactattcaacatttcaatcgtgtatatttattagtgtccagaggtatgttcagaacctttgagaatcaccaggtgggcattaagtagtatgctgctgtttagttactcagtcatatccaaatcttttgtgacccccatggactgtagcccaccaggcttctctgttcatgggattttccaggcaagaacactggagtgggttgccatttccttctccaactaagctattaataattaccaattgcttggaaatgctcaaatgaagaggtcatttcagctaacagaaacagaaacgtttagaaatattaaagaaaaataattagctacacatgggttaaaaagttgacagctgaactgtgtatctccatagactgagtttctattttcagggccagtctgttccagacagaccagtactgtaaataactggaagatactaaatgcagggcaaaaatcaatctaagaggaaaaacctggagtaaacttaaaccaggcattattaatctaaatctagttctataaaacataccatattgaagcacgtgtattaagctgcaaaataattttagggataaggcaagaaaccatagtttttaccacatacaaaaaaaaattaaaaactatatacaatggataataataagacagcaagagatacctttgttggttaatggtcatacacttaagtaggcaattcaataagaaagtctgggatattactaaaaaatcttccctcaagtcttaataattataagccaagagagaccaaagtaagaa

SEQ ID NO: 40078 - DNA, 1061 bp, Bovine  19866881259049
  misc_feature (1)..(1): n is a, c, g, or t
ncaatgttaataggttggtattcatgttccttctaccattttccagaacagaaagtttctatatcctcagaatgtcttcttaaataataataaaagttattcttcaaatttgtagagcgctttgcatatccatcccattttacaggactttgttttcttatatagataactaaaacagaaaagtggtttggaaatagagcactgctgtaaagaagacctaaagcatgagtcgttgggtttttcatggggcaaagggggaggctggaaggataatgaggagcttattgatgaaggcaggaagtgcaaggataaaactgataccagaggcttaaaagatggtgctccatgttttgtagcaatgaaacaagtggcaaaacaactgtttgcatttacctgagaaaaaataatgtacccaattaacctgcacatgcagataacatttctaggaagactattgcaagtgccaattggcttctgttagttacatatgataagatatggaaaggcggaatttagctaaagagagaactattcagtatgcgaacagaatttccaatccagacttacgaggtcaaaaaataaaactgtttaatatttccaggctctccagcaggcacaagactctcaaaatgaaaagtggcttcagggtaaagagtaaatcaaagattcagtcataagaccctttgtttagacctcagactaatagattctctcaactaggaaaaagcacgtctaaaaatctcaaaagtgttatttcactgcaattgtatacttggacaaaagtggagagagttctcttgaaaagaattatagtcatgacttttgggacatggagtgaataacaatcagatttgtagaaggaccacaaaaagtttaaaggtattgcacaagattggactaaaagggcataaatcattacaaaaaagatatctctggagttctcaattttctacagtcaagaaggagtctgagaaagctggtctgatgagaacatgggctctttcttatgggaaagaaagtgtttcacagggaagcatcctagagagcaaaaccccaaacca

SEQ ID NO: 40079 - DNA, 643 bp, Bovine  19866881435450
  misc_feature (1)..(1): n is a, c, g, or t
nttcctttttctggaccattttaagcatggactatgcttcaaaagaacccttaatatggcaagttaccaaatgtaaagagatgtagcagaaatgcacactcattggcagtctgtggactagcagattgctggtggttatgtgtatccatggaccatctattccattaaatactcttcatctttcttttgtgggaaaaaagtaaatataatccccctccttgctttaaaaaaaatgaattataagctgattagtcaaaacatgcccttgaataagttatcattaaccacctccaccattttccattctggcaaattagaatcgacccgagttgagtatgcccaccgcccaccgtagactgttagctgaacaccaaatgtgtttgttcaccaaatgccttgctcattaagggtgccagccattctggctagctgggctgccaaggaaggctgcatggtggcggtgtgacttgacttcgatcttgaaagacatttaaattgaactggatatgggagagacaattatacataacaggcaaaaagaatggcaggaacaaaagtaggtcagagagataagagcagatgttgctctaggcgggagggctggaaaagggatgacttcaaactaagtgaactgagaaaaaaa

SEQ ID NO: 40080 - DNA, 1606 bp, Bovine  19866881720752
  misc_feature (1)..(1): n is a, c, g, or t
nattcatgttagcctcagcctccaggggcaggaaaaaaaaaaaaaaaagtgaaagtgttagttgtgttagttgctcagtcattcagtcatgtctgactttttgcaaccctatggactgtggccggccaggctcctctgtccatgagattctccaggcaagaatactggagaggacctttccccgcccaggggtcgaacctgggtctcctgcattgcacgcagattctttaccatctgagtcaccaggaaagccctggggcaaatctccaggggcagagggatcaccaaatggccctgtggccatctccgctggcaatctggtgaaacggtcctttaggtccctcatcacagatgctcctctcttgagtgaaaagtattcagtacaaaccaaaaccacggagggtggtccctgggtatagcccgcccttcctctgtgttctgctaatggggataaatctcatcagatgcttgggaagagttctgttgtcagcagaaaactgatcacgtgggtagtaagcacacacagttacgatagagaggggtcaggactgtgaaaggaaatgggacatcttcccctgtgagagacacatggctttccaaataaatgggagcatttacttggatcctacaacattttgaaaagaagtttaagtagaaacataagtacatcctttttgtttctttggtttgcagggaaccagtttgttaatatcattttgggaggacttaacgctgaattgcatttatacatgcatgcagtgactcatcagaaagtctagaatgtggaagctggcctggacagtgtattctttcctccttgttggacagactgggaaatggagatggaaactctgggtggcttgccaaaggtcaacgtagagatagaattagaatcaaggtcctctgagtcccagatggttctcttttcactccatgtgctgcctcctctttggggatttccttaagagcaaataattcaaaagcaaaatggtagagaagagaaacacttgggacatgacccaatgatgagcacaaagcatgattttggggaaaagattgacttggaattgaatctctgatctgccatgaagacttctccaagcctccgtttcctcctctgtaaaatgggggcaataaaggctacctttcaaagtcatattacagattagggaaataatatgcagaaagaactcaggggagtacggctggtgatcggcacatacatttcccttgtccctagggctgtgactcaaccctttgcagggagcttggaccagatttgtcttggctgttgccagttaaaggatccctgggtgaggctgtgtgagatgagtgctgtgagttcttacggagtttgttccaggccctctgctgtgatcagatatctatttgcttagaggctcccactagcatgttagccacatgtccttggagctgactcagatgaggttgactgctcatctccatggtttctgtttgcttccaagcatgtctggaatggattgggattaggctcatcactccaccttcctataaaagatcctatggaaaggggcgcatggatcagatactttgccacatctgagtttcaagaagctgtctagaa

SEQ ID NO: 40081 - DNA, 1073 bp, Bovine  19866881992952
  misc_feature (1)..(1): n is a, c, g, or t
natggtgaatgttataaaactgagacaagagcagaaggtagacctctgggggcaccccaacacagagagaagaaatgagtaaaggagacagaattggagaggaaaaagaggagcagcaagagacagagcaaacagaagatgcttcatgagcggagggaggcaggagacagggctgaggagccactgaggccattctagggaaagctttgttttcaataccaaggagagggatttggttggagggaaaactaactatggcctttcaagtacagtagaagcttcttccttgtcctcatgggctgcagacacagtctgaaaatcccatttgaccagcctgttcctgaccaggactgaatttcctgatttcaggggggtttcacaaggcatcatggtcctgatggtgaccactccaaggatctaaagtgatctctgatcatcaacgtataactgatgagtcaaggctaggaatcatagacttaatttgcccaaagttgagtttctgtaggtctcctggcattcctgtagtcgagcaggacgctattgcagatggtgatcatgcatgtgtgtgtgtggggtgggcgggtggagacatgtgttccagggataaacaggtattttgcagggatccagttttctcttctctcctcagaagtcctggcaagggacaccttgagttctccagcagaacagctaaggactggggaaagaaatgttctgcaaaggaccagagattcaattttattcattctgtatcaaatttctacatctcacagtttgggctcaacaggaggtgacactgttaactgttactcttttcgcttcctttttttccccttcactgaacataaacatatcattacacagttacactccactatatttagagttgatttttaagtatctattaaatcaaacagggaagcgaggctgttctacctggagccagtggggtggggtgggggagatagacccggagatgggaggaccccagcgatacctgcatggccgaccaccacagacgcccaagcacctccatcctgctcttccctggagacataagcagactgctctca

SEQ ID NO: 40082 - DNA, 1340 bp, Bovine  19866880587305
  misc_feature (1)..(1): n is a, c, g, or t
ntatggatgtgagagttggactgtgaagaaggctgatccccgaagaattgatgcttttgaactgtggtgttggagaagactcttgagagtcccttggactgcaaggagatccaagcagtccattctgaaggagatcagccctgggatttctttggaaggaatgatgctaaagctgaaactccagtactttggccacctcacgcgaagtgttgactcactggaaaagactgatgctgggagggattgggggcaggaggaaaaggggatgacagaggatgagatggctggatggcatcaccgactcgatggacatgagtctgagtgaactccgggagttggtgatggacagggaggcctggtgcgctgcgattcatggggttgcaaagagttggacatgactgagtgactgaactgaactgaactgaatttcttctgacgactgcacatcattgtaggaaatgtgccagaatttattgaaccaatctcatagtgaaagacatttagattgtttccaattttctgccattataaataatgctttaaaatatccccatatatttatgcttgcaaatttgtcctattagctccttgatatattatcatacacaagatcaaaggaaatatacaattaaaaatttaatagatattgacaaattcatctttaaaaagaatccatcaatttatattccaatcaattgcatttccttctaccttatcagaacaagacagcattcttctttttaatattttctcatatgatatgaaaaaaatcttactgctgttatatttcaccatacatacaatgcctatgtatgccaccctttctctttacatattaaaaatatgtctatcaatattttgttatatatgctataaacttttaaaaaagcaataagtctttggctctcttagtttctttaccatctcttttgctgtatacagatttaaaatttcagaattgaatttttcaaaatttttttgtgatttctgggtttaataaaataactccctctccccataattaaagattattattaaattatttcctaaattttcttctggtatattaggttttatttcctacatttaaatatatttaatctaactcaaatgtgtttttgtttatggtgtgaggcaggggtttgtctttactttccaaatatgttctcccaatactacttaatcatctatagttttctccttattaaaatgctatctgtacaatattagtaaattctattctgttccattgatcttcctggcccttcctctgctaccttattttaggaaatgtatgcataatgtatttaatcaacccatcattcacctcctatacatat

SEQ ID NO: 40083 - DNA, 1780 bp, Bovine  19866880623161
  misc_feature (1)..(1): n is a, c, g, or t
ngccgctgacagccccccatctccccgtcttgccccagtcccaccagtcacctgcgtacagaacggcctcaggtaccatgaccgagacgtgtggaaacccgtgccctgccagatctgtgtctgcgacaacggcaacgtgctgtgcgatgacgtgatctgcgacgaacttaaggactgtcctaacgccaaagtccccacggacgaatgctgccccgtctgccccgaaggccagggtatagctcggggcctgggccggggcgggcgggggctgagggatataaggggggacgctccttagcccctatcaggggaggcctctgtctctgggagcacgtggagcaaaccttgcctctaagtcacgtctctccccacccccccagaatcacccacggaccaagaaaccaccggagtcgaggtaatcctctgcccctttgccgtcgactctcgccacaccccaccccccaggactcttgacggttcttctctaaccccgttgcttttgtttcttctcctgcaaccccatagggaccgaaaggagacactggcccccgaggcccaagggtaagcggcgccctctcgcggctgtcgggggaggtaagtgggcgtggctcccggcctgcgctcaccgggcctgccctttcccgcctcagggacccgccggcccccccggccgagatggcatccctggacaacctggacttcccggaccccctggaccccccggacctcccggaccccctggcctcggaggagtaagtggagagtcgaggcttctgtggaaggccttaggagccagccctgcgcccccaccccccactcccgctcccgccggtgttttcctttgctgggttttattttgttttggcagatggcatactttgtattttgaaataatttcaaacttataggggaaaacggggagaagagttgcaagaataatgcaaagaactttcatatatcgttcacaatctgtcacatttgctttatcagtttctatgtatacgtaacattatcggggtgggagggggagggtttcctctgaaccgtctgagagtaatttgctggtattgtgtccctttgctcctaaatactttagtgtgtattttctaagagctagaacattcttttacatgagcattacataatgagtacattttagaaatttaacgttgacatgatactattatctaatatgcagtccatattcaaacttcatcaatgttctccataatgttctttacaccattttttcctccctgattcaagatccaatcagggttatgaattacatttaattatcatgtctctttagtttcctttcacctggaacattccttagacttcccttttctttcatgacactgaactgtttttttgcaaaagccagttgttttgtagactgtctcttaaattgggtttgttggatgtgtcttcctgattagattccaatgatacgttttgggcaagactgttccacgggtcgtgttgttgtggtgcacagagaatgtgatatcattgtgtcccattactggtgatatcttctgcctttcaactccctgccctgacctgttttctcatgcactctctcttctagaactttgctccccagttgtcttacggctatgatgagaaatcaacaggaatttccgtgcctggtcccatggtgagtcatcagcagacgacatagaggacagaaaaagagcagacgggccagtgaaggcacatagggtggcatagataacttgggaggtcaagatgacctttgggacttcagaatcca

SEQ ID NO: 40084 - DNA, 1339 bp, Bovine  19866880747490
  misc_feature (1)..(1): n is a, c, g, or t
nttcctgaactgtatcaccatcgccatggagcgccccaagatcgacccccacagcgctgtgagtcactggggctggcggcagttgctgagtgcctgcttggtgccctgccctcccgggttagaggatttgtacccatgcagtgagccaggcaggcagggaggcccagagagacacggaagcaaggagccaggaatctccccgattctgacccttgcaactggcaccccgggatgcctcctatatcctcacctgtttcccttctgtgaaaaagcagccggctgccgggcttgctcctagcctgggcaaaaggaagctttgctgcccctggcagtttgcagtggtgccttcctgtgcgccagggcttgtgaggcctgtatgtgagtcagtgagtattgcagggatgccaacagtgagcctggccctagctggtctgagtggtcaagggtctccttctcaccgggacctgtgcactgatggggaggcaccctgcccagctcgccccatgggtgatgccccagaggggagggaaagctgttctttgctcctctgggtcttgccaggttacaaacaagtagcattttaggggccttcgggggagcattggtcacttatgcttggctttgaacctgccatcctcctcaggagaggaaaggccatgggtcagagtgtgtggacgcactccttcaggcctggcttctttgggatgggcccggccagtcctgggagctctctccccaggctggcatcacagcctgtcccctccagcaatgatctgaggcctagaaaggtggggggctctgtttcccgcccatgacatcttgcaccaccaacttggaggcagaccctgttctcgttgctgcctcccacaccattgttcagatttcaatgttatagagcttctgtttcccattagggtgggctccagccaggtcggtgggaaggggtggtggtggcagagggaaatgggcagtggaggggccagcctgggaacaggtgagagcctgtatgcatgcagtaagggtggccagccacaccggtctgcctcctgcctcagagctcgccgtggccaggtctctcccccaccgtccctctcagcccctccatctccagctctatcacgtgcttctccctctcccccgtttccctgtttctcactccctcttgacacactttacccgctgcctctccagctctctacacccctctcttggccatacaatgatggaatcagctcacagatatcaggggattgggccgccttctttcctgcccggcctcacgctatgcttggcataaatatggtgcctggggatgcacagcctgtactcaggcccccat

SEQ ID NO: 40085 - DNA, 615 bp, Bovine  19866880763989
  misc_feature (1)..(1): n is a, c, g, or t
ngctggggtgagtgttacagtgcatgattgcccggttgtatgtgtgtggcccatgtctaggtttgcctgcttacatttgtatgttggcctgtgtgtgtgtgtttgtgcgtgtatgtgtgtgtctggtgtctgcctcgctgtgggcatctgctctgtgtgtgtgtgatgactctgtctctctgtgtatggctctctgtgtgtttgtgtgtcttccagtgtatcaagtcttatgtgtgtgtgctgatgtctctgcccgtgtgtgcatgtccctgtgtatctctatcactacagatgaccctgccacctagtgtattctcatttgtgtgtgtgtgtgtgtgtgtgtgtgctctcccctgctgagcagcgaatctgatgcagcctcctggccgctgatctgggggatgctgagtccccatttcttcttaggcatataggatgggtggcaggaggatggggagggcgtgttaagtctggatccagcctcttggcatcagccactggagttaacctttctgttctggctagattgtgatctgtggggacccccaggccaaggataccaaggctctgttgcagtgtgtccactccatctacatccctaacaaggtttggtct

SEQ ID NO: 40086 - DNA, 2009 bp, Bovine  19866880785382
  misc_feature (1)..(1): n is a, c, g, or t
ntttggatttttcctgaagatgatagggtgccacaaaggttttaagcaagtccatggtatgtgtttgtattgtatcaaaagtcttccagaagccatgtggggagcagaagggagtgacagacgggaggcagggaggccaaggagagggctactgccataatccagccagttcatataccttgtccctggagacagagagaagcatgctgggaagagcaggcagtggctgaatctgtagaactcaactccagttggatatttgtgaggtggcagcaaggatgacacccaggtttctgcttctgggaggagcactggggcttgtgcatatttgggctggagggcattccttgcaaactgcctgtgggatgcccagggtgtctttggattgcagaagagaggtgtctcctggaacctgtctggctgggtatgcatggggacaaggccttccaggaggatgaggtcttcaggacacaggaacttcgtaatcaccttccttcctagttctggattgctgagagttggagccaacctcatgctctagaagacagccaacagcagggggtggggaggggcacacagcccactggtatcctgggctgcagagaagagagagggagggtccagaatagacagtctttcaggcctgagaggacagggcaggtgatgctcctgctcgtttctcacactctgggcccaccctgtcgctctagatacatgttcagggagggtttctatttataagtgagtgaggtcagctattcaaggcaagggaggctggggtggggtagggtgaggaagagaccagatgtggtaggtcttaactttgaggggattcacaaactccttttggattctgtttaaagctagggccatctctcttaaagatagacacacgcatggataccccagtgcagacttcgaggatgggagtttacagacacctgacctattccttgggcctcccaggagtccttggcctgcagacagaggagctgggactacaggccaaataagactttggaggacaatctcttacagttgccctgggcccagactttcaaaggttctccacatgtgggagggagaagggtgcttttctagagatggcctgctaaagggggcatcctctggctctacggctcccccaattcatcaaacatggggagtgcctcctgtgcacagcacatttgaagagaataatagactgggggtatgggaagtgccaggagctccaaagaaacaggttccagcagaaaagtcattctgcttgattatgccaaatgccgtaaaggagatttctggggacagaagagagctcacacccaggtcaaggattttggagggcttcctgaaggaggtatcttgtgagagtggccttgaaagaaaagtgtcactgacagctgaggccaggagcagaggggtctggtggagggattggggagaattctggcagcctggcctgggaatgcacagggaggcatgggatgctctgaaggaccatcatatagcctcccccactccaccccaagttatctgagcaggggctcttgaagtgaatccagcagtgctcttgaatctggagcttccaggaggtgtgggctggcttgggggtgggacccagagactatttctatcgtccagatcagaggcaaggagggcccccaggatgtgaaggggaaatagaactagtgggtggggcacagccattccattggcaaggtctgtgggcccaggcacctgctgccagagggatgaagggcaggcgtaagtcctagacaactcctggttgcaagatggaatcctggagagggaagtccatggaaccaggaagctggggaaggaacaggtttgggagaggaggtgagagggtttgttttggatgtgctgcatttgagctggctgtgggccatcctgggaaggctatcaggcaggttggctctctgggtgaagagccaaggcttggagggagattgttttgtgtcatccacaccctggtgacagccggaaag

SEQ ID NO: 40087 - DNA, 1572 bp, Bovine  19866880833035
  misc_feature (1)..(1): n is a, c, g, or t
natggaggagcctggttggctgccgtctgtggggtcgcacagagtcggacacgactgaagcaacttagcttcttaaaaaaagaaagggaaagctttttttttaatggatgcatgccagttaatgaatgtggagggaatgatagagtcagaaatttacattttacagcttccaacctaaccactgatttaggcgaggataatcgataaaagctaagatcacagccaaatgatgaggttcaggaaggaatctcagccctacactgatcctcaagcccccaaatcaggatcccacacttcactgaagcccagacaaaggagaggaccacagttaagacaggttccagataggcttagtaggttatttaaataaaatcaggtgaccgtttctgcaggtaaaaggccaggagaattaccaggggaggaatttccctttcctcacatctgcctcactgtagccattcccctggggatgccaggtctgggcagtgatcagaaccaggacagcacctgccagtggtgatgtctgcagtcatcccagcccccaaagcctacctgcagagtcctggatacggaacacgtggctctcctccggtggctatcctctgggcacggaagaggggattctctgctgccaggcctcttggagccgagatagaagggacagcaacagagagtccagcacagccagcccctcccaggaacaccgaagacccctggaacaagaggcctggctgtgactgccccttcttactagtttcaatcctcaccctctgccaatgccaaggccctggcgccagaggcccttccttgtcaatctttctcacctctctctggtctgcagatgtgtagtcagggttccctgggacacctaaccactgcccccacaacacacctgtgatccagcagcaacaggccctgctcctgtagctccttcacctccttgttggctccaaacaggtcccacagggtcagctggggctcaaactgctgccagtgctgggaaaacaagaaggggcagaggtgcaggaaccacaaggtggggagctggcaggggcttttctaggccacctgcctgggggtgtagtgaggggtggctccaggccagcacagagatcttagaaaccgactatcacgcacaccgggaccaggtcaatgggtcagcaggaaggtgggctccttcactcctattccatgtccaagccagatccggctcccagccaagccaggtcttcctttgctcattcccctccctgttctggtcagagtatggccaaccctagttggagctctcactggaaaagaccctgatgatggaaaaggttgaaggcaaaagatgaaggggtggcagaggatgagatggttagatagcatcaccaactcaatggacaacatgaatttgagcaaactcgaggaggtagtggaggacagaggagcctggcatgctacagtccttggggttggaaagagtcagacgtgacttagcaactcaacaacaagtccaggttctagggctctaatttcatctagagcagttctgggcttcactgatctttattgcacttactatctgag

SEQ ID NO: 40088 - DNA, 1646 bp, Bovine  19866880838848
  misc_feature (1)..(1): n is a, c, g, or t
ntgacactaccctttggcagaaagtgacgacctaaagggcctcttcataaaagtgaaaggggagagtgaaaaagctggcttaaaagtcaacattcagaaaactaagatcatggcttctggtcccatcacttcatggcaaatagatggggaaaacagtggaaacagtgggagatttattttggggggggggctccaaaatcactgcagatagtgacatgcaaccatgaaattttaatttcttttaagacacttgctccttggaagaaaagttatgaccaacctagacagcatattcaaaagcagagacattactttgccaacaaaggtccatctaatcaaagctacggtttttccagtagtcatgtatggatgtgagagttggactataaagaaagctgagcgctgaagaattgatgcttttgaactgtggtgttggagaagactcttgagagacccttggactgcaaggagatccaaccaggccatcctaaaggaagtcagtccttgggtgttcattggaaggactgatgctgaagctgaaactccagtcctttggccacctgattcaaagaagcgacttccttgaaaagactctgatgctgggcaagattgaagtcaggaggagaaggggatgacataggatgagatggttggatggcatcaccgactcaatggacatgaatctgagcaaactccaggagatagtgaagggcagggaagcctggagtgccgcagtccatggggtcgcacacaacttagtgactgaacaacaagtaataacaaagccattcttgtctgagaaggtttgcttatttacatgtttggggactaggtacaaactgggcggcttgtgacattctcttttcagacttgtgaccttattctggctcaagttaatgttgctgttaacattttcaaacatatgctaaaggcgagatcagataaaaacgcaaataggagaatgttcaggctccttgtgactgccacagtcaccctgagactgcctcacgagggaggcccttccagcaggtgggtgagggtgaaggcggttttaccttgtcctctgaattactgcttcggatccagcaggctggcttcccacagaacagcagagaagggccaagaacaggcataggaaccacatcagggtaattggccaataagtctctgtaagacaatccaatgatgtatatttcctaagcctgccagtcttgccacatggagcccatggagatggctgccagaaaatgtggcaatgtgcccggctctgccctccagtggagcatcatcagctccatcctgctccattcctgaaatgggaggttcttggacataaaaagagactcttcatgcagaggcacacagcattaggggagtctggaggggccccacttatgagcaaaggaatgtccaggaaaaccccctcgggagctggttgttggaagagaagagatggcagtagcacagtgagcacaggtgccccttcgaatgggctagaggagggggtgacagccacgagcaagaggctggggtggaggcactcagattccagggagggaagcctgccctaggatacttgcaggcgctgaggaagcaacgctctccaactgctctccctcaggcccagggcccaactcacaagtgca

SEQ ID NO: 40089 - DNA, 1248 bp, Bovine  19866880844440
  misc_feature (1)..(1): n is a, c, g, or t
nacttcgagggcaccctctgggccaagccccaaggctttgtgtccaaacccacctggcagctggtgaggggctcttcaggtactgacttggtcgcctccttacaatgtgtacataactaactttttgatgggcctcctctctctctctgtaaaacaaagggattggccaaggagatgcttatcaggttggccctggtgcactttggacctgggctctaatggagggatttctggcagccttggcacctgctgctctggggtcagggctgagggtagaggggttctgtacacacctcaagggcctgggactggtctctgtgaacagatgccctgcctcagtcatcctaccccaccttccctctgggcctccacctgctccttggctcctagagcaagaccaggaggaggcagcagcagctccatctggcctggggctgcctacatggacagactggggtgacaggggaggggggactctctaacctgtcctctgcattgtctcagctaataacagggctaataaggagccgctttttctaacctaattgtattcaaacattttagttaattctccattcatattttagcataatgggatcgagtgctctcggcacttatggagattaatgcagagaaagagttccagctgctaaggcaacgctgggcgactagcgccctcttgttctgtgggtactgaaggaaggaaggaagaggctggctcaccaggtctacctgccgtgatcgcatcgttgtgtggatgacctgtggccttatgttgtcccctgtccctggcctctcccacccccatctccctgggggcccaaagggccgcctgagcaaagtcatggttggctggcccatctctggaaacaaaaatatggcctaaagcaccctacagtgcaccagaacactgggactttctgcctctcggttatccacacctcaaggctgatgctggagcgcggcagctggtgaggctgaatgggagctctcgggtactcttcttccttcggcctttggtgggggtccacccaggccactccttgcctcagtttacctctctgtttaatagtcctgcatgggaaaggacagttataaccaaactggtctgagccaaagcttcctgccgccctggcacagtcctcagaggctacagccctggctggcttccgccgtagacttcctgagggggaagagctgtctgggacctgaggttgccccaaggcccccatgcggtgcctcttcttt

SEQ ID NO: 40090 - DNA, 1379 bp, Bovine  19866880885353
  misc_feature (1)..(1): n is a, c, g, or t
ngccccagctaatagcttttagctctctgggtttcaggggagagttcttgagcagagatgtgggcgacgggggaggagacagagagaggctcagaacccagggtaacaagaaggcgggcgaccagggtgagatgaaaaccggcagctggccgtgagaggaggggttggctggggggctcaaagaccagttgtatctgatattcatcactcacctcctgctccagcaccctcaccctgaaggaattattccccatcctcactgccctgagtgactagaattcaaggagcaattaatgaaggggagggtgctgcattccatacctgggctgacaaagtgcagagccaacagcccacaggtgagaggcagagaagtggaggattcagcagaagctgggaccctcagcgtaggggctcatgtggctccagtatgattttttaatgtgagagcagaaaggtgaacctgaaattttggagcactcaagttccttgggtgactgacccttggtttccatgtgaaccaggccaggagattggatatggtttaaggcccattgcactcagctgaggagaaggcaatggcaccccactcctgtactcttgcctggaagctcccatgggtggaggagcctgataggctacagtccatgtggttgcaaagagtcagacatgactgagcgactttactttcacttttcactttcatgcattggagaaggaaatggcaacccactccagtgttcttgcctggagaatcccagggacgggagagcgtggtgggctgccgtctatggggtcacacagagttggacacgactgaagcaacttagcagcatcagcagtcagctaacttcccccaagccccttcctgcactggtacagggctgcaggtcagaccctttcagccagatattacacagacacgcagacaccgtggagaatgtcagtggccaaaggccaagatggctggaggaagccatggagatgcaccctgctgacatcacagcaggcccccttcccaacccatctctaccctgtcctgtccaggcctgtccttgggtgaaaggaccctgacactccccagggaagagtcagcagccctgaggagctgagactgaaggacggggtgggggtcgggggtgccttcagctcctcccagggtgagcaaggaggatgagtgggagactcttaccacagcacctccattgccactcacaatggaaaccccagtcctctgcagtaggtgcagggcctcacatctcacagacctgtcacccatcaccctgggtgaggtgcagaagggcaagaagcatgctttactcctgggggtaaaggaggctccaggtcaggtgggagtgagggggtagcaagggtaaatgcag

SEQ ID NO: 40091 - DNA, 1944 bp, Bovine  19866880887518
  misc_feature (1)..(1): n is a, c, g, or t
nacaccttcctaggagaacagaaatatgctgcccccatcagctattcttgtgggggtccagggacagcctacctgacagcctcctctctgccatcgcctctgtggatccaggcagatttgacagggctcacacagcagggcctggggagcactcagggtcccagaagagcatgattcttctttttaaactgcatctcagatccagatccaggcagggagcagactacgctcacactgctgtctgggggcaggctgcccacagccgctcagggtgggcacttctcttacctgcacagggcgatgttgccttttggcccaggtaggagcactgggccaagttcacccctctcttcctccctcgcagccggttcccccaacctcccacagggacgaggacttgcaactgcagctggctctgcacctgagccggcaggagcaggagaaggtagtgggctaagccacccatgccactgctggtgaggtgctggtgaggcgctggtgaggtgctggtgaggcgctggtgaggcgctggtgaggcgctggtgaggtgctggtgaggtgctggtgaggcgctggtgaggtgctggtgaggtgctggtgaggtgctggtgaggtgctacgcgggtactaaccaggctcttccatctccctgcggtggaccaggctcttccacctccctgcagtggtcctgctgcccctgacctcagggcacctcccagcctgcactcttcttgaccctagctcaggtcctttcaagtctagcatgggcagctcatgctttcctcactctggtgccttctgcaggaggtgaggtcctggcagggagatgactcacctgtggccaatggtgctggagctggagcccatcgtcgttgggacagagagcctgaaagagcagagagagaggaggagaagctgaaaaccagccaggtagagtagtctcggggccatgggttagcagagctgggagatgaattgggttaaatatttataaagagtgtagaacagtgcttggtatatagtaagcaccacttaatgtttattcagtgaaaataagggtagaggagatgtagcagactgaggtcccatcccgcatgggctggtgactgagctggtggcaaactggggtgcaaaacatcctgatgtgagatgccgggtttggattctgtatttgctgccatttactttacaactcagggcatgtcattgtcttagcctcagtttcctccattcaagtgtgctggttggacagttccaactctgacattctaggagcatgtgatactgtggatcaagactgagagtagcctcaggtatatggtactgaaaacatcttgggctcgtgcacatggtgtccatggtggaagaatgtgtagctgctggtagcaaggctaccctccaaaactgctcatgctactcttgggatgtctctgtactctttcagccaatgttcacggtggcaaatttcttttggacatggactaagggaagtaggcttatcataaaatgtgtcttaccactgatgggctgaggggcaggacagccaaggaaggggtcaggcaggcttgccttccatcccagctctccctctccctggctgtgtgactttaagcaattgccctcttagcccaagatagcacatctgtaaaatgggcaccccaacaaccttccctaatcacagcgcaggttgttaggaaaatcagacactaaacggatgaggaaacattttataaacgggaaagcactctacagaggcaagggatcattaatagatgtttgtggaatgagtaaaggagaatgagctggagggaggatgacaggtcagggcccgcccttcctctgggccccgccttctcttgagcatggctgcctctcccctcaacagtcctccagcctcgacttggtggacatcttcgcatcagcttcaactccgccctccacaca

SEQ ID NO: 40092 - DNA, 1272 bp, Bovine  19866880902262
  misc_feature (1)..(1): n is a, c, g, or t
ncggcccaccttggccaatcagccctgcccagagcgcacctgctcagccgctgccccagctcagacacgaaggccgcccgcatctgtaaattgctgtcgcacctgttgtcctgcccgcattccttctggaactgtacctgggggtggtgggagttgtgaagggcccaccatcatccatagctctccaggaccgtgcccttccggccctggccccggccccggccctacccacctccgtgtggttctccagagcctgcgcttggttgaggaccgggtaggcatccagggacccaagccccagttggggacgatcaggcaaccgcaaaggtaacgagtagttcatggagatggtgatgggtcggagtttgtcgcggacgttgtcctgggaaaggaaggtaaactgaacccagctctgcactgccctccaaaccaagttgtatcctcatacaaacctaagcccctagggaggagctgcgcccctctccctcaaccctaaaaaacccctgtaagactgaatcccctctggtctgctcaccaaattgacccgcttcggtaagatgtggctcctcctctccagagactcctctggaggaagattgactctcccttcattcctggggtccccaagttgagttttcccttttcactctgatgtcccagagaaagtctgcgcttgtccttgcttctggatgccttttctccagagacaagctaaaaatctcacatacttctctttggcccccatccctgctccaaaggtctctgttctctaccatgggctggatgctgtgtgctgtagcctccacttacctatgaccttccaggccaatccaccacctttgtctctggagagaactcatgccctcacccttgacctcggggactctcctgggcccatggagttacctcctcctgggaccatggagtcaatgtactgcccctcaccccctccctcaccatcaggagcagctccagtgtctggcagcgcatctcaggcatggagaagaagccgtggaagacagctgactggctgcgtgcaaagtggagtcggggtgggcggcggtcccggtcagcctccagcgtgtaggccagggctgtgggtgtacaggctggtcagcaagtgaccaggtgagcgtgccccccctcgccctgcagcccagcactcactgatgttccgcctgtagttggggttgcctgcactctggttgtaagcaaagcacagctccacctgcacactgttgagggtgggggacatacaggagggtcaggtca

SEQ ID NO: 40093 - DNA, 1150 bp, Bovine  19866880905794
  misc_feature (1)..(1): n is a, c, g, or t
nacctgagacaaccccagctctagcatttactgcggtacagccttgagcaaataatttatcctctctagcctcagtttcttcaactgtaaagtaaggttaatctcttaagtggggtcactgtgtcatggggccattgtgagaagacaatgagatgatgtatataaaatcattagcacaatgggctctcatgaaatggtagggccacaccaacaccttcgccccagagttgctgattcctccacagctagctgctctgcaaggagaacaataacagtaacaatcatgacagtgatgttgaggataccaggccaagaaaggtgtgtcagaggagcttgagagacaccttagggaagggaggcccaggctcctcagcaggctgaggttcagggcggtacccacatgctgagtgaggcctggagtgtgtagtccaccagcagaggcagggtcatgggccgtaggtcatcctggtgacttgacctgaggaaggaatacagagggtaggggaggactatgtcagctgaggctggggggcacccaggatacctcaacccccatatagactggcttcctgaggtcactcacgtggagagctgcaactgcgcctggagttcccttgtgtgtagggtcactccgatgacctcgaaagcaatgagcagctccatctgccataagggcaagggaggttgtttgaggccaggcaggggtgatgccatggggaagagaggggctgagtgctgtgctggggagttggctctctggtctccatctcccacctgtctccactcttccaccttcctagccttatctgcctccctcttcccattcttttctgttagtaatagctcatgtagctcaatacttctgagctacacgaccttgagcaatcactcaagcttgctaagcctatgtttcctttctgtaaatcagcaccaacttcctcagaaggttgtgagaaatacataaaagaattgggctcagggcctggcatgcagcaggtgctcagcaaaatcagtttcctcgcctccacctgctctagctttgtgcatagctccgtagtggctccatttttctgtctctggggtctctccccaccccctactgcatccctcctccccagctctagctctttgattcaaggaagcctgggaa

SEQ ID NO: 40094 - DNA, 2239 bp, Bovine  19866880928245
  misc_feature (1)..(1): n is a, c, g, or t
ntggatagcaaccggccttcatctgggcggacagagcctgcccgagcctgcccttcttcagccccgaacactccccagctgaagtcacagtcccctgtggcccattattgccagcgtggcctttcagtgggaagtacagcggggaagcgggggctcatttggggcaggcgaggccaggcaggaactgtgacgtctgggccaatatgtgggcaccaatagaatgtttcctctggagccagccagcctggcccaagactccaccaaggtggctccacaaatagtgcctggcaggcagtgcgggagcagggaggacaaagctgggggcatgcaggaccctggggctgtggggagcctgggcccacggcccatcccaccaaacactggccagcttcactctgtgccagcttgggccactgaggccaaactctggctgcctccccagtcccagtgtttgcacggggagcacagtgccagaggaaaaggagctagaagtggccctgcagctactgttgactccctagtgccaccctgagcaagggacttaaccttgccctgcaatctacatattgaaaataacactacctagctcagcagaccattgtatggattagatcttctgagaaaacctagtcacgctgtgaacctgctcagggcaccactgcttgcattcggggtggaccctgccccgtgggagcatagagctaggagaggctggacactgggactgagctgctcactcacacccaccctgctccctagttttctgacggtgccttcctgggtgtgaccacgctgaaacatgtccatctggagaacaaccgcctgcaccagctgccctccaacttcccctttgacagcctggagaccctcaccctcaccaacaacccctggaagtgtacctgccagctccggggccttcggaggtgagagggccccagtagtacccctagaggccatcctcctgtgatggagtggagacatactgaccctgcactaagacatcctaggcatatgtcctagatttgctccctaagaggtgtgggacgctgggcacttccccatttgtaaaatgaagatgacagttccagactaccccaaagcaaagtcaacctgaccccatggttcactgtctttacctccagtactcttccatcccttccccaaccccagcaactctctgtctctccaggtggctggaagctaagacctctcgccctgatgccacttgtgcatcacccgccaagttcaggggccagcacattcgtgacacggacgccttccgcggctgcaagttccccaccaagaggtccaagaaagccggccgccattaaacaggtggggtccaatgggcatggcccctattctctctctggagactctggaattgaggagggtgtcccaggatacttccatttttacagggaaaggaggggaggactggggctccctcctctaagggggaaaatgatacctcctaggactcccaccattctctccgaacagcatctagactgttggcgtcctgacaccagtccttgcctcaccacaggtcctgacccagccagtcctggtgactggcctctgccttctgccggagaaactactgatcctctcacctctgactcccatcttctcccaacaccctctgctgatacatagatctgttcacacctagacatgtcctggcagggcacccgggcactccagcacaaacccagctccacttgatgctgagagctccagcacgcctggcctcacggccacagctcctctcagagaagctgttgctaagacctccaagtccattaggaccagaacagggtgaccatcaggatggccacccttccagaatcctcctcttgatttccctttccctgtcatttggaaacaaacatcagatccttgccctaccccttgctcctaggaagggtctgaagcccctaccctcaactctgccagcccccacctgccaggacactggtgctttgccacacatcctcccacgctgcatttcttccccagatttctataaatataaatttatgtatgtataatatttactcccctgtcacctgtctttgtgacttgagagctattgatgaggtcagactgcagtttctcacatctgctttctagaaggagggccagccgaagggtcttccttggagacccaggctggactcctcgacacatccagcaatctgttcttgcccagccctggcctgccctccaccccagc

SEQ ID NO: 40095 - DNA, 1337 bp, Bovine  19866880937881
  misc_feature (1)..(1): n is a, c, g, or t
ngaattacatttctgttacactgggaaatttattccccataaaaattcaaaaatgtaggtataatactgattctaaaaagttttgtgttcttcaacccaatgaattcagatggtggggtcaaaatggtgggtttaaaactggggtcttggggaccctaaaatcagctggtgagcaatacacgccacatgggtccatccgcctgactcactcagccacagcccttcttcccaggctacctgacatgccagatgcccacactctgtggtatctcccctctgccccacctaggggaaacagtgggtccactatgacctcaccggattctggtggcctcacaatgtccccctgaggtcactacagagataagcttaccgccccctgcacctcaggcacaagtctgccaaggccagcgtaggtgatcatcctcggtcctctttctggccacccagggcaaggcttgggccagagccctacaggaagcctctgagggaaccaggaactggggcgcacctcccacaccgaggagcaacccaggagagacttctagccgtcatccttggaggtccttgcacccagttcccttcacccaccccaggaagagatgcagaaagacacttcgctgccacccccatctgggcccttggcctccaacactgccctgggggcaggccggcaggccagctcctctggactcccaggcaagagcgagactcggcgccgcaccagccccaattcccgcaggaagcccagcatatccaaggtgatcctggggttcgtggcagacaagggggcaggcaaccgcgtgtccctggccgccctgaagaaggctgttgccaccaggggctacaacatgacccgcaatgcctggcgcttcaagcgagtgctccaggggctggtggacaagggcatgctcaagcaggtgacaggcaagggggccacaggctccttcctcatgggcaagaatcacgcctccaagtttaagctcaaggccaagagacggcggcagcggcgccagcgccagcgtgggcagcgccggcctgtgcagcgccagttgctcgtgggctccaaaccggggcacaagcgacccatcaagggggttcgcagggcggccaaatgccgccgcagttaatcaggaaggttgggcaagcaggcaggggtgccaggcccaccataggctcagagcagtgagaataaaaggagcctaacttatttcacacctgcctcctggaatctttggggttcaagggagtgggagaggaagaggtctgggggcacacaggaaaggtaaggccaggggtgggggaaaccggtcaaatgaggttaagatttgggaagg

SEQ ID NO: 40096 - DNA, 1199 bp, Bovine  19866880943333
  misc_feature (1)..(1): n is a, c, g, or t
ncactttctatctctgggctcacggaatctggcagggttattccaaggctgaaatcctgagttgagggatgggagccaaggattagggtggggaaggggccaaagggcctggaaccctgcaccatttaccctcatctctcctagccactcccattccaaatttttgccctgagggtcctgatccatcagcaagcttgggaggtggaggctgagggctggcagagctccagcgaaaatacacctgggccacagagaaccctgggcgtggggttggccaggtgtggggctcttcacttcacccttggatccctcccccagagtctggggctcagcaactcgcatgatcgggcgctggtgaagcggaaattgaaggagctggcggcggctgccgagaaggagcgcaaggcccaggagaaggctgcacggcagcgtgagaagctccggcgcagggagcaggaggccaagaagagctagggagaggggcgggcaggcactggcacccggctcgggaagctgctgggctctgcgggcacaggccgccttaggaggcggggcctgggcaccaggcttgggttggcctggctccatgctctcaggagaacagccctctcaccctgtcatctgtctggacccagatccctcagagagagacccaggggagaggacccagtaataaatccccttgcaaggactttttggcacaaagttcctgggggaagtggcagattatgggcagagaggccagggctgaagcaaatcagggagcccagaggtgcctgagtgattctaaccctgttccctcaggccaagggggtcctggggctgccagtgaactaggaggcctgcataccttccagaggccctgggctcagagatacgggctgagcctctctgcagcagcaggtggataaagtagttcctttccagctctcccaggtgactgtgtggagagagctctgcaggaggctggtgggcctacagcaagttgcactcaaagcagactcccagtctgcactcctcaacagaagagcagagacatctttgcaagggctttagaagggaggggtctcagtggtaggatgatgcccctgcaggtctgcccctcctgaggcccacacaaagcctgggttttgacctactctccaagttgggcccacttctgctgctcctgcggaggccacctggaacctctctgaaga

SEQ ID NO: 40097 - DNA, 1128 bp, Bovine  19866880963696
  misc_feature (1)..(1): n is a, c, g, or t
ncaccatgcactcgcagactcaggtccttcaacaccagctccaggcccggccggtagcgcacggaataatttcggaactccaccctcacccttcagtggccagcctgctggcggacggctgccctccaccacccagggggcctggtcaccaggggaggacaggttctgcatcagggggacgtctcttccccagcccagccctcttccatcttcagtctgcctctcttcccaggcccctgccatcctcacctaccagggaccctggcagggagcccctggcgcttgtgtggcccaaccttgtggttcaatgactctatccatctgacattattccccacagaactttgccctcctctactcccctcatgcccaagatgcctaagtagccccttccacatgcccccactccccctttcatcattctttattactgagtggctactccatgacaggtagtggggtagccaaggtaaactagacagagtccttgtccctgtgaggctcacatcctaatctaaggaggcatacaattaacaaataggtaagtctatataatgccagatggtgatgagtatggagaagtgcctggtgttgctgttctgtacagggtggtcagggaaggcttcctggaggaggtgatatttaaataaagacctgaaggaagtaaaggaacaagacaagtagatatccaggagaagggcatgccaggcagaggaaacagcaaggataaatacttcccagtgtgctctggagcacagtgacaaaggtgagaggtaggagacaggtagtggaagaccccaccatgtagggctttgcagggcagtttaaggactgtttttttgttttgttttttttaccttgagtaagatgtagggccatgcacagaagaataatgtgatttggtatgtttttaagggatctctctgctgctatttggggagggagagggtaggatgttttgaaatgggggagtcagagtgtcagcaatcaagaaacaaagcagccagtacagataatctgctctcttgctgctgctgctaagttgcctctgtcgtgtccaactctgtgcaaccccatagacggcagcccaccaggctcctctgtccctgggattctccaggcaagaat

SEQ ID NO: 40098 - DNA, 1966 bp, Bovine  19866880977822
  misc_feature (1)..(1): n is a, c, g, or t
ncttgccaggatgctctctgaaagggaggagagcttgggtcttcaggtggaaggtgggggacaaaaccctcgattcctcccctgactgggctacttgtctccttacccccagcctagatatccaggtgccaaagggggcactagtggctgtggtggggcctgtgggttgtgggaagtcctccctgttatctgccctgctgggagacatggagaagctggaaggcaaggtgtatatgaaggtgagaggggcagggattactgggaagggaagcttggtcaggccttgggcaaaccctgaggtacttctcctttggccagggttccgtggcctacgtgccccagcaggcatggatccagaactgcactcttcaggaaaacgtgctatttggtcaagccctagaccccaagcggtaccacaaggctctggaggcctgtgccctgctagctgatctggaggttctgcctggtggggaccagacagagattggagagaaggtacagtctcttctctcactctctgggggagttagcacatacagctgccaacctcaatccagctaagatccaaatatgcattcattcattcacatattcatctatgaatgatgttatgcctaactctgtgcaaggcactggtagagcagatctactactgggggaagctgacttgtaaacaggtaggggctgtagaatgtcctggagcccaggactaaaggcctgttcaaggtactgggaatgagtaaagaggtggtctgcataaggaaaagcatcacttttgagctgaatcttaacaggtaaggaagaagctcttatcattcatcagattttatgacatacctactatatgccaggcaatattatatattagtaaatgtgtgtgcgtgctgagtcacttcagtcgtgtacagctccttgtgacctcatggactgatttcctccaggctcctctgtccatgagattctctaggtaagaatgctggagtgtgttgccatgcccttttccaggggatcttcctgaccgaggaatcaaacccacatctcttatgtctcctgcattgcaggtgggttctctaccactagcaccacacgggcagcccatacattagtaaatacaccagactaaaatctctgccctcatatagcttacattctagtggagaaagagatgttagcaagataaatcagtaaaatatataatattaggtgaatgctaagaggaaaggatgtacaaggttgtattatcagtatgctttgtgaaagcctcactgagaattggagacttgaacaaaggagtggtctgtatctgggaacatgaagccctgtctgggacatctgaggcagagagagcagtaagtgcaaaggctctgaggcaggagtgtgattggggcatttaaggaccagcgagaagaacagtgtggctggaatgaaatgagcagggatgaggaggaggaaatgaagtcagtgaggtgtccaggaagcagacatagggccttaagtctaccttaaggtctacagcttttaccaagggtgatggaaaacctctaagggttcagttcacttcagttctgtcactcagtcgtgtccaactctttgcgaccccatgacagcatgccaggcttccctgtccatcaccaactcccagagcttgttcaaatgcatgtccatcaactgagtgatgccatccaaccatctcatcctctgttgtccccttctcctcctgctttcaatctttccccagcatcagggtcttttccaatgagtccgttcttcacatcaggcggccaaaatattggagcttcagcttcaacatcagtccttctaatgaatattcaggactgattttctttaggatggactggtttgatctccttgcagtccaagggactctcaagagtcttctccaacaccacagttcaaagcatcaattcttcggagctcagttttctttatagtccagttctcacat

SEQ ID NO: 40099 - DNA, 1288 bp, Bovine  19866880981874
  misc_feature (1)..(1): n is a, c, g, or t
nttattgattatgctaaagcctttaactgtgtggatcacaacaaactgtggaaaattcttaaagagatgggaataccagatcaccttacttgtctcttgagaaacctgtatgcaggacaagaagcaacagaactgatcatggaacaatggactggttccaaattgagaaaagagtatgttaagactgtatattgtcaccctgcttaatttaatttatatgcagagtacatcatgcaaaatgctgggctacatgactcacaagctggaatcaagattaccgggagaaataccaacagcctcagatatgcatgtgataccactctaatggcagaaagtgaagagggactaaagagcctcttgttgaagctgaaagaggagaatgagaaggctggcttaaaaatcaacattcaaaaaatgaagatcatggcatccagttccatcacttcatggcagatagatggggaaaaaatggaaatagtgggcagattttattttcttgggctccaaaatcactgtagatagtaactgcagccatgaaattaaaagatgcttgttctttggaagaaaagctatgacaaacctagacagcatattaaaaagcagagacatcactttgctgacaaaggtccatataatcaaagctatggtttttccagtagtcatatacagaggtgagagctggaccctagataaggctgagtgctgaagaattgatactttggaatcctggtgctggagaacactcttgagtcctttggacagcaaggagaccaaaccagttaatcctaaaggaaatcaaccctgaatagtcactggaaggactggtggtgaagctgaagctccaatactttggccacctgatgtgaagagccaactttctggaaaagaccctgattctgggaaagactgagggcaggaagagaagggggcgacagaggatgagatggttggatggcatcactgactcaatggacatgaatttgagcaaattcttggagatagtgaaggacagggaagccttatgtgctgcagtcagtggggttgcaaaaagtcccacacgatttagtgattgaaccacaagatgggcgtgggagggcaggagagggctggcctggtgtcatttgatgctagatcctctagtgcagcggagtgctattcctgacccacccactccaggctgttacctgagattctccccaccctcggagcactggaagtccaggcctgcgggctgggagctcacaaatgtgtgcaggtgagacagctccaaagcttgccacatgtcttc

SEQ ID NO: 40100 - DNA, 1935 bp, Bovine  19866881001330
  misc_feature (1)..(1): n is a, c, g, or t
nctggctcagagatctagcggcaccttttccattgcttttcctctcttccaggtggggaacttgggacttctcttcatgttgttgtttttcatctttgcagctctgggcgtggagctctttggagatctgggtgagttggggtagggagggcagaggagccagggctggagactcagggactcctgggctaactaagcctctctcccttccctcctcctcagagtgtgatgagacgcacccctgcgagggcctgggccggcatgccacctttcggaactttggcatggccttcttgaccctcttccgagtctccacaggtgacaactggaatggcatcatgaaggtgagagccccccacagtgaggcccctcccagggctggctctggcctcaaggagacggccccacttcttggctcaggtggcactcgatgtgaataaaagcatgtaaccttccaccctccatgctggaacactccgggactccctctccccaagacattctctaactcacacctcccaggacagtggctcatgctcttttgcccctcggacaccatcacgccctcctcctgcccttccttgttcccctgcaaagctctgtgacactggagacctgacttcctgtgaaagctctgcccactgccctcccaacctcactcctctaacctgcctccccaggacaccctccgggactgtgaccaggagtccacctgctacaacacggtcatctcccccatctacttcgtttccttcgtgctgacagcccagtttgtgctggtcaacgtggtcattgccgtgctgatgaagcatctggaggagagcaacaaggaggccaaggaggaggccgagctggaggctgaactggagctagagatgaagacgctcagcccacaagccccctcaccactgggcagccccttcctctggcctggggtcgagggccccgacagccctggcagccccaaacctggggccccacatgccacaccccacactggagcagcctcccgcttctccctggagcaccccatggtgagcagagacccccgctccgcctctagggaatgtggaacagagacgggtggtgtgggtgctcagttggtgggtggcgcacagggagcaggcagcaagcagaccctagggctcctcctgaatcacctgaccctcctgcctcgatgtggagaggtaagcaggcccttggctgtccccagagatggctgcccacacttgcagcgtggggccaccccagcaagccactggcacacttgctggctcatctgtcccggtgcctccagcttggctgggacttcccttcctggcttttagggtcaaggttattttctgtttcctacctgtttctctcttacccttgccctgattttgccaaacgtctttcctcccccaccctcaacctgcctgatgccatctctcaatccttcttcctgatcttttctttctttccccttctctccctctgggctcccctgttttccatctcctatctctccttcctcctcccacacctctctcttgcccaccttccccactgccccctttctctctctctctattgttattgttatgtgtgtgtgcgcatatgtgtacttatatgtgacttcctctttttctctgtctcttctcaatccctgccacgacacttcccatcactgctcctctgaccctcactcccctgactctttggctccccttatgggctggtcctccccaggacagacagctgtttgacaccatatccctgctgatccagggctccctggatggggagctgaagctgatggacgagctggcaggcccagggggccagccctctgccttccctcctgcccgcagcccaggcggctccgacccacaggttactgtgtccctgtgctgtgccccttccccgactgtgctgggctgtgccatgctgtgc

SEQ ID NO: 40101 - DNA, 1183 bp, Bovine  19866881007950
  misc_feature (1)..(1): n is a, c, g, or t
nagaagcactgggtgaccgctggcagactcggggccagtactactgacatcctccctgatcacaccctgctcccccagcgtccccttctactatttatcataagttatgccccgccagaccacaggggacgctgcctttggctggcaccagcaggctcgggcacacacacctttcaagtgcacgcacgtgctatgtggccatggcctcctccctgagggaaggctggggccgtggcccgtgcattgctgagcactgcagccctgtgccctggacacacatgagcgcgtgggggtccaactgctgtggactgtgcttgcgcacccaaatagtgcacggccatgcgtgtcccagcctctaagtgccaaaaccaagccagaggccttctgccagagccaggaggaagaggcccccaatgcggggacccttcctgtattcacactggacccatcatgagccataggcactggattgaccctgacctcgagatgaaaactgcctacaaggagcagcccacagacccccagtgcaactctcagcacccctggcagagagtggggagcctgcctgaggtcgctcaaggaggtgttcataggacctggtgtgctcagaccaagagcggaatgaactagaaaaaaggtccccaggggggctttctttcacgaattgctgggaaaacctctgaactcagccatggccattccgcgcactagtaggaaatgcagcctgaggaaacagagatggacatgctgctaggcagccaggacatgctgtgctgggaccactctgggagcataatggaattctcaacagagtggggaccggtcctgggccaaggagatgatggacggatacagagcagataccacttctcacccacatcaccatcctgaccttgaaggcctggagggatctccacgcgatcacagagggagcgacacctgaatgtacaacaggaaggaagccccatcatgccccgtcggccagaccccactctgccctcactgaccatgggttggagacctagaagtggagctcttggctctctttggcttttggagccagtttagctttgccttctcacctgtggcccattctaagaagttgagctatttccagaaaaaccttctcctgaccccgggctgttggcaggtccccttctcaccccctcccccctttcatggt

SEQ ID NO: 40102 - DNA, 1494 bp, Bovine  19866881043775
  misc_feature (1)..(1): n is a, c, g, or t
nctcctgctgcagtgcaggacaccaaacgtgccctctcctcccacatccttcccccaccacagcgagcctggccctgtgccccaagccctgccctcctgaccagcttcctcactcactgatactggcttccatcttgagaagccacagctcctttgccatctccacccacctcagcttgagaatgtctttccctgccccgtgtgtgtccaggtcccacatcaccagtttacatacgctcagttcagtgggactgcagccacctttcctaggggcttcccagtgcagggtgccctcccccaacatgggtacagaatagagcctgttgcctcctccccactctgccctccctcttgcaggtgtctcttctcagatggagacagacatccccagttctcactgggcacctcccaagagatcagagggctggctggatgctgggcacagaaggctggggtcccagggtatagcgctggggctctggccctaaggcatctgccatgctctgacagaggaggagagggtggtcctagggagggaggggacagggaaaactcgacccagtggtccaaagtatctgaaggccttggcttctctcctgacttcacatttgactgtttccctttcattaatattagtgaggatgacagcatttactgaatgctgagcctgtgccaagagcttttcattcattcattcaacaaatatttactgagggaattccttggtggtccagtggttaggactctgcactttcactgccaagggcatgggttcaatccctggtctgggaactaggatcctgcaagctgtgtggcatggccaaaaatttatctatctatctatatatatacatatacatatatagagagagagtctcccattgccagacattcttctgggctctaggaatacaccagtgaacaaaacaacaaaaagctctattttcgtggacatggcattcttgtaaggggagagacatagaatagcaccatataaatacatttatacagggacttctctggtggtccagtggctaagacttccaatgcagggggcccggggtttgatccctggtcagggaactagatcctacgtgctgcaactaagaatttcgtgccgcaactaaagatcccgcatgccacaactaagaccctgtgcagctaaataaataaaatattttttaaaaatacacttatacatattacattatacattatatatattatacattgaagggtggactggcccttaactgaaccagttaactggtcattaactgaagaaggagccgactgagggaagatcaggagctcacttttggatctgtggcttgagaggtctatcagactcccaagagaggcatcaaggaggctggcagttagacaacctgaaagttcaaggggagcccctctaggccacagagagaaatttgggactgagtgaggtcacctggaaagcccagacaaggaaagtccccaaagtggtcttgggag

SEQ ID NO: 40103 - DNA, 754 bp, Bovine  19866881101363
  misc_feature (1)..(1): n is a, c, g, or t
nctggttgctctcttttcccctagtgctcatcacctaacatgcccatttgttacttattctgaggtctgtcttgaatactagattgcccttcacaagggcagctttgcttccatcacagatgcagtaggcacttactgtttgtgggataaacagagtgagccagggagtgagggagcagaggtcggtatgcagggcaggtatgagtgatgggagggctgagtgccaggttcttgccctcacctcagtgtgcagcctgtgggtgtatttctccatgaccaggggatctatgggttcctgagacgggatgatgctgtcaggggcaggctcgtccaaggaaagcccgtcccgacttaaagatttcaccggcttcttgtcatcctttgttttgtgcttcttgctatttaaacggtcctgcttggagagacacagagatgcccagccttcagtagctcccgagagaggtccaggaccttttcaagagcagctctgaggggagcaggggcatcatgctggagtgactgcccactttccgcagcccctcctatcccttccccagccccaaccccaggcccagaacacatgctacatgcctctttcccaggtgacagcctgggtccttttttatcttctttgtctctgattccaaactgtttcttttcctgggatgcccctttccggtcctcctttcccactttcccagaagttaccttcacttctgtgacaggaggtgatttttcgatctaagggaagtga

SEQ ID NO: 40104 - DNA, 1216 bp, Bovine  19866881164843
  misc_feature (1)..(1): n is a, c, g, or t
ncgctgagtgctggggcgggggtgctttgccccatccccacttatcagagagggtttcttcagagtggggaagttttcagtggacataattctaatggaggaagcacatggaggatgtgaggaggggtgttcctcacgtagggcaatgcgccagctgccagggccatggatgggcatggccagatgctttctagctgagctgcaccatgagtcagaggcacagggctgggttgagcaagggggttcccagttgccagggaagctggggcaggaagagagggagaaggaagcaaggcagaacagcggctggcactctttcagacgacagggttctgtggctgctggctgaggaagccatctgggggccctgttgaaagagtgaccccaggggatgctaccccaactctgctgggtctggagtttgagtgcataaggagcagactgggtctccggtggtcctcactgaggttggtccagggggtcctctaattcaattcaaggcagctacttgggaagtctcaggtgtgttcttaacatccaagcttacccttgtccaccttgccttcctgtggatccatggggagacctcaaaggcctcgaagcttttgcacagctgcattccctcacctccattgagtgattccacattgttgtcggacactatgcaaggtccccggggcatctatggggagcaagtcgagatccctggccttctgagactgtatctcaggtggggatggaatgaggagtcaagacacgatgcttccagcacatgggagaccagtgctctggaggtgaacgctggccctgggtgcctggagtaggggtggggtaggagccaggcttgaggaaggcagaagtgacccagggcatccagggtctgctccaggggcccactctctgctctctggatggacatttctaaggaaagctgccagaacagagcagttgaagggaggaagggcggggggagaggctggtggtttgaggttggtcctggctggaggaggaacagagatggagaaaacctcagccccagggaccactgtgcggctacacctgagatctgctgtgggcgatctgacaccgggatgggaggccatccagacctcactcagggcccacggcccgttggctctctgcagaacataggcaaggggcaccatcccacgaggctgcagcaggaaccaacctaggcagcagacagacccacaga

SEQ ID NO: 40105 - DNA, 1501 bp, Bovine  19866881209317
  misc_feature (1)..(1): n is a, c, g, or t
nacctgcccccctacccctacagttcacccattagcaaggaattttgctctttaatgaggttgagtggggagcgcaatgctttcccaagcatcaactctttaatggtggggtatcaggagttgccagggaagggttttgaaagccagggtccctcctgggcttcccaaacatcaggaggaatgaatgggcagactggggccagagggtctcaccaggaggtggccgtgcagaatgcagggtccagtatggatggcttggctaccaaggtcttatggaggatgttgatgacaggccgggccctgcatagaaaaaccagacatcagtgcctcaggcccaccccaggccaggccagggtcagggctcaggcttgtatggacctgattctgaaggtggacagaactggggctccatgcaggcaggtacggaagagagaggtccccatccaccgttgccctggctcacctcagcagcacgatgcggtctgacaggctccccaccagcaggtctgggtagaagttctcatccacgtccatctgcccactcagggagtagccaaaggtggccaagccaggcagtcccagctgctctccatggattacctgggggcagggggagacggtggggacaggctctggggaaggttctacagagtggggcccatggggaataggcaggagtgcgtgaggaaaaggaagaaggtgcctctgtccctggccatctgtacctgctggggctgtctgaggagccccctggagctgccatggtagatgtacactttgcccaagccctcgaatggggctcccacagcaatgtctgggaaagagagatagttcagggtcaccctgggtactatgggccccatggttttccagtcctatgctccaggccacagagcccagcatggcatgacctccctgtcaagcagtgctcagagcatcagggaacagagttctgtaacttaggattaaaactgggaccattaggcacccaattgcctccttttatatatgggaaattaggcccaggagagggaagtgacttaccaaagtcacatagcaagttaatgtctccagcaggtctagaccccagattcctgaccactggctatttgttttcccttattactgtgccttccttctcccctgtcaaccgcccctccagacacctggttcttctcatgacatttaagagcagggtcacaaaagcaggtgttccccatttgtgactttgccagatagttctcaaacactcatctcatccagtcctcacaagagtgctggcagtaggtaatactgtccccacttcacagatgaggaaataggctcagaaaacttaaagtcggacagctaataagtagagaagaggctgtttgagcctatgtctaacagtgggggctgggattttcatcacaacactataacttttcttgttaaattctaaccattatttccacaaaataactccaagatgttttgtcttcttaaactttctagtttgctg

SEQ ID NO: 40106 - DNA, 2070 bp, Bovine  19866881249906
  misc_feature (1)..(1): n is a, c, g, or t
nctggagcttttgggcaatgacatgggagtggcagccgtgtggatgatgagcggtggtaacaagctcctccgcagctccgggtgctctcccagagacaccactgcaggggagagagggcgagaccctgagtccactcaagggtggccaagaaccagggcctgtacctacagagagatactcacaggccaagcgcttcttcctgtccccatcaccatccaggctgggcgagaagaaatcaggttccgactctgacttggtggcatctccctggggtgggagaacagcggggctattaggaacctgacctggcaggggttagtgggatggaccaaagtctccctgtcttcacacacacaccacatagaggccacaaggaaccagccaccacggcacgaggcatgcactggctcagaccaaaccacccaggcttggggcctaggcctcccaagggcctctgtcacctcagagaaggtgggactttctccagaacccacagcacaactttcctggctcggactggctcaagaagggctgaggagacaggggatagtccagcgggtgggtggcacaggtcagagggagctgggggcctgagtgaagtggtcacgagagcctcaattccaaaggccacttgtgccctctgatttccctccatgactgccctcccctgagcctcagacccgaggaccccagagagaaatcgaaggaccccagacagagccgttcagcccaagggatggtctcttacttctttcctccctcttcccaaagacccacctcctaccctggccccatttttacctctctccctgtctctgggacagtttttttcttcctccttagcaggtcagtaggttccccagtaattacacacttctccttaagaagttattaagaaatacttgattgctacttttgataaggacataaatattgcgtaattggcatctcaggggatcattttcattaactcagtttacatccctaacgaggcctttaattatcaagtgggatctccagggggctgctcagcatgcacagtaccatggagtcccatgggaaccctggctttgccccaaattctggtgccagtgcaggagacaacagggcacaggctcagtgtggggccagaggagaagtgtgcccctgagcacctgctggacctcctgtgtggccaaggggccagagacacagaagtcgattgaaaattctggtacattctggcaagaggcacccccaacccccacatccttcaaagacttctcctaagatgaggcaacttgcggggtctccaacaggagcttaaggcaaggaggaggagagagatgggggcgctcggtctacggcagagatcccgaccccaccgaggcccaacgactcagactcttcggggaccgcagcagaggcgccacacgtggtgcaccacacacgtgcacacagaggattctaagtcccttccttctcttgccatcccctggtctgacgggatggactgtgccctttgctggtgaacagggcagaggcaaggaggccctcccctcagtgtcctcaagggggaagggacttaaaatcaaagcaaacctcacaacaccgaggaccaccacagccaccacaggttgcacagcagctgagcgtgaacacaagcaagacacggaggcagagtggggggcacggggcaccgggggcatgctgactcatgatcgcatacctaccccctgggagtcgacaggcagctgaatacagcttaactgtccactcgcatcttcccgtttgctgatttcctacagggagaggggaggcaggggatgggcactggtcacaggcgcccggctttcaaacagcagcaatgttgaaagaggaggaagaaacggatgggtgcaaacccagcagtgggggaatgagacatggggcaagagaggagaagaaaggggacagaagggccttccagaattcaaccacaggccctggagccagaatgagtctgaagggtgagggcagaggccacagaggtgggaacagggaaaggggaaggagactgagcccccagtaatcctaataataacagctac

SEQ ID NO: 40107 - DNA, 1216 bp, Bovine  19866881302422
  misc_feature (1)..(1): n is a, c, g, or t
nacgaggaataggtgctaaggtcatatctcttttacaggtgagcaactgaggcacagagaggtttagtgacttgcctaaggtcacacagctggtgtgaatcccggcatccaggtctagggcccctgctcacactcctatagcgatgtgatgccaggagactcacgggagccagggtgaatgtgagggggtgcggggccatgaagctgtggctcagaccaatctctcccctgttcactcctcagccaagtgtccgcagttccccccacagcccctggagtgcagcaagcagctggacgagcaggcgctccagcaggaacagcctgggccgtgcccccagcctgaagcgaaggagcccaagtggggagcggaggtccttgttgtcgggtgagggccgggagagccaggatgaggaggagagctcggaagaggagcgcactagcccagcgggcagtgaccgccaccacaggggctccctggagagggaagctaagagctcctttgacctaccggacacactgcaggttcccgggctgtaccgcacagccagcggccgcagctcagcctctgagcaccaggactgcaacggcaattcggccgtgggacgcctgagtcaggctgtgcggcccgatgaccccccgttggatggagacgatggtgatgacgagggcaacttggtgaggcccctgtgggcacagtgacctctcacccctgactttgagtgagggggagctgtgcctgacctggtgcaggactggacagctgcctcccagttgtttggaattcaggcagttaccatcatgctcaagggatctcaaggggtatcagccctgaagccaaggtccaaacagtccctttgtccctccgcccacccccaccaagccccagagcctcatcatgcctggggctgcagctctgcatccttgttggataagaatgacttcaggcagatgtgtatgaatctttcatggccctcccccgtgactcagaaagacccatcactcatctctccaaactgatgccctcctctgtccccctctgttgtatcgacctcatcacaagccttgatttcactctacttttacccattcacctttccccagccgtctcaccaccatctttagccctggggacggggctcagggacctgggacctcagggttagcacatgagaaggggcgggtgtctcctcatcccaggtgtgtcttgaacagacag

SEQ ID NO: 40108 - DNA, 3180 bp, Bovine  19866881489023
  misc_feature (1)..(1): n is a, c, g, or t
ngatgacctccctacccccatgattttttgtattttctagtctgaagtgtttttcgttttgtttttaaataaagctttctcctctttgaacagaagactgccaggtcaggccatccctaggaactgagtccaatactcattaaaaatggagcactgatgaaataaagctacgtgttaacaatacatacacttcagtgtagcctttctctctgttcacaaggtctaggggctagggcccttagaggaggtggagaggaaggagggagatgcagaggtagcctttatacacgtctacatggctggaattatctgaaaacttcagacccaagagcttttggctggaaatactgtattcacggccaaaactcactgggtaattgccagtagttcctgttctgctgtgtagaggctgtaaaaaggtgagaaataaagcccctgatatctgacctgaagcctcctgggaaagctgccgtgaacacctccacatttatgtcatccctcagaccacgccgcctgcttctctaggggatgagaagtgcatggcactttatttccttgcccctctagcattctgttccagacaggtccccataacccatgaggtctccaagtcatgcatcttcctcactctggctgaagctgactgtgggagcacagagcagcccagggcctaccccccattttgaacgtcctaggctggtaaatgagatgaaggggtaacttgcttttttgaacaagccaatgaaatgtttttttctgcaggttagaattaacctggcacacggccttcaagttttctggtctcctctttcatttcttcaacctttattcttggtataatgtgactggttatggatgatgtttctttccccctccatcctaaatggtttgcagtaggtgtggagatggctcctttgatctgatttttctatatgcgttgggccagcctgtgctccaggactatttgttaaaggctaatcacattctgggggctggccgtttctgcccaggatgttcctgagtgtacagaggaagacttccatccttgtgatagagcaagtataaaggcaccaaggcccaaattattctgcttctccttggagctaagaaaaggtctttgctatgcttcctgatttatcaggccaatttggcatgacgtatgctttgtgaggctctagctgccccaaaccaacagaaatgcagattcattcggcatcattctcagctaaagatttgaaaagtgtaaggctgtatctcctctcctgtcttggatgtttgcctctgagctcattgagaccttgacaggtgctgacagcccaaaggagagactcagttgtataaagtaaacaggataatcaaaaaatgtggttaatagaggatgacctccatctagcgggctcagctactctggggaaatgaagctgactgctgtgaacttagaggaaagacaccgcacaaaatatctgtctctggcgccactcagtgccagacttaagcgccaccacggcagtagaatggaggaggctcagggggggaccagtgccttctgttcttctgccagagggttctgcccctgaaactgttcaacaatttgaaccccctatgattagaagtacagaaatgtttagaaggacaaagttaaagagtagggacttagtcagttaatatttaattttaataatacttattatgcttgaacagtcagcagtgcacaaagtgaatatttacacacagtgtgaacacatgctttaaatatgcagtagaggaggcggggcaaattcacaattaacaaagctaaaaaaaaatcctttttataaattacacaaaacatataaaaatatttctctgaatgcatagattaagactttaaactcacctaccagcaactgtgcagtctaattccactgccatactcagagtcagctgaccacagaggactctataagaaagatgcagtgcagggcccatcgctcactgtgacttcctcagcctccgtttctaagcccaggaaatgccctggagctactcctctgtaggccaccgcccagccagggacctccactgcttctgagaatctctaattgatctggatggctggaagaggactaaccccagtgatttagacacatgaattaatactgaatttatttgttccaagataaaactagccttaattgtatcagtaaactgtaaattttttcaaaggtataggggaaaaaaggttagtatttctagcttctgcctggttgaaacacaaaggaagtttcttctttaaagtatttcagagaaagggagtagtaagtaaccttttactctgctagacaaacactgcacggagtgagtaactcaccatcagtaattagtggtttacgattaagtcaccgaacagagtgactccacgtcacaaagttggccttgaaaacacctcaacctcagctcagcattcaggcagcagcaggaggccattatcttagcacaacactctcctccactgacatcttctgcaccttctctcgcaatcgcagtgttccaataaaattaacccagttaggaagttcagtttctttggaaactataggcacggtggggagaaagcttcttaagacagcagggatgctcttcaacagctggctccaaagccctgctctcctgtttatctaagtgtgctctttcttatttctaaagttaagctatttagttcaacaagacagtggcttttctttttaacattaatgacagtgaagggaaggaaaagaacccttaaatgcattttttacaaaaatttttacgccatgctcaggagtttaatcaggtgtttgtttccagaacaaagcttggtagactcacattgactttgttaagtaggttagtggtggttgtgggggatccctaagattaaacaacttgtttacaaaagcaacagacttcagagttgtgtaaaaatcttaataatttcaaaataatcttcatctttgatacaaaaataaagatgctaactcctttagttcagtttcccacaataacctttaaaatagcaacagattctgtctggaaaattgcttttcatttctagtggaaaatgaaagtggagaacatggaccagcaatgtttgtgctcgtctctttccggaaattaaacagaaacgcgaagacagaatgcttcagtttaaaaaaagaaaaa

SEQ ID NO: 40109 - DNA, 1000 bp, Bovine  19866881506685
  misc_feature (1)..(1): n is a, c, g, or t
ntggcttatttcactaagtatcatttcctccgagtctctctgtgttgttgcgaatggcagatttccatttttcatggctgattattgttccatcatgtatatttacctcattttcttaatccatccgtgtgttgatggacattaaggatgcttccattcttgactattataaataatgctgctgtgaacattggtatgaattactgtcttcattttctttggatgtgtactctggagtggaattgctggattaaatacagtggctttatttttagtgttttgaggaacttccatgcggtttttttcaggatggttgcaccagttcacatttctgccagcagtgtgccaggggttcccttttctccacatcctcgccagcatgttacttgtggtcatactgagcctttttaataatttaaagtattagaattttcaaaagaaaatggtacaaagatactatgacatatcgctacatgtaacaggattaatattgatataaagctaaatctgttgtttagacatgattgttgaatctggttgttctttatgactttagttcctctggacacagcttatgggacctcactgcttcaaataagtgtaaaacatttgacctttgaagcaaaaaacagtatttcaaatgcaacatccagttctaaatgtctcaaaaaaactcattcaatcctaaatttagtagaccttttctaccttttcttgtacattgataatttacccaatagcaatgaagggttatatggagatattttggaattttgcttaacagattttggtttgcacgtgttacaaaattaaatttagtatagagcacgtctcagaatatatctgaaggagttacagaagtacccatgggagagaattgaaaattggtcttatgttaataattcttcctcataccttagaagtcactcagtgctggcatgtgtgaaaatatccagcacgctttagggcctgttacaagatctctttaaggaaaatacag

SEQ ID NO: 40110 - DNA, 851 bp, Bovine  19866881556474
  misc_feature (1)..(1): n is a, c, g, or t
nacagtgacttccccaagtccacagcaagtcatgagggaaaagattggaactggatcccttccaggtatatgtatacaccagcggacatcagaggtccccagagtcaaggtggaggactaaagcaagagggcagcctagaggctggatgatctttctcttcctcagcttcaaatgagtgaagtgaaggagcaaaggccaatgagaacaggaaggaatgtccttcatcctttgggggtcttcatccctgcctctcctcccactcctgccccacacgccaccctttccttgtgcctgatgtttgaggctggcctggtcctgggctctgggcttccaggctcttcctctgggtccccggagccccctcccccaagcggggccccagctccagacgtggcagggtgagcaggagtgaggtttctccactccctcccaagtgctgtgctggcggctcccgaaataaaaatcaaatgtgggcttggcagagacagcggggtgggagaagcagcagccgacggcgctgggccttcattctttccattgtaacttcacatcctaacctctggcattttaattattctcctgcccgcttgctctccctgggccagagggtgagctcaccctgtcctctagcctgggagggggcggccactgcctggacccccaaacccccaggctgctcccaggaagctgggtggagccaggcttgcggctccctcctgcttctacagtccctgaggaggcggccagcctggcatctaaggttccatgtgtgaatcattaagtcttcacactcgctgctccatttaatggggccactgtcttaagctgaggcactgcggctcaccacacg

SEQ ID NO: 40111 - DNA, 815 bp, Bovine  19866881653319
  misc_feature (1)..(1): n is a, c, g, or t
ntgcatggggtcaaggacaaggagtggaaatgagagcagagatttcagaggagcctggccaaagcagatggaagaccgtgttctgtgtgagcaagggagggctgagagagagtgtggtatgcgctgcgaggggcacagagaatccccagctaggggagcagggggcctctgggtcagtggggcctgattccaggcccagaggagcagggtgtgtggctcctcatcccaagctaccctaagggcattcctcaggcaagaggcagcagaggggcagtcatacctgatgacaacaatgacgccatcaaagatgttgtaggggttcttaatgtagccaaagggaccatatactagcagcttcagcagcatctccagggcaaagaggctggtgaagacgatgttgctgatttccagggcattggtgagctcctcaggctagaagacagagtggaccatgaagtagcagaggcttgtccctgagcccctcatcccagtcctcaaaaacacctggccttcctacacatctgggagcaggaacagcaagccagggggtggggtggaggttgggagagggtggtaggggtgctgaatgctcaggctaatggggaggacgctccccagaagcatccttaagaaaatgcactcaggggtggccagtgcacaaagcccccagcccctggttcttttcagctgagtctcagatcctggggccacaggctcgctggaggcctatgctgtgggttccacccacttcctactgctggtgggcaccagagggtgactgccaaggcctcatacacacagccacacataagtca

SEQ ID NO: 40112 - DNA, 1368 bp, Bovine  19866881655241
  misc_feature (1)..(1): n is a, c, g, or t
ntggaacaaggtgctctacaacggaatggcctccacgtcatcctgggctgccctttacttcatcgccctcatgaccttcggcaactatgtgctcttcaacctgctcgttgccattctggtggagggcttccaaacggaggtaaccccctgcctgcagcagtccacttccaggaggaattggctgcattgctggagtggtggtgtcctgggaggttctgcccgaagtgcccttcagacaaggctgggggattaggactgggaggttctgagtttcgggcagccccttggcactcgagagacagggtggttgttgggggaagtatccctggatccaaggtgagctactgagtgggcttccccaacaaagtcggctagactctaccccagggagctggacaagatgagtgttggcacacggacagctggatccctgagcacaggtgtgcctggggacatctggaaggaacccatctgagttgaggggtgggggaagtttgcatgcaaatcacctgggctttggctgagctggtgaagatggcaccagcacccgggcagaactgagctgccctggctgagaaatgagcccaattagctgcgggcacagcagagatgagcgtcctatttccagcccaggctccatcactttcgtcataggcagcatcgtcaattaatattgatttacattgatcccaccctcgccctgccaggacgcagtccctgcctgaagggctgcgtaccattctgctccctcagctcagccgctcttcctaccggagccccaggcccagcccagcttcctagcacctagcacagggcaggtcgactcaacctagaaatgctccaggttgggtgtggagaagctcttggtccatttctctccgggtgacccggatggaagctcccgctgcggcctggtctataaatatccagcacacggtggaaaaacaaaagtctattttctgactccttcccaggcttgcgagggagggctgttccctgtgggctgggctggatggtaggtgcgggtctgcctctcccacgccggcctcctcccattgaagttccatagttaaccattgttgcatttcctccccacctttggtgatgcctgggcctcttgatgggagggagggacattggtactctcccttggatgggacctttattaaccctctgtggcctaaagggttaaggaggtcagtgtgttccatgagtcaagagactcatggagacccaccgcttggccactgtttttggcctgtgggttggaggagctgagtggggacagtggtccttcagcctcttccaaaccacagctcctgacagctaagattccccgcagaaaaattcctgtggaactctgtggaa

SEQ ID NO: 40113 - DNA, 1437 bp, Bovine  19866881833133
  misc_feature (1)..(1): n is a, c, g, or t
nggcccgcacctggcccttctctccatgctgcccccagccctcttcctgtcccttctcaccttagctcccgcttgctctggtccctgggcagtgctcctcaggccctcttccccaccctcctgtccatccccacctgccttcccccgaatcagggcctctctccactcgcctcctttttttctagggtgaccgtggtgagcctggtccccccggccctgctggcttcgctggcccccctgtgagtaccaagatcctgtttatcctccatccccgactaggacctggggccttgggtgattggatgaggacagaggcgttggccgggtttagaggcaggtggaggggagattgcctcccattgaaagcgtcttcttgcctggagttccggtgccctctaggctgacttcctgggtgagcacagacctctcctccactcaccatgctccgtcctcccccagggtgctgatggccaacctggtgctaaaggcgaacctggtgatgctggtgctaaaggtgacgctggtccccccggccctgctgggcccgctggaccccccggccccattgtgagtatctcactgtttaggcccaagctgccagcaggctggacccgggatcagcccagccttgatgcctctgtgttctcctccagggtaacgttggtgctcccggacccaaaggtgctcgtggcagcgctggtccccctgtgagtacccactctgcctctccactgaagcttcccccaggcagcattcggaggtggggcagctgggccaggtgaggggctgttctccctctgatcgcttctttgtcctcttctccagggtgctactggtttcccaggtgctgctggccgagtcggtccccccggcccctctgtaagtgtccgtgtggagactccactggtctgggaaggtgtgggacataggctgtcaagagtgtggtgggcctgactgaggcctcaggaatgccccagaatctgctggactctgacagtcgcaattctccccatccagggaaatgctggaccccctggccctcctggccctgctggcaaagaaggcagcaaaggcccccgcggtgagactggccccgctgggcgtcccggtgaagtcggtccccctggtccccctggccccgctggtgagaaaggagcccctggtgctgacggacctgctgtaagtgccccctccagaggggtccagagtcggggggcgtcgtccctggccactgggagtcatctcacccccgtctgcccccaccacagggagctcctggcactcctggacctcaaggtattgctggacagcgtggtgtggtcggcctgcctggtcagagaggagaaagaggcttccctggtcttcctggcccctctgtgagtgccccctcaccttggggcaggaccattgcaggacttggagggtgcaggatggggg

SEQ ID NO: 40114 - DNA, 608 bp, Bovine  19866881839068
  misc_feature (1)..(1): n is a, c, g, or t
nagaccgctaacctctcagggactcacagcgcggcggaggagagtagagccttccagccggtggcttgcggacattggttcccagatgcgccaatgccggggctctccagccggacccacagaggtggccgcgcccggaacggcctctccagcggccgcagcaaagcagagggacaaatcccaccgccggccccgcccgtccaatccatcttgctcgggaagcgacgcttctctggaggagcaagcgaaggggaggggaaatccaagcttttggggtctcccgacaggtgtttgggggagagggcggagccggctcaggaaggatgagggagggggcggtgctgcccctttaagaggcggcggccgagccgggaccttttctctttccccggaaggaaagcttagtcctggctgggcgcgcaaggtggggaggtgcggggctgggcgtggggaggcggggcgcgtgcggggggacacccctccttcctgccttccttgcggtggactggtctgcctgctcagatccgccaccgaacccggatcggaggcgactgtgtggccaagtgggcgcggccggtgcaagctgaggggcagggtgccccgggcag

SEQ ID NO: 40115 - DNA, 1181 bp, Bovine  19866881921818
  misc_feature (1)..(1): n is a, c, g, or t
ntgttgctacctctgctgacatccaaatgttacaaggggatcgtggttagacttcagaagaacttcccaatcccaaacaagtgggggattccaggtggccattagaaagggtagcccctctgtgagttgggcattttgaggagacggcttctaaagggtctgggaactgagactgaaatgcagagaagacacagcttgggacatccctgaaactgatcaccagttagggacctgggagttaggcgaagaatgagcgtgagcagaggggcggggaagcgaggtgggcagagatcacattcttccgcaagccatagctcctttaagcagccacatcatctggcccctagccgagcacagacttggctggagttgtgtgcacacacgcgtgggtgggcgcatgcagtgtgtgtctgcatgtgtgttcatacgtgagtgcacaccacccagcctctcgtatggatgcagcagccccctctcagcacccctggcttccttatcaccaggccagcctttagggggctgcctccaggatcccctcaccccagtggccctgttagcacctcctccctcccttgttagcgcctcacagcccctcttcctcctcagcccctgctgtccccagagagaggccggtggcttgcagcccagttctcctcttccgactctgcttcagctgctattttctgaagctttgttctgctttctagccctggaacccctgccctcttcatcctccttcatctacgtggaaaggtcctttcctgaataagccagcctggggtgaggggtgaaagttggtgcccctacaatctagcacacattcctcttccaggctgaggcacaaagcaagctcctcaatcagcctctcctgcctagaggataggaggtggcaagtctgggagggaacctgttttaggtgccaaagctgggtcctggtgccagctgtgccaccctcacctggacacacaaccaccctctttgcagctgtgggatagggagagagttggtaggggagagggatggggtagaagtgtcttctacccgcttctccaggatggctgtgcccagcctcagcctgggctgccgagtgggacagggtggtcctgtgcctggagccaggctgtcagcctgccaggactgcaggtttcctctcctgaagggccccttcctggccagctttg

SEQ ID NO: 40116 - DNA, 1312 bp, Bovine  19866880225533
  misc_feature (1)..(1): n is a, c, g, or t
nctacatggattatcctctacacctttctttacatgttctggcatcttgaccacatagctgttagatttctctggaaacagtgtcagactttattttttgggctccaaaatcattgcagatggtgattgcagccatgaaattaaaagacgtttattccttggcaggaaagttatgaccaagctagaaagcatattcaaaagcagagatattactttgccaacaaaggtccgtctagtcagggctatggtttttccagtggtcatgtatggatgtgagagttggactgtgaagaaagctgaacgccaaagaattgatgcttttgaactgtcgtgttggaaaagactgttgtgagtcccttggcctgcaaggagatccaaccagtccatcctaagggagatcagtcctgggtgttcattggaaggactgatgctgaagctgaaattctaatactttggccacctcatgcgaagagttgactcattggaaaagaccctgatgctgggagggattgggggcaggaggagaaggggacgacagaggatgagagggctggatggcatcaccgactcaatggacatgagtttgggtaaactccaggagttggtggtggacagggaggcctggcatgctgtgattcatgggattgcaaagaatcggacacgactgagcgactgaactgaactgaagctgaagagatgtctctggagcatcctctccgtattccctcctatctccccacagggaagcagcagcctggtggataccacccaggctggactcagaggcaaaatgagctactcagaagctgggtaggaaaactggggataaagagagaagatagctgccttggagacttggctcacccagtccttgtgccttgccctagatgttcagccgacactgcctccactccacagatctctctatggttaaggaacctgggatgtctccagcaacaactccagcccaaatcatcaaatatacctatgacttcacaatgcaggaaatgggccaggccaaatggcttctctcaaacttcgtaaggcgtgacttgcactgaaagatgagaccccattccccaggtgatgacatggtttgggcgtgtccttttctgaactgattcactctttgatgaattattcttggcgggatgattcttccatattgaaatcatcattcaaccagagtctccaaactacatgagccttccttgctggcagtagaatccatccccagacacctggcttggtttgaaagagcactggattggaatgcagaggcctggcttagactctaagccttgattgtaga

SEQ ID NO: 40117 - DNA, 3657 bp, Bovine  19866880345852
  misc_feature (1)..(1): n is a, c, g, or t
ntgaggatgatgagaacaaagaaaaaacgaaccagatgatatacctgtttgggatcaagaattcctgaaagttgaccaagggacactctttgaacttctatcggcagcaaactacttagacatcaaaggttttatttgatgttacccgcaagactgttgctaatatgatcaagggcaaaactcctgaggagattcgaaagacattcaatatcaaaaatgattttactgaagaagaggaagcccaggtacgcaaagagaaccagtggtgtgaggagaagtgaaatttcgtgtctaacgctgtaacactgtaagggttattccaaatactagttgcactgctttgtttataattgttaatattagaaaaagagtcaacaaatgcagcagcaagtcaattgtatcagcagaatgttgtcctcattgcatgtgtagtttcagtacagttcccaaacttaaggcccagtttcttctagtgtgattgaaagtttcttttctttgctctgaataaaattgaactgtgggttccctatagaaagtggcattttgggctttccctttttgtaaagcaatttctgcctagtttattgtccagttaattttagttcagtgacttttaaagttggcgttgtaaataaagcaacttgcaaaaaaccttctgaaatagaatttaacaacgtattatctttattcaactggaaactggataaaggctacttgaggtaaatgctttgagtggggttatcagagtgtctttaatcttcctggaggagtaagtacccctggtattcattagcctgtatgtagcagggcttccttaattgggtctgagggcttatttttgcatttttaaccctctcagctttgaaggctcagttactactcagttagtggtttgggaggagatataataattagtttgctagcttttcagttaaaaaagatagcctatatggtgtgtcatctttttataatcagtgatcccatgtgggggaaactattcatactacttgcatgtagaaaataatttaacctttaatgttaaaatgtgtggcataacccagaaagcatccatcatgaatgcaagatactttcaataaagttacctagtaggtagtaaatggtttgctttttgtgtatttaaatgtttctctttacttaatattgaaagagttaaatttgtgtgtggttgtttagttggaaaagacttggaggcagttcttgtcctagttctctggaggctgcttacataactaaggttctgatagacttctgcctcttctaattgtcattgataccattcaggggaaccactgggctcagttttttactggtgtactccaaactgctctgctctggtttccagcctctcacctacagttgaattaagtttttcttggtagtttgagatagctcacaaatttttaattttctttcttccttgtgctccctgttcttcttactttagaattatctgtattcacatgtagttttaatgtgttcccttcgtgtagctcttgtggctcagatcattactaaacagtagtttgcctttatttcatctcttatttgtctcatatctacctctacaatagtgtgtgtgtgctcagtcatatctgactctttgtgactctatatagcctgccaggctcctccgtccatgggattctccaggcaagaatactgcagtggggtgccatttccttctccagaggaataattgacacaccaaagacaatacctgaccaaaaagcctaaaatatttactctatggcccttcacagaaaaagaatgccaaccctttgattacttctggatccctgattccctttactcaggaattaagctatttttccatttgtgctggttttagtggggaaggtagcagcattcagtctagctagagtatctcatttctatttcccagaagagaaaggtctttctgaatatgtaagattgagtggacagacaatatgattgttcccttcctgactttctgtagaccttgaccacagtctttaaatcatgattaatagagatctaacagctcatctaagaaaacaggcaatttacggacactattaagaggcccttcagttgaagaggcccttcaactggctgcagcacttccctaaccttttccctctttctgctgtatactcattatttcttgaatgtgtctaccagttttccagcctctcatttttatccaaagaaagtgaggggccctttcccacagcataacagcaaacctgtcaacctgtctgccttctcatttccgagttattctgagcaaatactgtagtatgaagtcaagctgtgaggctggagtcctgcctcttaggacctatatggttttggataagttgaaaacagtagctccctgcagtgtaatgctgttggtgagttgttggttaaggatatatgccctctaagaattcttaacctcttttgaagtgctattattagcttgccttcataagtccatctttaatatacaaaatagatattacttagttttgatatttttccaaagattcacagagggtatcccttataaaagttagagatcccagagtggcattatactgtgatttgtttattctacagttgttcctacatacctgctgctggaattaagcaaaatctatattgtaacttgttggaccgcatgatgtcatgctaattcttagtctggaactagctggagaaggatggtggcagtgagtcactgggcatgtgactcagggcatatgaagttttcttggtagtttgagatagctcacaaatttaattttctcctccccttttttttctctaattcatggggaccactaggcatagactcattcttaccccttggacagaatttgccctttccagttaactccattctatacaatcccatactattcttcaacatctctttggacctaggctgggcttttattagtgggactgtccccatctctgttgtacctctccctgctgtactcgttgaatatattcagttatggctcctctgagacccccactgcccattgtggacaagcagaccaatatagagagcctgaggtccatggtaatttgaggtctgaaataggtgattagaatagttgggattggggaggtgacacaacctaggaacctgttctgctttggtgactggctctgtttcaagaacccatgtgtgtgtgagcgtgctcagttttgtctgagtctttgtgaccccatagactgtagccctccaggctcctctgtccaaagggttctctaggcatttgccgtgccctcaggggataggcatcaaaccccagtatcctgcataggcaggcgggttctttaccacttgcaccacctgggaagcccctatggtgaactcttaaagctctctggagacttgacagttacactaaaacagcttttctaacctgacagaaaaggcagtttagcttttttaatataatgaattagtttttggtttcacatcttataggcctggcaagtctgtgttacccttgcccactcttttgtgcagttttttccccctagaattgcatgcaggaactaatagcctttcttttttagaacagtgtagagaaccattctggccttctttagccaggcttactaaacactgaataaggctgggcagcatag

SEQ ID NO: 40118 - DNA, 3238 bp, Bovine  19866880380947
  misc_feature (1)..(1): n is a, c, g, or t
nattctttaccagctgagctaccagtgaagacattattttttagttgactaaactgtgtcctcatactttctccaagaataatttatgtacgtattctctgagttctattaatagcatgttcagtagagattttcatgcagtctttatatttgaactaattttttcagggtatacaatttttgggtcatatctttcctcaaggactttggaagcattaattatttaactgttttgtttttcattgcttagccatttatcactgcttattatttagcttttttccccctctttcttagtgacttaagagttttcaactagctgccccaaagattctttatcttttgaagtcctgtgatattatgagattatctccatgaaattaaaagatgcttactccttggaagaaaagctttgacaaatctagagagcatatttgaacttttgaactgtggtgttggagaagactcttgagagtttcttggactgcaaggagatcaaaccatatcaaatcctaaaagaaatcagtcctgaattttctttggaaggactgatgctgaagctgaagctccaatactttggccacctgatgtgaagaactgactcatgggaaaagaccctgatgctgggaaagattgaaggcagaaagagaagggaatgacagaggatgagatggttgtatggcatcaccgacttcatgcgcatgagtttgagcatgctctaggagttggtgacagacagcaaagcctggtgtgctgcaatccatggggtcatagagagttggacacaactgagcaactgaaataaactgaattgaaagttataggtttttaaacttataatggaaagtctaaatttttaatgcatcccactaataggtactcactaacaatgtgttcctttacatgcttgtatgaggctaagttctgttatgatctccattttatcaggtatgaagatttcaaggtgtagatagattacatttttgcccaagtacacacagctggtaagtagtagacgtaagaattgaagctaggtaatcaagctctagaattgctcccttgaccattctgtcctactgtgtattttttcacatacagtgatcatgcattttatttctcccaaacctgtgtgtgctgtgcttagttgtgtccctttgtgacccatggtctgtagcccacgaggctcccctgtccatgggggttctccaggcaagaatactgcagtaggtagcctatcccttctcgaggggatcttcccaactcaggaattgaaccagggtctcctgcattgcaggcagagtctttaccagcagagctaccagggttccaaaccctatggctcctagaaaatcttctgaactttgcagaaattacttcaaaagggaaaaagaaaggaatccacagaggaaaaagattcagcttcaacatattccttggccattttcatcataagttatacctagaatatgatgcgttctcctgaaatgtgaaactgtgattctagaggagcttcccaggtggcgctagtgataaagaacctccttgccagtgcaggagacctaagagatgtgggttcaatcccagagttgggaagatcccctggaggaggacatggcaacccactccagtattcttacttggagaatcccatggacggaggagcctggcagactaaggttcataggatcacacagagtcgtacatgactaaagtgacttagcatgcacacacatgatcctagagggctataaactgtgaaagctggtgggaactgccaacacagatgccagctccccaggaatccaggcactaaagtcaaggtttatattaagtgatgaatgtcaaccagtgttctgacctaagcatgggcttttgtgaaattcatactccagtgtcttaaaatgcttgatgcatgaaatgcatagttctcttacaattatttttttaaacacatggaccaaagacttaaatacttcctccattttctatgatatctgtaaaaagagggattgaggcagtttgatgtggtgaaattttctcaccattttttctacacctcccctcccctaattctttgtcctagacatagcagagcattatggagggatatgttgggaagcagagggtgaatttcttgacttaatattgaagttggcttgttgcaaggtggaatgcctgtttgtgaactaatctcccatatgtcaaaaagaccaattgtttgttgagagaaagagatggccagagatgtgaaatgaggtcggattccctagagtgcaatggttcacatgccaaaggaaacagatgataaaggatgtaaagatacaagtaacttccttaatgaaagaaatcttaaatcatctaagtgtacattagagagcatttctggctagggtgggtcagcaggtcacaaagtttgttgcttttgctccccaggattctccttctcctgggagctttctgagattacccctggcccacagcactgagctccagggagagaagtgaccactgttttgctgacactctgttcctgaggcaggattagggctgttcccaagaaacactgtgcagagttgaaatgaactttgtaagcagtaggattttaaagaggaagtcaattgagaactcagagcatggttctcaagatggaacttcagcttccctcagcctgcagccaactgcaggtctccttctccctcacccttctcctgaagtgggcactgccttacccttcctcctcctcacaccctgaaagcaccagcaggagtgcttgtcaggatgtccgccctgctcaagggttagactgaatagagcaaggagggttgagatcctgaagttgttctctcctgcctccctctccagaccactccttccctagaggattgactctttatgtgaaaatccattctgaggagacctgccaagacttcatataaaacagatgacaatattacaagaaatacacaaagagcaagagtctttatatatataaatacatatatgtatggggagagtgtatttgtatttttcatgtgagtcagagatgttagaattccctgtcagtttagaatttttcttcccaagactgtagatttggctcccacattaacttcatatgttactctagcaaatctcttcatctctcagaattgaagtgggctcaataagatgtgggagttctatcagtccctctagaagtttcccctgctgggcctcctttccgaaattacagagaaag

SEQ ID NO: 40119 - DNA, 2575 bp, Bovine  19866880408366
  misc_feature (1)..(1): n is a, c, g, or t
ncacagcagtgaagacccagcacagccaaaagtaaataaataaatactttaaaaaagaaagaaaatgtgaaatataatatgaccgacagaactggaaacaattgccatttaaaagataatgcattactcatagttcccaagaggagagggcatggatgccacaggggatcacccggagaaacggtgggtgggcgtgggtgggaggggggtggtcatgaggtggaaggagggggaggaccctgcagcaaaagcctttgttatggtttccccggaaggaatgggtgaggcggggtcagcaggcctagaatgggctattttgggtgatttcctcaggctctggggtcaaggggttgtcccatttgtctggaacctggttctgggtaccagttgccctgagtttgagcctgatgcaggaggaggctggagtgtgggctccgtatttgaaaagcacactcgtgggcaagactctctcttgttgttcagtcgctcagtcgtggccaactctttgcgaccccacggactgcagctcgtcaggcttccctgtccttcactatccctcggagcttgctcagactcacgttcaacaagtcaatgatgccatccaactgtctcatcctctatcgcccccttcccttcctgccctcagtctttcccagcatcaaggtctttgactctctctctaggaactggctatccctgggaggggtggtccctccagggtcaacaaagccccaggtgtcaaagcatcagaacacagaaaataggagacgtgattaatacacttgcctagcaagcagctgtgccgctgcccctctgaatgcacattccttccccatcgagaaagaagtcttggctcacaggctccccttcctagtgtgagggtatctaagaattggttcacctgctcagcctccatcctctcagggactcccctgctggtctagtggctaagactccagctccgaatgcagggtgcctgggttcgatccctggtcagggaactagatccctcatgctgcagctgacgtccctgcgtcacacccaagaccggatgcagttaaaaaaataaataaataaaaaagaaattgcattttgtttcagcagagttgagttcagtttatgccagtctctcttccctatttcaatagctaatgcttaataaaatccatctttacctctttaactagcgtttgactttgttcatctttgacactacccagccagacacggttggtacaggaagtgtccacccttgtggaaagctctactgagcagtgtgtacatcgtggggtgtacgaggtggccttctgaggagaggaacaccagagacaaactgagccttcatctcagaagtcatcctccagagagccccaacagtgaggcagggtagagagaaatgggaccaatgatcaataaaaatgggaaagcatagaaagatatttgagaagaaggaaagggccattctaagttgtaaacgaacaaaccatgaataaaaagtgtaaactttcaaagtctgatcgaggtaacaagtgaacttgagctattgatagtaaattcagcctgataaccatcagctcaggctttaatcaccttggaagaaacccccagatttacgccacccaatccagagttaattgggcaataactcaaagctttgataccaagaaatatctaaaacattttacttttccatttggatctatggagatttaaagttccaacacaacagtggaaaacgaatattgaaatttaaagatgtcaaagaatacagttgtaacccaaggactacaccaaaggaaggtacggagacaaatacatggttgctgttgcatcctaagtcgtgtccaagccttttgcgaccccatgaactgtagcccgtcgggctcccctgtccatgggatttcccaggcatgaatactggagtggatcgccatttcgttttccaggcgctcgtcccgactcagggcctgaacctgcatctgctatattggcaggtctaatacctgccaaaggtattctctggacaccagagaagcccaggaaacaagtataagaaagaatcaataaagtagtttcaatgggatgtctctagaacaagcttaaataaaactgtagtaacaatttttggattcactgggtttctgtatttgctctttgggtatttgaagtgctcaaaaccatcagctgtaatgaatttgtagtttacaggtagggtataattcccatagatcagacacggagtagctctttgatgattccccaagtgaggttgtgacagagctctggtttggtacagagtccaggctctgacctgccccagctcactgttcgctcccccacgctccccgcccacctccaccgtaaatttgtgcaatagcgtcctgaccagtgtttcttctctgaacatttgccctggccaggccacccttcacaccaggccacccttcaacccacgcccaaggttatcttcctgccgcaggaggaatcacatccatgttttctttgaaaagcttcaaaggccaccgcccactctgacagctcataggcatagtcccgagcgtggcctgacctcagt

SEQ ID NO: 40120 - DNA, 1511 bp, Bovine  19866880543037
  misc_feature (1)..(1): n is a, c, g, or t
ncgacaggattccaaagttgctggtcctcattgggccattatgtggaagccattctgggagaacttgctagaacatttccaggcctcagtgtccccattagtaagttagaataagaaaagaaaatctaccttaggagtaataaagactgctcaaacaaggactgtaatgagagtcctgtgagaaggagcaggaggagtgggtgccttgagggccagagtgaacagggagatggaccaaagagatacaggccaggcaaccaccttgggaactggagagaaagttgcttagctccacggcagctgcgcagcctgaattcaccaccatgcggcagcttccggggcttctttaccgttttctctctcaactccaccgctttaaaccctttcccctggtttatcactggaagagcctgaggcttgaaagacagagccctggaggcctcatcactctggtggaaagttactgcagttacagccctgctttcagggtcaacaaaacccgcctcagagagtccttccagtcattattgtggaaaattaaaatgaagccagcgctttacctggaaatcctgattctccttttgttcctttctgtccttgaagtcctaagatcaaaatacagaaaagggaagaagataataaaacttagatattaaacacttttaatcttagacaacctctaccttctgtctgattaatgcagatggaaaggtacattggttctcctcgattgtttaaagccactttagcagagcataaaagtagacagattgcagataaatgggtatgtgtattggggtgaaatagaaacgtggtggatgaaggtctggattaggtgaacagaccccacactcagtaactggccttctttgtccagtaataacctggcttgatatctattccttcttgttgcaaaagaaggaaaagattggaaaaaacattttctgttggaaaagaattgagagatattttgaaaataaagttatttttatttctaaaagactgtggagggcactcagtggccactagaagctctgggagtctctcaccctcagtagatactccgtaagtctattggtttatttcatcgtggcccccactgtagctaaacagttaggcagctaaagggtctcatgtccagaaaatggaaaaataaccactgcaattgtttgggacgatcctatttgtagttttgatgtgaaagttcctccctccctcccttccttctttcctccattcatcactttattcactaacttatgtagaaggcctactattcccagcaccatgatgggtcattacttattgtgggataataacctattggtttagcaactccatgatctctcaatttcaggaaaacaggattgtctaagacagtcatgcaaacttggggaaagtaaagctcattactgatcatgaagtaacagtttcttgagggtaacaatgggattggtacttccaccatgatcttgactgggggtcccttccaacaagccagtcggctttaa

SEQ ID NO: 40121 - DNA, 1147 bp, Bovine  19866880549090
  misc_feature (1)..(1): n is a, c, g, or t
nttgcctgcccggcatctttgttttcctggcttccacccctcagctgtccttcagagagcaccccttcacaaacactgtcagacacgtggcattctggcgttagggctgcatggatagcgacttctgtccctgtggaggaagagagccttctttctcctggggctgccagccagaaggatgtaagctggggccctgagctgtgaaacttttcagttgcttgaaccaatccctttcttttaagacaaccacaatgagtcacttgcaactgatgggtgccaataccctacccaggagagaaagctcacatcaacacctcaaaaaaaaaaaaaaaagactcctggttgaggactgattcactcaccagctcccacattgtagacaggagatccagaggagtaacccagcatgcggcagaagacagtggcatctgaaccatcccagctgtcatcacagattgtcccccatgcaccattatagaaaacttcagctcgacctcggttcctagagccgataatccggactgataatgaggagtcacctggatgacaaaacacatgtgggagaggtgagggaagcagcacagggctttgggcagatgcaggttctgccttttaatttttggaagtcctattgttgttgttcagtcactaagtcgtgtatgactctttgcgacccatggactgcagtatgccaggcttggaagtcctacagttagggaaagaagtcttctgcttggctgtcatcatagcagtaagatccctcgttatggcaccagaactaccagcagcctctgggcactgaggcttgtaggcatgaggccatacaaggaggtgcctctgcagctggccttgcaaatctagcctgccatgttttgcttgcattgtggagaaaaaaaagggaggaggaagaagggaggaagagagagggaattggggggtggggaacaagcgaggaaagaagggagagagagaaactgttacctgtggctctggacacgggcaggcttattcaagggacagccttttagctttccccccaaacgaagaatctctctgaaaaacaaggcctctcccccagaacacatacaactttcaagtacagagtagcctctatagcatacgttaaacagaacagaaatagcaatta

SEQ ID NO: 40122 - DNA, 1448 bp, Bovine  19866880562237
  misc_feature (1)..(1): n is a, c, g, or t
ncgaaccaagggctgcaagtttgtttgacattcacagaaggaaaaggacagtgaacccagtgtagactttgtggttccttaaagtgagtggtgaggctgccagtgctggtagaaattgataaaaatgtatcctgaagcatctctactagtttgaatcacatgctgctgctgctgctaagtcgcttcagtcgtgtctgactctgtgcgaccccacagactgccgcctaccaggctcctccgtccatgggattttccaggcaacagtactggagtggggtgctgttgccttctcctttgaatcacatgaaattgcccctattccaccatctctgacctataaaatgatgatttctataagcaagacaaggcctttctgaactagaggatgaagtaaattagagaacatctgtttggggtttttgcaaagtattttctttgaagaagtttctgaggctcaaaaactacgtgaaaaattccagaataggagatctctatggtcttttttaagttgaaaatattgtattttccttccctactcctcctgactcacattccctggtggcccatccaccattcatatctgtctagaagaggatctccaggtcccactggccttcctggaaacgagggtccttccacctgctcagtgcccagagctcaacaaccagttccgtgactttagctttaatccttgcctcaggttacctgcaatccacattctcttggacatctggaccaaaccatgtctttttataaactatgttcaggccacaactttggcctaaagcaaaacttcacagtcaagtgaagctgtcatagactgttcaaatatgactccatggaaagccaaccccattttggctagtgttcacctgactacttgcagggagggcagataaggacagatatggacagattcatggtggtgggggctccctaaggattgctgcacagtcatgggtcagctggggctcaatgtaccatgcgagtgatagcctcagaagctggaggttggatggcattctatgcaagatgggaggacttagaaatcattgtcatcatcattgttgtttgttgttgttgttattgttatgaccacaatcaaatcttggagaagggaaatttgagactgtacatctgtatcttgaaggaggaaatagaaaaggcttgggtctgagcaagatgtaaggagggaccagaggaaaggcccctaggcggaaattatccaaggatgcatcatcaagtgagcaatgtgttggtttctcaaggagtttccatagtaatcaagtccaaaggctgtgaaagcagcacctgccaccagcctcaacatgaagaatctactgaaagagggaaataaggagggaacacagaggtcaggatgacctactgaccaggataggcctaggtagaggaacggtgaagaagacagagagtctcaaagagaatga

SEQ ID NO: 40123 - DNA, 2407 bp, Bovine  19866880619347
  misc_feature (1)..(1): n is a, c, g, or t
ncatccatcttttacagcagaagtctttaatcagggccagtgattacagggataatgtcaagataaaaatcgtatgcatgctagcatttaaaaaaattctctgccctaagtcactaatggtagcttagattattagcacagagatcatcctcaaggcctaatgggccctggctggttcctctcttggcaggccttgggcactgggctcacctttgtaatttcacctttggcttggagtctgtgtctccacaggcacctcgatttgaaagcaatcagctgacttcatccttagaagtgagtgttaccaaaagatcacgtgactgttattttcaaagtaactagttagttaactgaagtcagaagttgcagcaaagtgggttgagtgtgtagctgccattttgcttacaaaatgctttcccattgtggcattcatgtgttttgtgaacgtttgttgagaacttattatctagaggctctgtactcagtactgaaatgcatacaaaacacaagatacaatccaagcctaatgaagcttatggtgcaagcactcattcatcatttgttcctacacgcagcacacattacagggtgtctcagtgtgtctgtcgtgaaggcgttgatccaggtgcggggctgcaacacagcacatttccttctctcaggttgtttgcattttggaaagagatgttgggaactagactttgtcaggtattgatgacaacaaaggataataaaactggggatatgggcatttttaaacaaatgattgtatttcttaccttctttgggtgagattagtaaacccattctaagatgcaaacaaggttcaggatgcacataatggctatgtcctgcagggagccatccagagagaggtacgtttggccccagggctgcgccattctggccctcacctcaatgtgccggtaccttgcctttcaggacaccctgctgctttctctttggggttctacctgaatggctagatgttccttttatgcatgtgtgcatggtcagttgtgtccaactctttgcaacccaaccatgctcttctgtccatggaattttccagtgagaatactggagaaatgagttgctatttactcctccagaggatcttcctgaaccagggatcaaaccaacgtctcctgcatttcctgttttggcggcagattctttaccactgagccacctggaaagctcctcccttaatgcaatctcctgttaaaaactatctcccacctccagcccttcgcccagactttgactttctttcagatgattttatttgtttttgtttttttttcagaaagaattcttacaactgtcacttatgcttttaattttaataccctcccttcactcccaggagggaaaccagcaacagaataaagccccaaagaaccagcactgatgagctgggaaagacctgtgagtcctgcaataagcctcaggggtctaggactgccgcttgctgcccttgggatttgtttccatccctcccttctttccttttccagaatctcccatatctataaagtcatgaacactagcacccccagccacttgccaggattgtagtgaaggtcacctaagaaagcagctacagaagtccttcatgaactcgccccttggacaaaaacccaaaagaataaaatagatcactgagtgttgtggagagagcacccactctggagttagggggcctgggtgggaccctagcacaccaactactgaattcggctcaagcatttagtctgccaaacctgtttgctcctgtcactatagagcctgcagtgatggagggccacctggctgagggacagagcagcaatatctccatcataaggcagaaaattgaatgaaatggtgatgtaatagtctcactctgtgttcatattttctaaaccccaggcattcatgagcaccttcataacatttgtcacatcagcgctctaaatgtcttcatttacatttgtacttcagccatggctaaataaaagctataagatcacaggttttatttcatgaatgtcttacaattagaacaaatatgtaatcatttaatatattatattatatattataataaaatgtataatattatatattatataataaatataaattcctgagattcttgtaagcaaccccagtgccatgtgaatgtttatcaggtgaatgcattgtaggtcctctttctgatcttttcatgggctttaatcatcagcacattttcatggagtttcaaagtctgatactttcctttcacaaatgtcatctcatttgatccttaagatattcacagctgagaacaaggctaaaattattgtctccactttatggcagaaagggcttggcgagaggaaataatttgcacggagtcatgcagcttattagatgggag

SEQ ID NO: 40124 - DNA, 5245 bp, Bovine  19866880620047
  misc_feature (1)..(1): n is a, c, g, or t
nacctagaatttccacctctactgtgctgtttctacagctccacactttcactcttgctgctctttccatctagaatgcccccgcccttctactttccctggctgcactttgttggttcctagtgccttggtacagttagctccttcccctcacccccaggagccttccagaaccccagactgggctgagcacccctcctgagatcctctagaatgccttttgcacaccatagtgatggcactgaccataatctattctagttattacttatgcacctgtctccccactggactagggtgccttggagccagagatcatgcactattcatatctacttttccctgacctggcacatggccaagcataggctaagtactcaagatacattgatgaaactcagcaaaataccacacagacctctggttcaactgtttccttctctagcattttatttgtctgggctggccgttctgggaggctcttccctctacatggcacaggtgaaaccagggcttgtttctctggtttcaagagatgacctggctctgcttgtgaccttgggtgagtcacctctcatgaccctccctttctcatatgtaaaatgaagctaatactctctgcccaattctgacagcactgacagaggagaagaaaataggtctgtaaagcttcagggcagagagtctatgcatatgtaacatgcactccctgttccacatgggccaggagagaatggagtgtgtctgaattcaagtctaggcaccgtgaggaggaagtctcttggttctggagttcagagggaacaaagtcaaataaaatctgaaaccaaagactcagcccaatggatcccaccctaacttcccccagttctcttgaccaagggggtgggggaatgcccctaattttatcttctgaatctggctggaagcaaagagggctgaggaaggaggagcaggagaaggagagctgataatccactgctgagtaactgagatgaggctgcatgtaaatttaactttctgctggcagactacaataataccatcctttggaatgtccttggagcctccaattgctatcttttggtttcgattaaaccttgagacagcttgccaagtttgaaacccacccaaccctcatgcagtatatgttttgagctcaacttgaactttatgaggtgcaagttaatttgcatttggcaaaatgcaatttcctgtttctaagaaaaagggactttaaagatttatttaagagacacaaatggcttcctggacatcaaatagctcttacaaagcaatattttaataagttaagtgtaaatgaattgaaaacacatgaatctgatttcccttgaactgcagatgggtttaacaaatagagggggaaatggcttggcacaggggctttcggggttttctccatccaaaaagtttaggaaagtagatcaagatgttaggcaaacccctccacacactaggattcccaagctcagactgtgtatctccaggacactcactccacaaacaaagggagggttccaagtcgattccactaggcaagccccgcttacccactctgctttctgcctctgccctgtcaaatcatcttccctcctgcatctttttcctcccttgctcagaagtgctgaggctatggtttcctcccaccctccccaaattctcctgcatgggttccagtgcagagacaatacagccactggtgctcaggtgggggtccctggcgctgcctatcccttctctccagcctcagctgcttgcctctagagagctcactccagtccagagaaccatggaaacctccccagtcattgtcctccaagtcaccagagctctctcctctgattccatcactctgtaagatgaaacccaccactggacttcaggtggacaccaaggatacaaccccttcttttctaatgaatgagcatatttactaggggatggataggttgtttggggacacagttatgctatgcaggctggaatggcaactgcatatcagtggatgaaggtagaatctagccttccagggagcagggaaagccagtctggagttatgggaaaaggcagtggtcctcagatagataaccagatgataggaacaggccttaagtcagggactcaggatttaggaattaagctctctctcttggcccagatgctgaggtgccacagggtcttgtgcacactcctggatggtgggcagacatctctagctgcttgttgttcagtcgctcagtcgtgtccaactctttataaccccgtggactgcagcaccctatgctcccctgtcctttactatctcccagagtttgttcaaactcatgtccattgagtcgatgatgctgtccaaccatctcatcctctgtcatccccttctcctcctgcccttaatccttcccagcatcagggtctttcccagtgagttggctctttatatcagggcccaaagtattgaagcttcagcttcagtatcagtctttccaatgaacattcaaggttgattttctttaggattgactgctttgatctccttgcagtccaagggactttaaagagtcttctccagaaccacagttcaaaggtatcaattcttcagcattcagtcttcatctctagagttgatcacaatttgcagaagagtggtatgttcaggtgaactcagagcgagcaccaaagaaagagcaagtcagtctccacatgtcatcccacagcttggatgagaaaagctggtactttcaaacaagtctgctctacatgatggggatggcaaagggggaataatcatacacataaccatgcacctaataaaagtgctccccaaagtcttcaagagcccagaaaaagggagttagctttgactaagagttagagcatctgcactgaatgtggtgaggtttgtttttattaaaggtggtacttcctcatggagggtggggacatttcttaaggataatagaagaggccattgctccatttacttcttcagcaatatttccctggttgtcagtcactgtaggattgtgccaggccctgcttgtaagatgctggaatgctatgggttcaaaaaagagtaaaacacagtcaccaccccagagagggcttcaccagtggctcagatggtaaagtatctgcctgcaatgcaggcgccacgggttcaatacctaggtagggaagatcccctggaggagtgcatggcaatccactccagtattcttgcctggagaatcctatggatataggatcctgatgggctacagaaccatagggtcacaaagagtcagacatgactgaagtgactcagtatgcacactcgtggccaccccggaggagctgataggatgctcaggcacattcaggagctgagcacctacagagcacgagcagagcctctggatccaaatgggtgggaaccacagcaaaggaataaacaagggggaggtcatggggagctgagatcagaagtgttggcatcccctaaagaaggcaggacacagcttgggccttgaaagaagctgacatttagactcctcatttttccctcctttcctaatttatcacctccctctctggccttgttggatttataagtgaaattcattacccaagttatgtaacagtgaaattaccccaaagtgctgacagctgtgtggtatagaaggggaagggagttcacatactcaggtctctgtttcaatagcatcactgacaccagctatgctaccatggcaatgcctctgtgcttcggtttcctaatctgtgaaattagtctaatcatgagtctgatcatatatttaatagaggtattagacaagcaaatataagtgtccctgtaaaggccttggacgagagataaccaacccataaagtgtctctgtaaaggccttggatgagagataaccaatccataaaaccacagtggatcatgtgaaatctaagcttcaacaaactagctgtgcattaccctgctgccccacccagcccccccacctcacacacacaaccacacaccttacaaacacaagtacatctctgtattagttttctattatccataacaagttagcacaaatttgatgacttaaaatatcccccatttattagtggacagtcccatgggtcagatctggcctaccctggctatcacaaggctgggtctatcacaaggctgaaatcaagatgccagtggaatgagttcttatctgagactctggactattttctgggcttattcaggtcattggcagaactcagttcactgtagttgtgagcctggagtctgtgtttccttgctggctgtcagctgttcttagctccagaagccactccctgccccctacattctctgtcttcaagccaacaatggagcgcttcacctgagtcaaacctcctgcgctctgaatctctaagtctccctgtgtctgacctctagactcaaatttaaagggtcatctgactaggtcaggccccaccagataacctccatattttaaggtcaactgatttgggatcttaattatatttgcagaatctccttatagcaggagctagattagtgcttagttgaatacttaggagaagttgtgtatattccaggggtcaggaatcttgcagcccatttagaattctacttgccacactccccccagaaaagtagaaaaaaaaaaaaaaaaacagaagagacaggaaaaggaaagaaggaaggaagaaggtgtaacaccctactaatctaacttaaggattttaaaaacattctcacctcctgactttagtctagccaaagtcaaactaaggaattaatctgaaatgtagtggggaaagccacacacatgaagctattcaaatacatatatatatatgtacatatatatataaatacatgtgtatctatatatatacacacacacatctatctgtataaatagctagcatatagattgatataaataggatgagaagggaatatagcacaatgctaatagagattagcattatctcagagtagttaaaaaacaggtgatttttattggtattgattttttaattatagtaaaatatgcaaagcataaaattcaccatttcaatcatttttaagtgttctttggcatgaagtccaatttgcattgttgtgtagccatatctatgattcatctccagaaattttttatcttcccaaactaaaactgctgctgatgctgatgctaagtcacttcagtcgtgtccg

SEQ ID NO: 40125 - DNA, 2936 bp, Bovine  19866880709023
  misc_feature (1)..(1): n is a, c, g, or t
naaaagattaaacaaaagaccccaatgaaaggggactgcagactgggatttcaattaaaagtctaattgcagactgaaccatcaggagataccaatgtggaatctggagtcttaaccaagggctgggattctaatcatttggggaattactgactgaaccaaggactaggggcatgggttctgggtggaactgtctcctagcttaagctaagctgccctggactggaaagccaattagatcaggagctcaacgcaaagatagcagagctcaaaactgagaggagcttactgacagctcttggagatggtgaggaagacagagaactcaaagggttcatgggaatcaggatctgtgtttctcatcatccctgaagccatcagaaatttccttcaaatcccaccgctgccaccaatattgttaaaacaaaattcaactgagtgaatttaaaatcttgttgactttagtcaatgatttatgaatggggcagcatccaatttagcagacagaaaggagctccaaggaactgtacaaaataaaagatttttataggcagaagggtgaaggacaagaaagttatattagcaaaaagtggattggttgtggcaaggtcaccttcctctatgggacacagggcctattagacagattacctcactagtgctgcccaggtaattcctgattgactggtttaagattccattcttgggagaagctgaaactgtaattaagttaagtattcagtcttggtttaatgatatggggcatagcaaaagtgactccatttggagccttttgtctatttattaacagtactgatcaatttctgctaatccaaattatatctgctagtactttagtgtgtgttatgtgtgtgtgttttgcagctgttttgaggttgttggaatcagtatacagtagacagggaaagtattacaattatgtaatttgtgtatagaaaggataacattttccgaactaccaggaagaaatatatagccatccctttgaggtttactttactttcagagaaaatttgaagctaacaaatgtaaataggctgtgctcacttctcatcacaagttactaatctgaaacataagaaatcaataagatactatttattctttccttttggtaccaggaacatcttacagagaatttgggtaaattgtgctctctcaaagaaaatcaagaagaaattgaatgattagttaatgtttattaataacctattctgagctgtgttgcaaagtattcaaagtaagtataaattatagaccatgccctcagtgggcttaaaactcattgagaatacatatagaaacagcaaagtatgataccaatgtgaagcttttgataactactaaagaaatggtatggacaagagtttggtacattttttgtaaagaacagatagtaattatattaggcttgcattttatatggctcaactcaattattcaagttcgctcttatggagagaaagcaactgtagataattataaataaatggccgtggctgtgttccaataaaattgtatctaccaaaatagatggcaggctgaatttggaaggaggatgccttgttgacttctggtatagacactaagtagtaagggtattcagagaactgagagggtttaacagtgcgtagaaagagaagtctgtgcagtaggaggagattgaagactaggaattaggtagagaggtggtattcttggtgggaacacagtgtaaacaaaagccatgtgtaataaaaaggttttgttttagggtgagtgggagtaaaaatagagcttctctatgaaagcaccccaagagagaagggcattttcactctggtgtgtaactgctgagagattaaatgcacaatttaggccctgggatgcatattactaaagccatggtgtccagtttagttcattttgctcttccacccagcagtaattctaacctatctctttctgcagaattggcatttcaggccccagggtggggggttgtcagcccacgggaagaatgaaatttgttgtatgagtagatgggatagttccttggtgatgttttctcaatgtggtagagagttgcatggcaatctgaggaactgaggtagttagttctgaatgtctgtgtctctgacgacacaagctcccagaggctcagatggtaaagaatccacctgcaaagcaggagacacaggtttgatccctgggttgggatgattccttggagaaggaaatggcaacccactccagtattctccagtattcttgcttggagaattccatggatagaggagcctggggagctacagtccacggggttggaaagagtaggacatgactgagcaattaacactttcacattttatatgtcaaagggtggtttttcttcaagtgtattaatcagaccactagtctggctggatgatttcagaaaaagagggttctgtggtaaaaactgtgcttccttttagagattgactaggtccactggtaaattaaagtgtatgagaagaactgttgcaaagcatctatttaacttgtaaaaaccatcaatttgccaaacatttgactacagaaacttttctcatggagcatctatgaacatctcatgaaactcattttggaaagtgctttagggaaacaaatgtggaaataaatattgctaacagttactagtagaggcttcaagttaacaagaaagacaaagtgggtgatgagaaagagagaaaattttaaaaactcagatgactcttgagagatgtaagtatggggtagaatttagccttcttatttatttgtaataatacccatttgaactcttcccagtgcttcccaggtggtgctttggtgaagaattcacctgccaagcaggagacttgggttcaatccctaggtcagaaagatcgcctgtagtaggaaagagcaaccca

SEQ ID NO: 40126 - DNA, 2328 bp, Bovine  19866880727680
  misc_feature (1)..(1): n is a, c, g, or t
ncattagataaagttgcattcctacagggcaaaggtgtggtgggctataacaagaaaaagaattaactcaagggtccaaggttacaaatattaaagctactatttacattcctatacaccaattatatcaatcaatacactgccagggacacagtaggtaagggatatggagacttggcagcaaacattggctcaaaaagtgaaaaaccctttaccaatacaatttctaatcaatcttttaactgctcaaaggaatctgtatttagacagtttagaacatctcatgcttctcacagttgggaggctctgagcaatcacatgtggccagaaaaacctattcaggcaggctagaggacttccaaaggagtttgtaggttgaaacactatcacaaccaggaactttattaattggagctgtaagttaactcttttttcagagagaggtggtgggggggacagccccccgtaaagtcagagatgtaggtgagagcacaaagcagtaaagtaggcagactctggttttgggggtagatgcttaagaatttccagggggactcctgaggcttgatcctgcctttgcgtatgtcgagcctccttcctcatgacctttgccacggggtggaggtcctcatgccggctcccagcatcaaggtatacgtaaagagtatgaattttactgtatgttaaatattcctccaagcctgactttagaaaagttacttttcagctctacaaagtaactattatgcatctagactattaaattgcacaatttttctatattaaacatcctcgatgaaacagggaatgaatggtttaggggcagattgagaaagaaggctttcttcttgtttatttgtgtgtgtgtgtgtgttttgtttctgagtttctttcaggatgaaggaacttgttgctgttgtttagttgttaagtcatgtccaactctttgtgaccccatggactgtaacattccaggctcctctgtcctccactgtctcccagagtgtactcagattcatgtccatcgagttggtggtgttatctaaccatgtcatcctctgccacctctttctccttttgccttcaatctttcccagcataagagtcctttccagtgagtcagctctttgcatcaggtggccaaaatattggagcttcagcttcagcatcagtccttccaatgagtattcagagctgatttcatttaggattgactggtttgattttcttgcagtctaagggattctaaggagtcttctccagcaatgtaagtctttggaaaacatcaattctttgacgctcagtctcctttgtggtccaactgtcacatccatacatgtctataggaaaaaccatagctttgactatacatatctttgttggcaaaatcatgcctctgatttttaatacactgtctagatttgtcatagctttccttccaagaagcaagcgtcttctaatttcaccatctgcagtgattttggagcccaagaaaagaatatctgtcactgctttcactttttcccctcctatttgtcatgaagtgatgggcatacttgcagttttacaaagtaatgagataagtcaacaggtttcctgtttgcttgaaacctttaatttccttgaaaccacgtatagacgatagtttacttccaaagtcagccaagctcttcagagttggaatcttgcctttcttttgtcctctcaaggcaattatcacagtcttgatacttaataatatttataatttatgttgacaacataagagagccttcatttttctttttcaatgctagtctttcttctttaagtaaaatccaagctttaacctttccacttaaatgcatcttgaaatattataaacatttttagatgttattatcaaagctactcacatcctggagtaagaacctggaaataaggattaccacttctggaaaaatataccaaatgatctctgccaattctctaaatttctctgggctcaagttttcacatgtatgaaacagaaaaatcgtccttaatagagactgaagtataggagcattagcagcacaccttttaatcttctgtatgttaccatacagagcctcatctccagcgctgcccacgcagatgctcaggaaatgcttgctaactgaagatttttatggatcactggtagaaagacacataaatgcaaaacacgaattttcccttgccccgagttacccaggagcatcattctcattcagagatgaccacacttccgaaagtgggtctcataaaacatacaatttaatgaagccatctgggaagatgatcgttgtataaatgcaaggtattgat

SEQ ID NO: 40127 - DNA, 1430 bp, Bovine  19866880730036
  misc_feature (1)..(1): n is a, c, g, or t
nttttctaggggctgaagaaatcttttttaaaaagcttggaatagagaatgactagatctgaagtggtaaactgatttcttcttgtgcacaacactggttgcttagaagtggctgagatgaatgttgaggttccacctgagctcattgggagtgtcatgattgattagcaatgtctgccagtggcactgtatgggagactgcaggcctcatttattgaatgcccattgcttgctaactggtgtccacagcatatattaatgaattaaaagcttgttctatattctgtctttagtggtgttccaggaaaaattaaagactaagatattctgtaagtatagagtcatataaccatgggattcatttaaaattatgctaattggagacaaaatcttcgagataagttaatatatccagtcccctaactaccgatgatatttaaccacaccaacaggaatacgcagcctcagagacatgaagccaaccacggccccatgagttttgaccaagcctaagtatttttgccaaaagaaatttctgagacttattgaatgctcaaatcttaaggcagcccttcgagatttttgccactgaagattatgtttgcaaaccaatcagcaaaatgcagaatgagattattctgttgctggtttggataaagaaaagcacattctttactgtgtagatgaaagttgagtggggtgtttcccatctgaattctctggatcctataattaaggatacctgggagtttcagaatattagacataagcaaacagttgcaaacattttatgaagtagtggcagtggggggcggggatcccacatttttccaattatttagcaaggcatagctcttggcctctttatatgagcaagataaacaaagaagtcactctttgctcttttatatcattagagcaaatgtcgataaggacatgttctccagtgccaacatagtggctaatgtttagttccaaaaggatcaaggtggaagcaacctctcccaaaggtaaaccttctcctttgtgaatttgctttaaggaagactgtagaccaaaactcctttttgttgtcattattaaataagtctctaaacataaatattgatgctttcaaactgtggttctggagaagactcttgagagtcccttggactaccaggagatcaatccagtcaatcctaaaggaaatcaaccctggatgttcattggaaggactgatgctgaagctgaagctccaatactgtggccacctgatatgaagagctgactcattggaaaataccctgatgcagggaaatattgagggcaggaggaaaatggggcaacaagcgatcagatggctggatagcataatcaactcaatggacatgagtttgagcaaactccaggagatagtgaaggatagggaggcctggtgtgctgctgtg

SEQ ID NO: 40128 - DNA, 1934 bp, Bovine  19866880752989
  misc_feature (1)..(1): n is a, c, g, or t
ngatgagtccctaatacaatgactgatgtctttataaaaagaacaccatttgaagagaaacacagggtagaaagggacatgaagacagaggcagagattggagtcatgcacctgcagctaaggaagccaaagtctgccagcaaaccaccagaagataggaagaggcaaggaggccttcttctctggggtcttcagagggagcacagctatgccagcaccttgatttttaacttgggtttccaaagtggtgtgacatttaagtgtctatttttcaagtcacctagtgtgtggtactttattacagcagccctagtgaaccaatggaaccccccaccaagcaacacagaggacttttcttaccaaggcctgcccccatgtttgttcattccattcttctgtcttttctttgcctggctcctctgtaaggctcagagccagacttgcagctgccatacaaagaccacagtaggagcaacaatgtgtgggttgtttgatcaatctgaattgaatgggaacatagtcacagagatttacatgttgctgtcccaggtatgtcctaggtataggagaagctggtgggtgagatcctttatgagagctggcctctcttcatcctccatctcactgcacaggtgctcccctccagaggctctgctgacacaactcttctactccccacttggacttgccctagtaagtcagttcttcacttgaccagtccagttagccctgaagaccatgggctccaagtcatgatgagcatgcaccttgtcatctgagcagatggtcgcagagctgagggtcctctcgaacccccccaacttgtcatcctactattggagaaaatgtgtttcttcttctactcttttgtgtgtatattttccttctgaacaaaaataacaaaccagttgccccataattagattggattacagaataattacaaccttgtttgctctcggcagattacatggtaattatacttggcattaccatgaagaaccaagaaattccaacgatgtcattacatggttatttgtacagtacaatgcagcagtgtaattatacatgcaacatttgttttccaataggagagtgattaaaacaatgctaatgcttcaaagtgttgactaggcgccaacatgatatgacatttataacgtggggggagtctgtttcttaattttttcttgaacacagcaaggtttaccttcctctaaactccccagcaacctcagtgggctgtgctgtggtcaagaaggtttaagtgactatatgaaatgctctctgctctcacagttcatgtgtgcgcacagcagccaggggactgtgaacccagtaaaacccagaggtagccagccatttatccctcagcaagagacctgcttagtcatttttcactgttctgtgaggctgcctttcttaaagccttgatatgagagagaccatgggatgtgcgtgtgaagagaacatggtgtcagacaccagcattctgtttagaaactaccatcaacactgcataactttgcctaagctgttcctcacactaagcttctttggtggctcagatggtaaagaatctgcctgcaatgcaggatacctgggttcaatccccggatcaggaagatcccctggagaagggaatggctacccactccagtattcttgcctggagaatcctatggacagaggagtttggtgggctacagttcatgggattgcaaagagtaggacacaactgagtgactaacatacttcatcttcaaaaccagggtattgaaggtgacctctaagagtccctgtgggcctaggaatgtattgacaaaaggtggcttgtagcacttcttatttaagttttcatatattttgggattgtcaatgataatgacctcggcttgggaagggacttcggctttttttttttttttttttta

SEQ ID NO: 40129 - DNA, 759 bp, Bovine  19866880786228
  misc_feature (1)..(1): n is a, c, g, or t
nttgggtggaatccttagaatagataaaattcctcccagctggattctggagaccaattggccagacttcactttttgggtcctatgaccattctcaaaatggcagaagccaggtcaaggagtgggcccagacatgaaaatcactgggagtaggactttgagtgatctagctagaaatttaaatgggctgtttccagtctctgcagagaataatgggaatggagacgctctttacataaacaattcagacccaatccttgccaaaatgagtaacaaaggcctccatgatgaaatggtatcatctgactccatcagtctcatttgatagtaacctaataactctttttttttttttaacactcttcctggtttcttttttttaaagaagaaaatggaaaaagaaacagaaaaaaaataaagtttaaatgtaagtgagcatggtggcttgaaattgggtgaaaagttttattttttatatctttaaaatcagtagcactgtttatttcctctggataaaactgatagaaatgaaatgaaactgaatcaataattagaaagaaattatacaacactggatagacgtatggcctggttctgctttcttaatgatgtcagtttcctaaagacagggatgtgattggtgaaagatccttctttgggtcttgtgagtagatgccacagtgggttgggatggggaggggagaaactggagaggacttgagttttccccaaatgtaattgataggtgcaactttcaaa

SEQ ID NO: 40130 - DNA, 1473 bp, Bovine  19866880806438
  misc_feature (1)..(1): n is a, c, g, or t
ngctagaatccatggggtcataaagagtcagacatgactgagccaatgaaacaacaaccaattctatgagatttccttccgctcaaaacatgatatgtctattcttgcttaataccgtactgtcttgattaccatagctttataggaaaacttgaaatcaagtgctctaatttcattcttctttccaaaagctgtttggctagcacacatactttgctgttccacacgtaaattttagaatcagctagtcaatttctccaaaaataagtaaataaataaagcctgctgccattttgaatgggattatatggactcttgcttaaaatatctagagttcattttatttcctgttctctatccaggctaacaaagagtctcccctggcccttgcttctggacttccccctccattcagttcacctgggatccctattcaagctaatgacaaagacaagaaccctttagcctctccccaagtcctgagccactggcttcgatgggcagctgttgaaatgcacctctccagttatccttggtgatgtatgtctccttccccatccccctctcccattggctgacactccatttttcttccctcacccagcactctccctctcccagcactctccctctcccaagccccttctgccacctatcaccttagcttagagttaaaagacctttaacctatgcagatttatttttgcacaaggaagtacagctctatccatggccctcatttccctctccctccacccacccaccatactgccaacccaattccctgccccagtgcacaaagcttacaaacactccccgcagtcctagagaaagagatggccaaatccctcctcttctagcttccaaattgcaggcttctgcagatgggaaaatataaggtgtgaggccctagaaagttcataaacttttatgcagattggttttagtctggtttaaattaggcaacaaaatagaatttccagatgttctatttggaattaacttggctacagagaaaaggctactagaaggaggagttggtaatggggttatttttacattccagaaagggagtcacaaacagcatatggacttgattagaagaaaagaacctgctggttggcacattaagaagactgttctcatttattctggttgaggacatgcaaaggtgcaacgaaacattctcaagtcactgggaagataaagggcctgggcaatggtgttttgtcccagcagtcagctaaaagcagaaaggattttgggcagacgtaaaggaattctttgactataagtctgatcttctcaaactttaatgtgtgtttaatgaatccagaatggatcttattaaatgcagactgcaatgggtagatgatgccatagcttctggtccataagccatgtgttatagagcaaggcattagggtgttaaaatggagctaggaaagaatattccacttacatcgagtgttt

SEQ ID NO: 40131 - DNA, 1894 bp, Bovine  19866880833186
  misc_feature (1)..(1): n is a, c, g, or t
nccctatcccaaatccactctgttagaaagcttcccaaggcttctgtgctcccttcagtacttttctcatcataatgacccagggtcagtactggaacatcaattagtgtgtctaatagaaccacttgaacaatcttctttatcttggatcccttgaatctcaatgccctttttacttcatgcttttctgaagttggtttttccctcagccctcagacttgacaggttgggttttaaaacaaatatttggtgtagcctttgctctgcttctttgctaactcatctgctctaacttggaagccaatttcctaactgtcttggattcctctggatgtctcatgagcttaactcctgccatagagggagatggatgcaactaggttgcgtaaaaaaatttcccctgtatgatcaacaatccctatcttcaagtgcttttgtgttcttcctccagcctcttaaggcctttcacctttttcatttctaccagctttgtgtcagactgtcactgcttcataagtacctgatgttagctagctgttccctttctgctgtgagctgtaacatcaaatcaccaagcatgttagaactgtgtaaaaactaagaatgagtaagcactaaatgaaggcttgtaggtggccttcctaagagtaaagtgcatgcattttgtctctatgcttccaggcctgactccctgtatctgatcataatctgcatagctgatgtgatacaaagccttgttttctatttctaagcattagttaaggcattgtcacaatacattttatttatattcctctaatctccacataatggagaaatatagcctcatcactggaagggacacagatcatctattcaaaaccaaagcatgtgacagatgaagaagcagaagctgcaggtgaggataaatggtttgctgaagatctcactatttatgtagatcctggattctgttttacatctcccccaattcccaactgaatgtcttttatccatcaccagtggtttagtcattaattcatgcattacatatttgcagcagaagccaaatatgttcagttacaatggattcacaaggatctgttcagactgtgattatctgtggggagaatctgaaacatctcaaaagaagtctaggactttggtggtagggtatctgaaagccaacgcccatgcaatctgtattatataatcctatacaatgttaggcaaaccaagaattatattctccatgttttggagatggtaaaactgaatccaacgaggtaaagtgattggtgcaaagtttagggcctgcacagagactggaatctgagattctgactcctggcccctctgcttcccatacatcctgtgctcctctccccagagaatcaacagctcttggagaggaattttgattccttgagaaagggcaagcttgtggaagtgctggactggaaatgacaggatctctggaagagcctttagagaaaactaggaagaagctctcattttattcataatctagttatcccctggatgcttactcagcctccagagacttgctcacctctagagaatgattcacaatgtgtgactcaggacacctaagacttcacaacacttctgttgatgaatattaaaaagatgatcttctgtagtatatacatgcaatggaatattactcagacataaaaaagaatgaaattctccatttacagtaacatggatggacttggagggcattatgctaagtgaaataagtcaaacagggaaagacaagtactgtgtgatatcatttcctctgtccatgggggagtctccaggcaagaattctggagtgggttgccatgccctctctccagggggtcttcccaacccagggataaacccagagtctcccacattgcag

SEQ ID NO: 40132 - DNA, 1856 bp, Bovine  19866880874212
  misc_feature (1)..(1): n is a, c, g, or t
ntgatttccttcagctggtctgtgttctcccctgggaaatttatatttcttcctggcatccatcctacatcttctctggctaccacggagacaaagaactccttccctggctttgagaatggcttgttttagaattcttctccagcctctcacagaaggccctggtctggaatataagaagccccttttctccctcctgccctaactcacaacctcaaatgacattttctgagaccaaaaactcctctttgaagcaaaacagcaaaacccctcctctggtctcatagcaaaggcctgtcacttaagcacataatttaaggggcattggggtctttgcaaaaaggaatattctctataccccttgagcttagcaggccagacatttttaccttcagaatcactcctttgaatgagaaataagtaagattactatatccgaatgctatagcatattcactaggactaggactattttaaatgccctgggccagggctgggtgctggggacagagaggtgagggggttggtttgcctccaggtatcccagttaaggcaggagaatacaccaaagttttagtgggtgaggctctagtggatcaggctcgtgcctgggggaagagctcagggtaactgacttgctgatgttcaccttggaaagtccaaagcgtatctgaccttgagaagatgagctgtggggcaggggagtttcatgctgttaacagctctgtttgtgcatcaaaggggagcagagagaagagggacagctgaaaggaaggaggtgaccagaacaccttggcttacctcccaatttctccagaagtaaagtctgggtccagcatgcctgccagagccggtcccaaacacccttctcagcgctgtgctataagccagcacagtgctgtgtgcacacagggtgccagaaactgggctaagagctctgcaggcatcattttacttaaactggcaccgcctaagagggagaagaaacaggcttggatgagtagaatgatttatccaaggtcacccagctaggaacaagagatgagattaaaacacaggtctgtgcatctgaaaccgacatgtttaaaccaactgcacttgcttcaatgggagaaaggccagagggacacagaaacctttttcctttcactgttacctgaaacagatcaaaggtcactatgggccttgaccccaaagaaatggacctgacgtgttcaagtttctctacagagcaaggaacccatctgatgggcaacagatcacatgtgttaggctacatggagtctcaaaaagtatcttgtcttgcaagggttcaaatgtgctccaagaaacccacagcatctggacaagtctggccaccaggctgcccagtgtctctattctcagtcaggtcagcatccttgaagtcctagtaagcttttcaataagacaccatttaaacaaaggctgtcagagggtcgaggtacgtcaaggacctgtgctgggctgagtgcagaccccagatctctctgagatccagctccgttcttggcctgagagcacttgtgagaaagcattaatacccagggaaacctgctcctggcagactgcacgtgcccctagggtgccaccccagggcatccaggggcccagggaatctgaaagcccccaggctctgaggaccagcaaaaaacaactgtgcttaggtcaaaaggcaacagcctgcagacaacatgaatgcagtcaggggtttacacatcacacaccaagcctgttcataatctatgctctgggtcagtgaagcaaggacttctgtgtgtgtctgagtaagcctgggttcccttggcctctctgagcttcattttcttcagctgcaa

SEQ ID NO: 40133 - DNA, 2192 bp, Bovine  19866880890819
  misc_feature (1)..(1): n is a, c, g, or t
ncccttcccttttaatgagaatctgagacccagagagaggtgatcttttaaaaaagaaggaagaaaggaagggagagaggggggtactaaccctccagcatatgccatgaatccattgcttgatatatatcatgtgatcttcacaaataccctgaaaacccccatttttcaggtgagcaaactgaatcaagaagccctgaaataatgtttcagagtcatccagggaatagtaagtaacagagctaggacttagaccctcgaatgtcttctcttggatttgtttgagacattgagcacagtcttcccaaagaagacaacatatgagcaagttctccaggcccggggagacagaggcagcacagaattagaaaagtcagatgaaatgggattggggtcgaaattcaattcagccagagaagtcccagggaacaaggtcgggctaggagcctgagtgaaccaccagagctattggtctactaccacacaggggtgtctgagttcatgggggtaaccaaggccagagaggttcacaggcccacagaccattctattctaggatgaggcaggggtccagggaaaggcttataccaccactttcctgttgagagtctatcctttatcttctttaacccaagaagtctactatttccttccatagaatatttcagcagtatgacctgaagataagtggatatctagaatttcaaaactgtttgaccttggggaagttcttaacctcttagtgcttctctgcctacatctgggaaaaggagctcataacgggatctagttcatagagttcttccaagaattaatcaagttaacacacatttggaataatgcttaccacataataggcatagtatatgtgtgctgccattattatatgttgttcctaattctcctttcattcatatggatttttaaagtaattaattgctgcattagtaatggtaatcctctcaaaatatgtggtcttgacctatttttaaataattgctgctttaaattgaacagtcctcctcatagcttgacaagtagcatattttattgatgttctaaattatgtgtgtcttttttcgcagtcatatctaacattattttattccgaaggtgaaaaacactccatctgacagaccaccaagctacgtaattgctttaaagggaatcttagcaggtgcttttttgttttgtttttttttttttgccaaaccaactgtggcaacatgtgttttctgatgtacaagagggaaaaaaagaggctctaatagctgcaacatcatttcaggtttatatgaaagttgaaacatggagactgaatatgaattcttggttgaagcaaaggagacccaagattctatttttagtatagcaaagttcaggctagcagcctctgaaataattctgtctgctaccttgcaaattactgtaagccagacgatggtgtaacaaaggacaagccttactttcatattagcatatatgtcatgtttaatcaatcagagaagaactgtaattactttgctctcttttcagcaaactttaaagaaagggagtcatgaacttataaagtaaatgtcatcctgtttggatagttatagttttataggtaatttgttgcagattttattcagataacatgtaattatttccttccctgctcatcttcaatcctacaggacatttcaaacacaaacataaggactacagatgtgaaaatgatcgatgttacaatctaattattataatttgctgcatgcaatgtgtatctgtttattagcagatgacttatgctacctcttcaacaaactgtcacctagatggaagagagcagagattaagggacaaatgtccttggacatccattgtcaatcagaggacacacagtgaggtctggagggtagtgggtgggaaatacgagtcttggaatcagataacttcagatttatttaaaactgaattaagatcacgcacaagcaaagtaactgactgtactcgtttgtggtgggcactgacaaaataacctcttttgctacatggattatcctctacacctttctttacatgttctggcatcttgaccacgtagctgttagatttctctggaaacagtggaaacagtgtcagactttatttttttgggctccaaaatcattgcagatggtgattgcagccatgaaattaaaagacgt

SEQ ID NO: 40134 - DNA, 1652 bp, Bovine  19866880908465
  misc_feature (1)..(1): n is a, c, g, or t
nctgtacgcgtcataaacaccttaggcgagacaatcgatactaatgccaagaacacctctgagccatcagtctgcagagcgcccgactcctgcaatttcataagataaatgcctctgctgttttaagatgatgaaactacagctgagacgaatctccgtatttttcaccagtgatttaataaaggccagctcagaataaatatggaacggctactctgaaagcttttttagctttgtgctgaaatgcattggaactttcttccgtaaattgattgtatccaaagttccgatttgtccatgcatggaagagagacacagactaacttgtggactttaagcattccatgtaacatgctgtggcttaaggggaaatttagggaaagatgttttttggggcaaagtgaggggctgggaatcaaaaagttgacttgacttttcttgagctgaaatggctaccaaaacagacagaggagaaaaggaatctgcacctggggattttgctgtccctaatcttaagcttctcataaaaagtgcttatgtccatatgatgtcatacttgccttctgggttatttttgtggcttaagatatgttaagcacacactcaattgataagcaggaggcagttagatggatatataggtagacagtcagaaggatggagagctagataaacatacttcagtctattacaggcaattatttcccaaagtgtttaaaatcctaggggagaagcctgactataattttagagtatctatttaaatcttatattcatgagtaagaaaagttttttctttccattttggatgagcaacagaggagagcaagtgaggaagagagaaggtgaggaagaactgatttattaatatttctttgaggcccgtgttcagcagctggctcttttagtacgtccagtaaaccctcacggagttaccaataggcagaggacgtgcatgcacgttcatatgtgtgtgtgtgtctgtatgtgtgtgccggttgtcattggtctatcagcccacttttcaggttgatgagagcctgtcagggaaaagctggatcccgtcacagcttttggctgggggcccagcacagttgactcctccgagcttgaggaagcccccccttccactgctgcagccgggccacacgtctgtctgtccggcctgccccctgcacaggccctgctgactttaattacaccctctcagcggaattcacaggtggcttccctgggaggaggcggtacctctccgccagaccccgagctgctcatttcctcagtggattagcagggccacgatgaaacagaagcttgtgccttctcctttctttacacaacctggtgttagaggttgacctttcacccctggagattcggaggattaaggccgctttcaagtcccgctctggttactaatccaccactttcacttgctgttatgtaagcacttcctgacttaccctttaaatcctgtaaacataataaaacagagtttaacctttacctttggatttccccactatcttctgcacggtcgaatcaactgtggaaggatccaggaacagaaagctaataagtgatagcctgatttcttttttgccctgggacatgtaacaaaacattacaatatttaatatattcaggtcaaa

SEQ ID NO: 40135 - DNA, 820 bp, Bovine  19866880961451
  misc_feature (1)..(1): n is a, c, g, or t
naaaaatttttaattttggcttttcacacaggtttttaacagccagaatttggcttttgtgtatggtgtgaggtaaggttttcattttctccacatgaatgaccaattaccccaagatagtctgtcaaaagtcaatccttcttcaccctcctgatttggagtgcagtcaatttagggcacacagttgagggaataaaaccctggcttgaaaaatagaattttcctttgagaacataaactcataatcaaattattatgtaagtacttaaatatggatggaatttactctaaaatactctaatctgataatgtttaatcttttaatgccagaaataggttctgattaaacctatggacctctgtctaaaatgaaaaaataaatgcacaagcacattaaaaatatacttgaaatttgtgcactggcctcttcccctcagtttagagtggagaaattgggggaatgttaatatattaatgaagaggtcacaggtactatatgtcatagccagaaaaagaatccatatttcccatgtctctgctttgtaccattccacatgcatactttcagttgagccatgaaagtagaacacggaagcatcacaaattgtgatcacatgctcaaaataatcaaagaatctataccaaaacagtaacatgaatttcatttctgatctaaatttaacagttaattgtatatgacagatgaaactgtatggttataaaaagaattgaatttgagagaaggatttaactttaaattgttcattgggtctgctgccccattcaatgggaaggactttagtagcaggttatttctaga

SEQ ID NO: 40136 - DNA, 1360 bp, Bovine  19866880969232
  misc_feature (1)..(1): n is a, c, g, or t
ncgccaactctaccccttcatattttaggggtcgcccttcccgccgtccgccagccttctttccgcccgggcactcttccactgtccagggagtctcggcctctcgtaggccctcttccctgacccagacgtcccctttccggatctcgccgaccctcctccaaggtaagcggagcccctcgcccttcaggccccatctgtagtcctggctcctcacacttgccaggagggttcccaggttgcaaaaatgcaagcggttcctctcctcgaaggcacccctttcctcaggctctttccctcagcatcaagtgtctcgcgcttccctaggggaccccaaactcacccccgcctccgccatcttctgggaccggcccccgccccccctctgcctcttcctcctcccctcccacaactccgcccgagctccactgcgcctgtgcggccgacgctcagacgctcagacgatcggggcagaataacttccggttcctacaggggccagatggaaggccggagagccggggcaaaagaacttccggtctccgcgagagtagcggcacctgtaggcgtggaccgtcgattggtggaggctaccagatcagctgttgtttgctgagcgggcagtcgtgggttgtgaggattgcgcagaccctatgggcggtgccagagaatcgcgcagctactcacgcaaacccttggcgcgtccctctcttcggagctgaaatcggagttctggagcgcaggtcgcctgtcctcctgctaaggatgttgagagtatcttttgtgatttggccgacctttatttaccttttttccttcccttctaaagtcataacttctttggggagagagcataattgataattctctcttctccatcccacagcactttatgcggcattcattaataatcgttccccaagtttgaccaggtaaagcggtttggggacagttttcatagaaagagcttttgaggtttacagcgaagtcgattttgctaagtaaaatacaaactactaagaggaaaatacaaagtagagaaattacaaccctttttttgtcagaagtagtatcataatatggttgtggtcaagttacaagtgttcttgtggaaagtttttacatgaaggtttgggcctggaattattgtttaagagctgcgcaaaggagtgttaattggtgaaattcctttgtattttttttttttttttttactttgaactgattaatgatgctgtttctgacctttttatgggtatgtttatttctgaaaaatttgaaggcgatgttaaagttgcaccaaaatacacctaagcaagtatttacatggcctttcttattttctctaatgtttcctaaa

SEQ ID NO: 40137 - DNA, 807 bp, Bovine  19866880993596
  misc_feature (1)..(1): n is a, c, g, or t
nttcagtactcttgtacttagatacatttactataaacgtagccctagattattccacaagggtttcatttttttttccccagttagacccagtgaaggtcaaagttttccccatctcagtgtgcagcacatagtgaggactctaggagcaccctgcaggagtcttacattatctgtagttctaccaattaactgtgtaacttgcttaactttctgaaacccagtctatccccctatatagaagcaagatggagggataagaacaaaaagttgatctctgctagattgccctgggctgaaggtatcacataaaactgcttttaaatcagatcctctcctaattcttcctttccagaattttctttaaatggttcaatctaaaaactggcccacaaaagtccatcagattctatgggccacctgtagttgaacccccatacccactgttgtcatcaccaaagaaatacatatgcacacatgcatacacacacacacacacaccacatacttgactggtacctagagcataatcaaaggtcagcttttacatacatgtaatcagcaaagtcgtagaaagatatggagcaaaagatttggacaaagagcaatggaaaacattatgccactgtgtaagtgctccagaggggcagaaatcagcttatttgagatagcctagagaggaatgtcgctaggggcaatgacctgaatcaagttgaaaagatgtggtgccgagcaggaaattccccagttggcctgttacactaggcttgacagccccaaggagccagtggaagcttatgtcattaa

SEQ ID NO: 40138 - DNA, 1202 bp, Bovine  19866881036321
  misc_feature (1)..(1): n is a, c, g, or t
nttgtggaataatagaaataaacctgtttgaaaatataacatcacatttacagatagacttaaaaccctgagaacagtcagtgcaagtggaaacctggctgggggaagcatgctgtaagagctattgatttttatatctccatgggtagtagaagtctatgagagatggaggataagtagtatatatgctcccatttcccactcttatctgtgacagacaacactaataagttatagcatctttcccaggttgcctggtctaatctcacaattctcagtacagcattccagactgtcactttcaatcagatggaactggaatgagaaatgcaacttatttgttaacgataactatctttcccatggataggatcatgctgagtttaatactgtttaggagatacaatgagtttgacttttaagccagaaaaagcaccatctatatatgtttcactttacaaatgttactacctatttttttaaccttcgtttacccatctctaaagtggagaaataatgaaaactcctgcagggctatggattgatattatataagatataaatttagagtccctaaatttggactatgaggggatatacaactggatttgatccttaaagagcttgaggatccatctggcccatgactctgtgcgtagacagagttgaacttaagcccttcccataccaaaaatgggtatgattctcaaaaggcgagaaaacttcacctgctttcttcctcagcctcttataagttttattatgtgcttatcacataagtaaatttacttatcacaaaggcttatgtgataatatgaattggtaaattctctcatcatgtttttccttctagaggtcattactattgaaattgatacagagatttgagtttaatgtagtgatcatttggataaatttgtaaaatctacttgagtaactagaatgccattgcctaccattgtcaccatgttaatggccttggaattggtcccctactcttacccttcttcagtgcatacttcacatgataccaatgtattttaagtgcaaatctggcaatgccattctctctcttagagatttttaatggctttgcaccagtcagtattttggggtaggaagaaaagatggctcaaatggtaaactgggggagttcaacaaaggagtgacttacaaaactgctgtggacaggggtaagggaa

SEQ ID NO: 40139 - DNA, 1743 bp, Bovine  19866881067754
  misc_feature (1)..(1): n is a, c, g, or t
naatggaggtatgttaactaaaaggcagggctccctttagagccaaccactggcctctgggattggtgctgtactaccaaaaatgtttactaaggacttggaataagattatgatagcatcatggcatgcagatacaggctgtaagtaacatgaagctgaaagggctcatcattatgttaaatggtggaatttgtaacccagagatctttccaggtagtaactattgacatggtttaagaaaaagaaattcaacggggaaattataaatccttttgattaggcatccacccctcaccctcagtggacaatgtggaaacatccaaacaactcaaaattctacccacaactataaaagaacaggaaagagaaaatgtggtttgtgcacatggaaagaattttcagttgtttaaatttaacaactcaacacaacttaatactgggatgtggttgccaaaaatgctactgtgataggacattttgttaaaagaaggatccaaaacaagggacatgatgatgcaactctggtgtttgttctggaagtaatcctatggagagtattaacagactggagtatgtccagaaaaagcaacagttatggtaaggggacagaggacctgtgatatgtaaaatgactaaagagacagtatattcagccaggacaagaatctgtggggagtgtggagtgggaggagaattgaacaaaaagctgtcacacaaaatggagtcaagaggcaggagcaataaaaaagatgagggcagttgaattctagggagaactctgtcatacacagagctgtttgtgcaaggatgaagaagtgagaaagttgcaatcctggagacattcaacagaaatacgaaggtcatttgtcatggagaatatcaaagttgttagtaataatacccacaagactatgatttttttatgacttaataagatgtattccatacaacaagaagtgcttttaacgatgaggaaatggaggaccagaggggtcaagcaacttgcccaagaatacccagctggggatagacagcagagatcagaacatagatctgcctccttttaaacaatgatcatgcttttccactggctcacacttcctcaaagaaaaccgagctctaggagaggaatcattctttaaaataacagaggagctatgagatcttctggagctaaggtatctaataaaccctctgagaatactgagcattgccaggactctctaggctatcactgagcaacatataatattactcagtttggaatgtcttttctactgatggttctgtcacacatcaatagtaaaatcaattttattaatctaagatctttttctgaagttttaagttcttttaattctctataatcattattaaagcattagttcctagctttaaaaagaaagcaatgtttctcaaatatcaaggaagttaaaaattttaaatttttaactgaaaaaaattattaaagtatacttgatttaccatattgttttagtttcaggtttatagcaaaagtgattcagttatatatgtatattttttcagattattttccattataggttattaaatgatagtgaatatagtcccctgtattgtaagtaaattcttgctgcttatctattttatgtatagaaaatgggtatctgtttttctcatacccctaatttatccctccccttcccttcctcttttgaatttaaagtcatttttaaatagtttatatttatggaaaatta

SEQ ID NO: 40140 - DNA, 1291 bp, Bovine  19866881096480
  misc_feature (1)..(1): n is a, c, g, or t
ntttttaaaggtcatatgggtcagtcacatagaaatcagacacaaacgaataagaactctatgattcccatttatactaaattctagaacaggtgaaaataatccagattcagcctgaggctggtggtaggctgcaaaagggcacaagagaatttagagggcactagaaatgcctggaaaatcccataggcggaggagcctggtgggctgcagtccacggggtcgctaagagtaggacacgactgagcgatttccctttcacttttcactttcatgcattggagaaggaaatggcaacgcgctccagtgttcttgcctggagaatcccagggacaggggagcctggtgtgcttccgtctatggggtcgcccagagtcggacacgactgaagcaacttagcagcagcagcagcagaaatgttctattggagaaggtaatggcaccccactccagtactcttgcctggaaaatcccatggacggaggagcctggtaggctccagtccatggggtcgctaagagtcggacacgactgagcgacttcactttcacttttcactttcatgcgttggagaaggaaatggcaacccactcctgtgttcttgcctggagaatcccagggacggtggagcctgatgggctgctgtctatagggtcgcacagagtcggacacgactgaagcaacttagcagcagcaatgttctatagctgaactgtgggggtggttacatgaatgtatgattcatctaaactcattaaactgatcacttaaaacaggtccattgtactgtatttaaactacaacccagtagagctgactttttcaaatatttcccagaaaacagccatagtcatttatcctaatgtcttttgcattacagaaacagccttcacatacctgatgctgtgccacagcatggcggtacccaccatgctgaagaaaagatgcttgcaatcacatcaggtggaaagagtgtcacatttctctgaatctgaagtaaatttaacactaatgcaagaaatactccaataaaaaacagcactactcctcgaatcatcaagttcacactccggctagtgacagatgagatatatggaccacgctttttgggcccaggtgactctgtctctccttctgccatggtttcataagttcagtaagttggcaaaaaaaaaaaaaaaggaacaagaaagggtttcccagctgaaaaagctgattgtatgaaccaaagcagactggcgtttcaacagtactgcatctcgtcctaaaacaggacctaccagaaatcctg

SEQ ID NO: 40141 - DNA, 1482 bp, Bovine  19866881119101
  misc_feature (1)..(1): n is a, c, g, or t
nctgttacatgccaggcgctgggctggggttcatgtgtgtcccgtttcatagatgatgacagagaggctcagaggtgacatgactttcccagtaactctccctgaagacaaaggcatcctagggtaactccctctcacctcttccaagcatgtggaccattctgagtgggagtgggtaatggttgagcagactggtgtgacaagaatactgaccaaaagtgatctatccttgcaggctctctccctctcctacccccctccacttcagtatggcttggctgtaggtgtacaggcaagtgagaggcacgtcaaagtaaaggatgctcccaacagaccctctgatcccagggccttgaagtgagaggcccaagtggactacaacagcaaccgtgttagggcagggcagtgagcatcaggacaggactgaggaggagtcctgaacttggatttcgtgctccagccaggagctgctggagccgccccaggctaactgctacgtgcctgagtgaagttaataaagttgcatcctaatagccttcgaggtctcctgggctgacgtccctgaggggcccaggcatcaggaggtgctttgttcatttattttggcaacttgagctctgtgtgcttcacgctgctcttcccgtccgttttgcaagcttaataaagtcctcgtaatgaggctcgacttcagtgagtctgtgcagaagcctctgagaaatggggcaaaagtgacaggctttttttttctttctttttttttaaagaatttactgtgtttgcaacagagagaggtaagtactaacaaacttctactccactggtacagccctcatttctacactgtgtctcctagggataccctgttcctacttgagtatttccaggttgagattttgcacaggcactctcaggaaatggggctcaggaggtaaagacacatatccccagtggctgggcagaggctttgctatccactcagggttacacctccttgtggctccttcggtatggttgtgtgtgtgtgcatgtgcacactagccctgtgctagatgctgataaagaaaaacaggaagcagaagtggagactgttgcttggccctcccaggataggaggtagctggtgaggtctatgtacgttggggaatagcacgcacagcgtatgctcaaggggagctgtttttactgcaaggaaaagactttggagctaatgttcctcagagagaaaatttcctggaagagggtcctgactttggtcttgaaggaaagggataaagaatgagaatactacatcatattagatatgtatgttacgttattcacccacactatgaaagacatgttgagatcatctctgttttcacagatgaggaaaacaaatcccagagaatttaagcaacttgcccaagttcccacagcagagtcagtgcctaaacccgcagctatctgaccctacagcccacatcttcctactctttctcattg

SEQ ID NO: 40142 - DNA, 3121 bp, Bovine  19866881128078
  misc_feature (1)..(1): n is a, c, g, or t
natgatttttaatcaagacctcccaatggtcttgattaaatccgtgttgtgatgaaaagtttctgttttttagaaaagtttggagcagacccattttttagaaaaactctgggctgttgtattggaaatatattagaaggcacaagcatgggctcagggaggccgtgaggagggccctcctcctctccaggggagacaggaatggctgggactaggttggaggttatgtgcacagcaaaacaggatggattgagggaagctgaatttgggagaaccaacgggacctgaggattattggcttggagagaggaggcactgagagaaaagggggcccagctgactgcagggtttctgatggggtctcctcctggtgcagtgggtaggttggccaggcttgagagcagggctacagtgcccgtcaggccaggctccctggaggtgggtttttctcggtgtttatctttctccatctctgtagtctggcctctccttactgttttgaaacacagttccgtgggatctgatgggatgtgtgtttctgaattgaaggggtttggttttagttgaggtagcagcactcccactcttaacaaccctcctgcaaagtgaagtggaaccagatgtctaactagttcctggcaccaaaaagcttatttaaaactggatcaagggccagagtgatttgggtgtgggatgggaggttttgaagtgttggccacatgagctgatgtttagaaatcatcttgtcaaatggcgttgaactacttaagagaaaggcttccctcctactcttatctttgttttgactggagcggcagcagggggcggcagggacgcaacaggctacattcatggaaacatggaaccagtgctgatgtgggcggtctgagtgggtctggatagggacaggtcagggtgccctttctaagagtgggtggggaacagtccctcactggaggagtgtgtgactgcctctgagggacatggaggagggcattccagaccagggcagtgtaagctagatcagggtcttcaaacagtggcatgggacgccccagtgcatacactgatcttggcttttattttctgttttgtaatgctttgacatcttgggacctcactggctttggagagactgcccctcctggagttaaccagttcctggagataataactcgcttggttcctgggtgtgcactattaaaatgcaaaccaaccaatctagagctcataccctaaaccacctgctttatgaggctgttgctggagaagactcttgagagtcctttggacagcaaggagatcaaatcagtcaatcctaaaggacatcaaccctgaatattcattggaaggactgatgctgaagatgaagaagctccaatactttggccacctgatgtgaacagctgacccattggaaaagaccctgatgctggaaaagattgaaggcaggaggagaacagagtgacagaggatgaggtggttggatagcatcatcgacttaatggacatgagtttgagcaaactctgggagatagtgatggacagggaagactggaatgctgcagtccatggggttgcaaacagtgggacacgattgaacaactgaacggcaacactgcagaccactatccaccaacatgaatcatcccagtgtcggtacaagacaccagcctttcacattcttcttactgcaaagtggggtctatgtccccttctctcaaatctgggcttggttcgggacagttttgaccaatagtttggcccatatcccagctcactgtccactttctaataagtgacaatatagggccttcatttttaaggccagagtgggtgattgtgtggatacccaaagtgataataatagtcactatgtatcatgtttatgtgtataatgtgccaaatatgctgttcccatgataatcacatttcttgtgattacttgcaaagtagctttcaccatccctattttacagctaaagaaactgagattcagagaggttagtcacttggttagggtcacacagctaacaagtggtagaggtggcattcagagctaagttttcatgccttcattcatccaaccaatacttattgagtccttagggtgtatactccaggcatcattgtggcactggaatatcacagtgaacaggcagataaagactctgcccttcaattctagtggaggagggagacaacaaactaaggagatgtgtcaaaaaattggcagagtattttctgatctacataagcccagtgaaggagatgaatgagagtgaagtgatagagagttgggaggagcgaggtgggcaaaagatgggtccaccactaaaatccttgattcatcttctctggaagctggactatgtctggattgttgttgttcagtagctaagtcatatccaactcattatgaccccatggactatagcccaccaggctccttctgtctatgggattacccaaacaagaatattggagtgggttgccatttcctcctccagaggatcttcccacccagggatcaaacctgagtctcctgcattgcaggtgggttctttgagccaccagggaagccacgtttgggttatgcatacagacttacaagctggggatgggatttgctgtcatagacactgtaagatctactaaaaatgggcaccactgctagacaaaagagaggatcagatctgggagaatagatgttggactcagaatcagtagacctggtttctggtcataactttgctgttgatttgctgtgcaacttttggcaaggtactcagcctctctgaacctcatctctgcaattgtgcctgtcatctcctggtgagggggatcatatgagaaaagctgccctacacccctaagttgccctaaggttctgagaccctctcttgccctctactgtctttttgaattgaccagagtctagtttcataggagactgggggaaagcaggccatggagagtgaattccacttcttttttctcttgtctgtccagagcctcactcctcccattctcctgtcctggtggcatagaggacgtgggggacgcgctctctgctacgactgatagcagttgatattaagctgcccctttgtcacggcag

SEQ ID NO: 40143 - DNA, 945 bp, Bovine  19866881134681
  misc_feature (1)..(1): n is a, c, g, or t
naagtgacaagctccctcgaattctccctctcagtgagcatccaagaaccatgcagactcgatggatttgatttttattggcaaatcccaaggttggcagcgtggcagtttaaatttctttttgtgtttttgctttctctcctcagttgtctctcacttgtgagtctgacatcacatgcataaaaatatagtcaattttacttatttatatctttgcccacacatgtcagtactctctatgtgataattctctacctatggcatcagctgctgaggaaaattgacttgaaatgcctgatcttagttgatatcctcagcaacaggcaaaggaagggaagagggagcaagagcaaggaccgaccacattgagctgctagtttcatgaccccttgagaacaaaaaaagaggtaatattcattcagatatatttcagctgttaggcatgcttgttgccactttaactttgtagaaatttggaaatgctgtcaattagtctcacgggatattagagcagaaccttttaaataggaatataatttgaaactttaaaatttactagtagttgttggaactctgcattggggaaatgtgttgctaatgtcttgatggtctgtgaaccatttatcctcagcaaaagcctaatcggaagagcccattcagttttgtggattagaaaatgtatatttcattgcaacatctcaaatccagatggcatggtggccatatggcctgtttgctatgctgttccatttgtctgctagcttgtgatttttttatattagttgatttcatttttctttgaagatagaatgcattgtttgtgagctagagctaaccagtaccagcccaggcaagggcttctaaccctttggttacttaggtttgggtaccataatttcatgattcattgtaggaaatactggacattttaagcatacttttcaa

SEQ ID NO: 40144 - DNA, 1055 bp, Bovine  19866881188231
  misc_feature (1)..(1): n is a, c, g, or t
ncttctgagggcaccaaggacctacactggaaggctccccctgactgcaatgggaaggacaaattgggagaggggagcctgggtgacagtgaaggtcaggggctatcacagaagtctactattactggaatctgagagtatgccaatttactgtaaagtttgaaaactattaagatacagagattgatgaaagagaatgaggaaaagaaatcaagcatgactactggatcctggctcaggtgattgaagggtcagggtggcatgcaccagggcatgaggaggaagacctggaaggcactacttaaggaagggcacaggaagcagaacctggagaaaacagctgaagagtgagcaagagaggatgaaggaaaacaagccaaaaacccaaggaaaggtgaagggtgaaggatctaggttagacaccaagaatttacttccaactgagtcctgagtacttgaacccaagcttggatgtctaaaacatagagcttttccttgcaattcaaaaagtccttcctttcagtcctattttttccaagttcttcatgttccaagatttcacatttcactaccccactcatttagtacgtttaattaatttctcaatatttttgtgtatgcattactgctttctgcacacatagacatactaggatgaaggaggaggttctgctgattggtatttgtaatgtgctgagactgatgaatgaactcatacacacaccgtcaccatcaccaataataataacaacctctgttactaagtgagagtctcacctcctgtttattgagcatctattatggacgaggtcttcaattatgaattttataaacatggccaataaacagagtagaaataacatttctcttttatagagggaacaagtaagacttcgagaagttaagtgattggctgaagatcacagagtaaataataaaaagtagtgggacatatgtgtactatccaccaagggtatgaaccctttaaaaatgtttgtgtgcctaaatgactgacttccttgatttccttgttatgatttgtggggagaggagga

SEQ ID NO: 40145 - DNA, 1614 bp, Bovine  19866881300971
  misc_feature (1)..(1): n is a, c, g, or t
ntttgtttttacctatttttggccgcattgatctttgttgctgtgcaggcttctctagttgtggcagacaggggctactctctagtgtgcgtgggctttcactgctgtggcttctcctgttgtggagcacagactaggataggcgggcttcagtagttgtggctcctgagctctagcatataggctcagtagttgtggccactgggcttatttgttcccaggcatgtagtatcttcatggactggggtcgaacctgtgtcccctgcattggcagacagattcttagcccctggaccaccaaagaagtccctcactttgatatttaaatggctcccaaaaagcttataggcagggtgtgctctgcttaggggggacccccacctgcctgtggggctacttgtgggagtcctgcaagttggggctgccccgtctagcacaactcacagaattcccattagcatcagacttttactgaaaaggaacatcccgtggctaatgaaggtgtgatcttgaggttgagcagaatcaggaaagagccttggaaattagtcaaactcaagcttgaacacctgaggagttatttaccaactggaaccccaggcaaggggcttcgcaggtggctcagcagtaaagaatccacctgccagtgcaggagatgcaggtttgagccctgggtgggggagaaaccctgaaggaaatggcaacccactccagtgttcttacctggagaatcccatggacagaggagcctggtgggctatagtctatggggtcacaaaagagttggatgtgacttagtgactaaacagcaacaaccctggacaagtcccccaagctcttgaaatttcagtttttccatctctgaaatgaagatacactaccaccttccttagaggtctgttaacattaaacacagtaatatgtaaacaggtgcccagtgaaatattagttctcttttccctcctgtttgttcacttcagagtacaggttctgcaccagcatgtggacatcccctctatatcaggaaaactcccttcatgtttccattgaaatggaaggaagcaggatgcaggaatccatgacaccgataactaccgtccacagcttccctcaccaggttagtcaacagtgagctggtccctagggaagcaggagagaatgcttgctggtcattgtcattctgagaaattgtttggcaggaggcttggccaggttgggctgtggtgtcatccagggagggaacctcaggtgaggtgccacaggacggcatgaggacaccagagggaaggaaggatgtgggaagcaggagatgggttttgtcagcatcttattcttgcctggggatgacggctctgtcctcatactttatagtgtcacaaccatgagagcgcactttccggaagaaggagtacgttttaattagccgcatgacacctgatctctaacctatcagtccatttctcccggcctcatcttttcagattatttttgcctgtgtccgccacttgcctgtgcctttcatgtgtatccaggaaatcaccaaacagcctgggaatcctattaccagacctcaggacattcattgtcgagttctccccaacggttacacaagtg

SEQ ID NO: 40146 - DNA, 1951 bp, Bovine  19866881552491
  misc_feature (1)..(1): n is a, c, g, or t
ncccaagacattcttccatgcgcttcaatttaaagactagcaattgtctttcttcaactatttgaaaagcactagagctgggttagagggagacggtaaaaaataataataaatctaacaacctccagtctttgcactaaggactttaagcagttaagaggcctgttacaattttttgcaatcaagagtcaaatgtttgaaaaaatgccaaaacttgttagtgcttgttcctctataaatacacagagcaaaacagtcatcaaaaagaaaatgttagggtaccaacccctctgcccctctcacatcgggctaatgccaaatgggctgggatttccaggacactcttgtggcatctgagtccccaggttccccctcctatcctgagccagttgtcacctcactcagttgacaatcctcaaagaactgagataccttcaggtccctaggttctcatctcaggctcatatttaaaagcacagtcactggggttgtgcgtatctggagaatgacctgagttctttgtgaagaattagggttggaattttttttctagtagcaaatattgaacttcaataacaatcaccttatcagcaacatctgaaaaagcagcagtaaacaatgagtatctttgtgtaaatctgtatgttcttctttcaaatttgcctaaagcaagatacacacatcttacttcaggaagcttgatgttcaaggcccgcccccaactcaaggctagatattttcaggctcatggttggcatttctccaagtagaagccacctgctaaccctgcccagcatgcactcttcccaaatccactatccagtctcctgccttggtgctctttttctgctcctgcccagctcctaagaaccttctactatttctatctctatttgtcaagactctacttgttcactgaagcaatgtttaaaggagaccatctttttcaagttccctggtatgcctggtcacaagtgatcaggccctcttcctccattcccttgtctgctggtacactcagcatgtgaggcttttgtgggaagcacctggtcacgtgtccatctgttctcccagactatgagctacacgaggccaaggctgatgttttgttcatgatatcccagcatctggcatagggcctgacccacagcagggtcagctgactgaatctgaatcctactcttggtcctccttctgcctgataggaccctagggaggaggcatctattttctatttcaccctgacatctcaaaatctttccttccaagttaagcccttttggtttcttcaacctctcctgccacatcgtttctagtggagtaggggatacaggcaggcctggattcaaattctaacttcctagtcacttagtcggtgtagatttaacaggactttagctggtctgtgtgggagcttccttaactatgaaatgactcccaacacttcagagggatgcttagaagaccatgaggatgagcacaggtaaggcacccagtagggtgccaggaggctcctagcacatgtgtctccccacttggggactcctggtcaacaaatgtccccctgaaggagcctggcgcctccaagttgaccagggaatgggtaggacagttgtgctttcatctcccttaatgtctgcatttcactggttagtgaaatgcatttcagtggttagtaagtcctattagctcagggtgaacttgagattttcatcaaatgatgcctataaatggtagagaaatagagttccttaaatagtagcactagatgatgacttttgagccaaggcactgatgattctaatgaataacaaatacgaggggtcaatgtctatgttgtagacatcccaaactgaccatgcaggatggttacaaccacttattctgaagagcagcagatgtgggctccaatacagactctgaaagtgatgagctgtgtagacccaatcaa

SEQ ID NO: 40147 - DNA, 1552 bp, Bovine  19866881997912
  misc_feature (1)..(1): n is a, c, g, or t
ncctgtgcttcttccagcccagcatttctcatatgtactctgcatagaagttaaataagcagggtgacaatatagggccttgacgtactccttttcctatttggaaccagtctgttgttccatgtccagttctaactgttgcttcctgatctgcatataggtttctcaagaggcaggtcagggggtctgttattcccatctctttcaaaattttccacagtttattgtgatccacacagtctaaggctttgatatagtcaataaagaagaaatagatgtttttctggaagtctcttgttttttcgatgatccagcagatgttggcaatttgatctttattgagtgcttacaatgtgctggatgctattacaaacaactttggtgcagatctcatttaatccttgtaacaactcatgaaatagatttttaatattatttacacttagcacatgaagaaatgaaggcataaagaagtttaagtaacttgctcagtatcatagtgacaggaaatgatagaaccaggttctgtctacagctcgggttcttaccacagagctttggggaatatgacagatagtgagctgtgtacacagagctgaccagagtcccaggtgcagggtaaatgagagattgttcttgctcttactcttgagttatgaagacttggctttaagtactaaggttaagggcccagggaggggggcctacagccacaaatcgactcataaatctctaatcttcaagagcccaaggaaacagcttctgcatttgtgaaccatttctggaagtccgctggaggctgcctgttcattgcttgttagtgaggggctgttcagtgtctgggtatagatagccaccgtaagagtgtggtctggaaaaaagtgttagctactttccattttacagactgaacaactaactgggtgttttttaaaagaagttctgatgttgctgtggatgcctgtggtctgagctgtcagtggctacccacatcactggccagtcaccctcaggcccattctgggagcgtctgtgtgctatttcatggctctgttcttcttttgctacaaacactgcctctgtcacatctgagcaggctctgtggtgccctgacacactggttttcatgcatgtttttgtgattatttctccttccccaacctttccctgagaacatgtgtgcccatgttgacttttgctcatcttctgcttcttttggcctattgctttcattaataaactcttacgcatttttattttcttcttttacttcttctcttagagaaagggtggaggaggagccacctgccttaccgttctccatgtttcgctctgcccttaggaggcatggctcatccaacaccagtggagttgtggacctgggacacactcaaattgggtttcaatgaggctgaatactgtgactggagtttaaacaagatctttagtttaatcctctatctcagaaagcaccgttccaaaagcattttgtccatacaagatcccttaagatgtcactcccacctactcaccaggagagagaaggcaaacg

SEQ ID NO: 40148 - DNA, 892 bp, Bovine  19866882116018
  misc_feature (1)..(1): n is a, c, g, or t
natgattttactatctcaaatattcttgaaacttttaaggtttcttgactatgagataagtcacatttgcaagttcttttcagagtcggggatagacttcatctgggtctagacaccgaacatcacctacaaggtctagaagctctcttagtaattccatcacatacactggctcatattgcatttcctatccatgtttaatctgtattttccaagcaaccacaatgactgagacagatctaataggtgggtcatcctaatatctcctttggaacacagtgaaaactgctacctctgcctgatatgttcccctttccctggcccagccccttgtgtcctggctaattcacagtcatcattccagaggcatcacacgtgacctaccatctatcttagcaacttctttaactcctcagtctgtgctagaggcttctctctggaatcatataagcacccatttcttgcctgcagtatggtatttacaattcgtactgtactcatccttctcttgtttgtattgtcagctgaactgcatgcagtttgaggacagggaccagttcttatgcactgtgttgtatgcttagcatgtagcatatgacatatgtcacatatgtctggaaattggtttttggattaacactgaagtgttagaagttgggtggcagttgaagttgagtaagacagaaaaataatgttgagtgcagagatagatgtttacaattccagaaagaggacagaaatatctgaggttcattttcattgactgtaaactctgaaaagtctgtatcagtgtagaatcaagctgatttaaaaggtccaggaaataagcacaggtgtgcctgatgacttagtcacagatgttaacctcattattactttgaatattaaatag

SEQ ID NO: 40149 - DNA, 1277 bp, Bovine  19866880833499
  misc_feature (1)..(1): n is a, c, g, or t
ntcgccagatattttaggcacgcacatccctgactgtactcttgtagatgactgtggggatattgaccccgtttgtgggaatttatggcacttagcacatcccatgcttccaggaaatgcatgttaattatggagaatgaaggaggatgtttctcctgctgactgttttgtctgcagaatgaaacaggtggcgtattcagagccgtctatacatacaatagtcttatctcgcttaacaaagataaccctcattaagtaaatgactcctttgtttaaggtttaaggcctaactacgggagacgtttcttctgttttgcctctaacttttaaaactgagaaatgggaggaggaaaagtttaaaaaatagggtgggaaatcccgtgacatcaaagtgaagctaagcgttcctaaatggaactcatcatacaattttcgtatttgagtgtcagaaggaaaagctataatctgctttatcattctttttatgtcatgcaaagcaaacactttttctaaatgatgctcaacacggactttaaaagttttttctttttttttttttcacatcattcaaactggtagaagctttctttaatgcccaggccaaatcaaaaatgacttaatggccagaccaaattggtcgttcaatttcaagatctaccaaaacaaattgactgtgtctttttatccagatcgtcagatagagacctattaggatggccgatccacttcttaaaaaaaaaaaaaaacttaatttcagctttgtgtgagctctaacttacccagaagcagattcaactgcctttatccgcaggttttctttcttttttttttttttttttgcaggttttcttaaataaacccacagtacagcctttcacgaccatgcttccatggactgtatatggatttatttgggaattaagcacttgactcttttagcccatggtttacccagaagactcttttgagtgtgaaatgggactgtaagagaccatttgctgtctcttccttcgtttccatatctcaagggaagacactcttccattggctatagtaagctaaatatttgtttatctcaataggaaaaggtcccatgaaaattcatagagcaatgtggccaaccctcgtctgatttgcaaacattaaaatgaagctgaaatggtgggaaagggatctttagggagtttgggatggacatggacacactgctgtatttaacatggagaaccaacaaggacctgctggacagcacagggaactctgctcagtgtcatgtg

SEQ ID NO: 40150 - DNA, 857 bp, Bovine  19866880270549
  misc_feature (1)..(1): n is a, c, g, or t
nagtcatccgtcctcattcagtatcctctaccagaaggcatttctgccaaacaagtaaacgtggatgtgggcagtgttcttttcactactgggctgtccatgaagtagaaaaagttcttagaggaaaattagggttgtattgcggagaaggcaatggcaccccaaccccagactcttgcctggaaaatcccatggacggagaagcctggtaaactgcagtccatggggtcactaagagtcagacatgacttagcgacttcactttcatttttcactttcatgcattggagaaggaaatggcaacccactccagtgttcttgcctggaaaatcccagggacgggggagcctggtgggccgccgtctatggggtcgcacagagtcagacatgactgaagtgacttagcagcagtaccagggttgtattgaggtccataaaccttttcttaaaacaactcaccacagtctttcttgaggaatttccatgtgtgctgttgactgtaagtgtggtggtgtttcccaggtactttgccactaaatcttcaaaagagggtgcggcatcactcggatctatcagccacgcagcgattctgggatccagccctacaaagccagcaactgcagagagagaggtcagtcagtcattctatggaaaacaagtactttgccctgccatggaacaatggactgactcagaattgggaaagcagtatgacaaggctgcatgctgtcaccctgcctatttaacttacatgcagagtacatgcaggctggatgaagcacaagctggaatcaagactgctgggagaaatatcaataacctcagatatgcagatgataccacccttatggcagaca

SEQ ID NO: 40151 - DNA, 1151 bp, Bovine  19866880415485
  misc_feature (1)..(1): n is a, c, g, or t
ncagggccagccttcccttggcgagatctgcaggcggccggcagggaggccagcctggctttgtcactatgtcctctctggagggctctgttactgctcctgaggatgtagaaagcccgtcgtctgtgggggtctgcggtggacgtctccctgaaggtcctgcctgggatcccgcttcccctggccctccccgcaacgggcagctggctgctctgtggttgcccctgggccttggggtctgactgtcgagctccaatcccccgctgagctgcaggtccctctgggtccctcgagccctgttgtcttgttgcccggggccttggaagcctttcccacggccacttggctgagagggacaagggacggtcccatgtccccacaggctctgccatctgggcatggtgggctgtgcgctggggcctgccctctctctctgggcgtcaaagacaattccctgaccctcacgtggggcgcgggggcagtggtcgcccctacccgctttcacagatgggaggatggggcatggtgtccagggggtgagctgacctgagctgcaggtggctctcccaccctctgccagacctgccctgtcccgctgggaaaaggggcctctctgctcctcagctcctcagaggggcacctggcaggaggcggcctgctgtctccgtggacagggaatctggacggtgggacgggtggcccacggcagagaggccaggccttgcccctcttcccaggcgggggcactcgggggtcctgggggtcccgggagaggatgcctgtctcccgggcctgggggctgcgccccgccaggcaccaggcttctcgccgcccacaggagacaggccgtcagcgctgccccctcgacttttttctcctccccaattaattaatttaaattgaccattaagtcagccgagtttttgattgatattttcattagcagccctgtccgacgccccaggaatgtatggtaatgtccgatctgcggccgcgctccccccgccgcgctgagttatggctggcaccgcgcgtctcccagggtaatttgaattcagatgagctgccgcagtgttccggagcctggcggccgccgctgacggatggcactcgggttatcacaaggtcaccggcacagccgccgcccgccg

SEQ ID NO: 40152 - DNA, 1847 bp, Bovine  19866880415812
  misc_feature (1)..(1): n is a, c, g, or t
nccgtccgcccccagtgggcgtggcctgctgcgccccgggcccgggctgcccacggccgctttgctccgtgcatgccgaggatgtggcctggctgcagcatgccgcatgcccgcagccccccgcccccgccctgcccagactggacctagactggtgagcgccccggcccgtgccccgctctctggagccctgctgtccacctcgcccctcgcttcccctagtccagctctgcttcgacgttgatcaccccctctttcctttcggtacctgcccctcctccgcccggactttgctgattggcgtcgtcatccaggtgtggttcccatagcgacgtgtggtccagccgcggtcagggccctccaggagggcaaggtggaggcggccgtgggggcccccgctcccccagggccagctcgatcgggcgtggtggctgctcccggacctccctgggaactttctgccccacagcggccgggctctgtcctgtgaatcttgaccaacccaggctgacgcccgcaccaccaagcccgtagcttctcccagcctgaagccgacctattttttaataagttatttagacagaatagcactctgcatgactttaactcttgggacaaaacggtagttgatacctacacacgcacacacacacacacctgtgtggtctagaatctgcactacttccggcccagtttggtaggggtgggtgccgggggatggagggacaccctgactgaacgtcgtttctgcccggagggcactcctgggcgggtgcaggcgggagaagcttgtcagcagcgtccaatgtaggagcggggcgccttccaagtgcccactcgctgccccaggtcacaggcaggggcttttgggagtgggtggcccagagtcggggaggaaggtggtggctggaggggcatagaggcccgcagaggcccctcgctttggggggggcgtggcaggccgcgtgggccacggacctgggcgccacgtgcagggccctggagggcgcgtcgttagaggcgctttgagtcggccacgcctggccacccgaggggccctgggtactgtgagcagctgagataacctgcggaacattgtacagaccccgcgctgccctgtacattctccctggtggcgcccggccccccgtcgggggtgggagttttgtagactgtacagaaatcggccccctattttcttgcagctctcagattttgttaatctggataatacagacagacgtaaagtgttttagcaaaacggaaaacaaagctgtgcctttttcctctttctgtttggtttggtgtcggttcggggcggccttaggtggcgaggggcgcggcggggctgtggctggcctggggcctggcgggttgtgttcttgtctggtggtggctctgggatgctgcggcttcctccggccctgtgcctgtggggcccgtccccggcgggggtgcgagggcagagggccctcggcatctgttggtgtggactggagcgcctgaagggggtcctcctggcaggggtgtggcccctcctgtcccctgatgtctgttcctgctgcgtggcccctgccccacccctgcagatgggccagggggtgctgggcacaggctggccctcatcatcccctcgtgccctttgttgctgccaggatggactccaggaggggtgtggcaggggggccacgtgtccgcaatgctcttgtccagccgccgcccggccctgaggtgggcagaggtgcctgtgtgccccaggctgggtgcgtgctgagcccgggttagacccctgcctggccagcgtgtggcctgggctcctggggccaggtctcccagcttccccccag

SEQ ID NO: 40153 - DNA, 1083 bp, Bovine  19866880628009
  misc_feature (1)..(1): n is a, c, g, or t
ntgagggcccttcccccaggacagcggaaaagagaagggcaattcttggagcagtgatgggatggccggcctccgctcgagtgcagtcccgtgtcctcctgactcgtctgccccgctgctggtctggctggacctgcaggcttgtcggtgtcttcagcgggtccgtctcgcccccatcagcgcatgcctctaggtggtggggtgacgcccgacctcttccctcccctgccgctcgctcaccagcgctcggtctctcctcgtggtgctggcctgccctccgtgagccagagaaacaggactggtttgggggtctcccatccgagcagccacgggagaccacggtttccagtgcgacactgctatccgcgcagggcagagccttgggggagcgctggccgcaccgcaggggccccgtgacgcccgagttgtgccttgcaggaccgcatcatcgacgccggccccaaggggaactactcccggttcatgaaccacagctgccagcccaactgcgagaccctcaagtggacagtgaatggggacacgcgcgtgggcctgttcgccgtgtgtgacatccccgcaggtacgctgcactcggggcagcactctgacgacccgtcccaggctgcggcgggtcaggagggcggggtggtggggcaggtgtgtcttgctgggagcgtccccttcacagagggggctgggaggctccggggctgtctgcgcggccacggggctctcggcggggaggacgggaggctgcgcccccagtgccgtgtcccctcgcagggacagagctgaccttcaactacaacctcgactgtctgggcaacgagaagacggtgtgtcgctgcggagcctccaactgcagcggcttcctcggtgacaggccgaaggcgagtgagggcgggaacggggtctgcgggacgcggtgaggctgcctcggggcatcacgggggctcatggtctgggtccacgagccgaggccgagtgcagtcagggtgggtctgtgcccgggcctggtgcccgcgcctgtgtctgcagtgtcccgtgtctgcggacccacctccccgggcctcatcccagctg

SEQ ID NO: 40154 - DNA, 1306 bp, Bovine  19866880733827
  misc_feature (1)..(1): n is a, c, g, or t
ncaggaggaacggaacgaagaccctaccagcccctgctgcaccaacacacaaacacacttttaaaagctcctacaagacaatgaaaaaaccacaatggggaaaacaacgtttggacagacaattcacaaaaaagaacactgaacccacacgggaaaaggtgctccagcacacgcgcactaaggggacggaacgcgatccggcggtgagaactaaaccgcggaagcagacagacacacccacacccctcactcaaaacacccgactccacaccgtgacgtccagctcaaagcaggggaaacccaactggacggctggaaaaggcacagccaaccgacacgtcgcaaagcggggcggggaagcggtcccctcccaaggcagcgcgcggaggggcggggggctccggacgcagccttcctctgctccttaagcagcgtgagggggacaggcgggttgccgtgtggctcggtcaaccgaccaacgtgcgctcctgtgcacggtggatgctgaggctccgatactgtggccacctaacgcgaagacctgactcacggggaaagaccctgatgctgggagggattgggggcaggaggagaggggacgacagaggacgagacggctggatggcatcagctacgagtctgagtaaactggtggtgcacggggaggcctggggtgctgcagtccatggggtcgcgaagagtcggacacgcctgagcgactgaactgacggacgcggcagacgtcccgtacacgccggggcaggaaaccaccgcgaactgcgggagcggagaggcgccgagacgggagccggagggcgtgtgaacgaggccagtgctcaccgttttgaaaaactccgtattttgcgcaaaaagtgacataatgtaccgttaaggaggagaaaaaaagaaaaaaaaaaggacagacccactgaggagaacgaagcgaaaaacgcgagcgcgtggcaagaccccggagggccaggtgacccaaccgggcggagaccccagaagctgagggacggaggccggcggccgagcccctccagcgcggggagggccgaggagggggcgcggcccgggcggcagggggtacgaggggcgcgagcggaggggagaggcggctgcgcgcgagggggccgcgagcgccggggtctcgcgtccgcaccgccgcccgcctcacctcgtccaccgtgcggcgcgggaggtgcagcgtcccgagcagcaacttgagcttcacggccgacgagaggccgtggaagcagaggcggatgttgtcgatgaccgcggccgtgagcagggacgcgat

SEQ ID NO: 40155 - DNA, 588 bp, Bovine  19866880741736
  misc_feature (1)..(1): n is a, c, g, or t
nactcttggggcctatggggccctccagggttgccccggctgcctctgagatcttgcctgagggcagacccagccaccacctcctcgggcccaaagctctgctcctgcgtgtccctgggcccccaccgcgtgcctgggccccagatggctcgggaccagcttcggtcctggcgtggggcccgtgcagcgttagggggcaccctgagctgtgggaggcccgagacagaggctccccgattcctggcccctagagggatgatgctgagtccaggagcattgcctgtgctagccgagggaggtgtggaccagccctgaccccctcgcctctgggaaaggcaggagacaggggagacaccccctccaggggcccccacccccctggccaggacaaggacaggcctggccagatcctgtgactctggagaaaccgcacggagcctggggtttgcagcgggaaacccgatcgagtaatgacagggttggcgtgggggtgactggccgagggagccgctccaccgtgggcctgtccgcagcgaggacccctgggccctcctcttcccacagatgcagacgccggctgcccggcgc

SEQ ID NO: 40156 - DNA, 822 bp, Bovine  19866880750788
  misc_feature (1)..(1): n is a, c, g, or t
ngcctcaaaatcctgacttcaggtttggaaaatgtggttgctcccagatgagcaataaaagagcggtgctgtctgtggacaggagagtgacggtgggcgggcggggttgtggcgtgggttctcctgagtgccatgccagctagggggaggggccagggaggtctaccccccaacccctcactggagcctggcacagagggctgcctcaaagcgcacaagggcaggaggtgctggctgggggagagtctggccggggagggccagcacggtgcgccggtggcccccaggggggtgggctggggaaggagggcggtggagaaggaccacagctggccagggaggggttaaggcctccacagctcccggggctggcgggggccaggccggtagccgctgagcagctcagaaatctattttcctaagcgcttggcatttgcctgaaacctcaagtgtattttccctaagttttattttttctttgaccccaaactctggtaaatttaagggaaatttaattatggtgttttgggtccatttacacttaaaccttctcagcattttttccaggacccttttggagttcagcacgtcttgggagccttctaaatgagcgtttttattattattattttttgaaaaggttttactccccctgcccccaccccccaggaccagccttcctgccaagaataaacaaggctgactccacaggctccggctgaattaggaatccatccccggccgccaggccagccccacagcatgtcacgccctcctccgtccgccaggcagccttcgccctccgagcaatgccccttcccc

SEQ ID NO: 40157 - DNA, 995 bp, Bovine  19866880833512
  misc_feature (1)..(1): n is a, c, g, or t
ntgccagcccatggtcaggggccagctttgggaagatcactgttgcatgccgtgaggacagtgggctggtgcatagggtggacagagtgtgccaaccggggccctgttcaaggacggtcttcctatccagcctcagctccagagagccacctcatcgctggtctcccccgtcccaggggcagccactcgcggtgtccagctgaaagggattacaggattgttcatccttccgttcaagagccatgtggtgaggtcctactgtgtgctgcccccttgcagcgtgctggggagcctgagcggccagaaaagacaccccctcccccatctggcactaccaggactcacctccggcctccaggagcccctggaaggtgtttgctaggtgctggcccgttcacatttgcactttgccgtatctctaggctgtagggagaagactagttgcctctctggctctggaatccctatggggcacaagcctgaaaactgcttgcctcctcagtagctttaaatcacggcagtacaagacagataccaccacatctcttttgatttcacagatttggaattagggctcctcttaaaaaaaaattgcatttagaatagtgcgatcaacatgtaaatttattcaaaacatggaagcgcgtgtttggattttcttgaaagttatttggggctggctgatcttttcccgcccagcgcaggcctccctgggccagccctgctgtcttgtgggggtcccgagcccttttcatcgaatctggccagctggacagccccagccctgcacactctggggcctctgccgtggagagtgtatttcccacaattgggtctccatccgtgcagaggagaaagaggccctcacaggactgacaggtaggcttctggttggggaggcccaaggcagtgggagccccaagcccagtgggcccagagggctgcggggcactcaaaggacgtcagcagctggggctgaagcttgttttcggcct

SEQ ID NO: 40158 - DNA, 1262 bp, Bovine  19866880866239
  misc_feature (1)..(1): n is a, c, g, or t
nccccgcccatgttgggaggcgtccaccaagtggggtgggagatgtcagcacggggggcggccctgggccaacgcaggcgtgtgaccacgcaggtggaggccacgcagaaggagaacgaggtgctgcggggcaagtgcgcggcgctgcaggagaggctcctggagatggggtgagtgcagccgccctgctgtgcgcgcgcgtgcacgtgggactcggctcacgcacctgctctcctcccacaggaagatcatggacagctttgaggggactgtctaccaggtgatgggtgagtgccagtccccgcccccggcatcgggggcaggggtggcgaggcagcgggcaggttgggtcccttcctgatgctgcggtgtccaccctgctctgggggctgtgcgtcccctggcggcctctgtggatgttgggcactagccgtgtccgggctggaagccccgagtgtgggacaggtctgggcttactgccagctgcctcggtttctgggcggagctggtattgaggagacagctgttttctgggcgtttggagccccaagggtctgccctgggaggtcccgagagacgcagacaccctgacgcccaccgatccgaggtgctggtctctcctccagaggagtctcagaaacagaaggagctcaccaaggccgaaatgcagaaggtcctgaaggagaaggcacagctgacggccgacctgcactccatggaaaagtcgttctccgaccttttcaagcggtttgagaaacagaaggaggtgatcgaaggctaccgcacggtgggtgctgggccagcctggggccgggggaggggcggggccctgcaggaggaggagctgagcacagccctggtacggagcctggcaagagggagaggcaggcccgcaggtggggccagcctcagccctgcctgtgcctgcaccctgggctcttggcttgtcacctgcaactggacacgggtgcccgcgaggcgtccgtgtgggcctgcgtggagactacgggtctgtgctggtcgctgcactgttccccaccgccagacggcagggcacccggctgccagagcccggggctcagggaacaggacaggctgttccgtgggcctggtgcctgacctaggttcccccacagtacctggacagaacccccgtggcagggccctgaggggcggacaggcctgggctgtctgcagggaaacaggcggactgctccacgaacccccaaagagctgggcctcagctcggggctcagcgtcca

SEQ ID NO: 40159 - DNA, 2021 bp, Bovine  19866881006232
  misc_feature (1)..(1): n is a, c, g, or t
nagcctggtaggctgcagtccatggggtctcagagagtcggacacgattgagcgacttcactttcacttttcactttcatgcattggagaaggaaatggcaacccactccagtgttcttgcctggagaatcccaaggacggcagagcctggtggctgctgtctatggggtcacacagagtcggacatgactgaggtgacttagcagcagcagcagcagcagcaatgcatatatacagaatctagaaaaatggtactgaaaaatttatttgcagggcagcaatggagaaacagacatagagaacagagttctggacatgggaagaggggaggagagggtgagatgtacggagagagcaacatggaaacttaattaccatatgtaaaacagatagccaatgggaatttgctatatgtctcaggaaactcaaacaggggctctgtatcaacagagaggggtgggatgggagggagatggggggcagtttcaaaaggaaggggatatatgtaaacctatggctgattcatgttgaggtttgacagaaaacaacaaaattctgtaaagcaattattaaaaaataaataaaatttttttaaaaaaaggttaccaggaataagtgccacaaagcaaattctcaaggtataaaaagcactggtactctgaacatgtaagaaataaaccaaattgatataatactcaaaattcatgaaatgaaatggttcatcgacctcagacttaaaattttcataatgtttattatctgtattcttctcctaaatatgtaaagcacatgcagtgaagatttcatttttggcaattttcagtcttcaaaaccaatggtcttaatctttgattggttttctaagttctccacaatatttttcagataatcttcatcttttaaaaaatatacatataattctctttccacttgatgcagcttattagatgccaaaagttttctttttgtcttcacatcagcaaaaatatcagtaagaagatgattcagtttatttagctgagattcaacttgatgaaactgctccgttaactcctaaaaggaaaataataatgctttttaattcaaaatctctattcataataccaatcataaatcttaaatgtaatttacataggaagaatctaaatgatataatgattattcccacaacctcaaccataaaagacctcaattaaaaatccatagcaggattaacaaaaagtctatgtaagatccattgaaacaacttctgcaggcaagtttaagtgattcaaagcaaactcctactccctgaagagtatttgatatgcaaactgttctgcatatttatacgttcaacaagtattctgaatgcctacctcataccatgcactgttttagagtctacaactataaaaatgaacaccaaaaaaaaaaaaaaagaacaccatttccttcatggaacttaacactctgccaaagtaatcaaaccttgttttagcctaacctgtttactccagacatcagaggtactgataaaaccttgaaatgaagcaattaccaatataaagtaattgtcttaatctggatttttcttttttcacactgttacagaagatggaattacacgtaacattcaactatcctgatttaccatgtaattcttctcaaaaacctaaacattctggaccccccacacttgataactgaaattcctcacttcttaacattaaaagcagcttaggttttctaaccatcagccagtagtatcaaagaggttctcagacaatctgtagctataactacacctcaaccttcgaccacttctcagaatgatccacagtatggtaatcacctgatgcttgctgtgaatagattcctatacctcactccacactaaatcactctgcaacaaagccagaagccacatttcaacaggctccctggcgattttaatgtacaagttcaagagtactagcttggtcatacacatgtcataaatgccagctccaaagagcagtacttcttaaactacagtaaaa

SEQ ID NO: 40160 - DNA, 1127 bp, Bovine  19866881050795
  misc_feature (1)..(1): n is a, c, g, or t
ngtctccccttggggtggggtcttttgcactgctgctggctgggcgggccaagagtccttcaggctcccaggcactcagctgtggatgggcggtcaaccgggccgaatgagtgaaagcgcctggctgggtcccagtgaaatcgtacgcactgacactgaccttcacagcgttttctcgtctcaggaaatgttgtttttctgtttgtcttcatgaaagtagttaaaacctctcccctgtgggctatccagcaacaggcaggggccaggtttggcacatgggcagtgctcgtctgccctgggggaagggcaaatggctctggaaatgcctgcgtccctgccactgcggctgtgtctccaggtcttcagaagagcagcttggccacgcctaccacctgctgatggcacagctgagccaggagcacgcggagatccgcctgtccgccttccaggtcctggaccagctctttgccaggtctcaccagttcaggacgctggtcgtttccaacttccaggagttcctggagctcacgctgggcaccgaccacgagcggccgctgccgccccccagggaggtggcacagaggctgaggcaggcggccacccaggccatccgtggttggaatgagaagtacggcgcggcctataagaagctggcccttggcttccacttcctaaagcacagcaaacaggtgggcaggccctgcactgcactgcctgcccgtgcagtctgggcagggggtggtttggagctggaggagcagctgtgaaggaagagcctcagctcatccccgcgtgtaggtggggctgagcttttagccctggtttccacaagatgaaaaggagcgtgagagtcacctgctcaacactgcccttttctctgccgggctctgcgcccgggcccagccagtctgggtgggcgacacctgctaggaccggtactgcccccgccgactccaggcctgtggctgctgccttcccactgccccctgggtcccctcgagcgttgttctcaggcccctgggtctgcccagcagcctccctcgccactggagtacgtgtgtgacgggaagtctttttacctgacttactaggagacgccgatggctgtgttcatctgggggtttagt

SEQ ID NO: 40161 - DNA, 1334 bp, Bovine  19866881085770
  misc_feature (1)..(1): n is a, c, g, or t
nccaaggcaagggtgggcacagccccggcaggggatcggccgagagcatgcatgccgatcggatgcgtccaggcggccaggtggggccaggccccatgtccagcctggagccagaggggtcagccagggccgctggggccctggaagtaaacagccccaggccccggcggacacagtttctccagagggttggcaggcatccctctgctgtgggtgggacaggcaggaaggaccaccggggcatgccagggaggctgcagagtcttgacttcagacgtggaggggtcctcagctggccctggggccccagtggccgtctcggatgaagagcggatatttggcctgctcagaccagggccgggtagagggctctctggccacctggtctgagggggagtgggggggtccccgaggcccccagggagcaagctcccaggacacaggctccccaggcaggctctggctagatttttccactgcctgtgagctatcaatctccactccctccaagacaaatgcctcgtcaggctggccgcccagaccccctatttatcaccatttaatatatattaaagctctctcacctctgatcatgaaaacaaacaaaaaatctgcatcaatcccacggcagcaacaggcagaaagcgggtggggtgcggggtctccccgctttctgccctggcggagccccaggactccgggcccagggtgtgaggagggcctccccacaggcaggcagatctcccggactctgtcctcccaggatggaggaggaagcagagggatccctggccagcaactgccccgctcctctggggcccctctgggcagatctcagcccccagctcactctggccagcctggtgctacctgcgagaccttggcaggagtggtccagggtaacagcccgggcgggcgggcgctgctccagccttccctggctggagaccctgtggcccccgggttgggagacagggaccaaggtacccgtgcgggagctgtgccgggtaggccctcaccacatgtttggatggagggctcttcctgggggagaagctgagccctggcaccaagcatcagttggagacgatgtggaaagaacaggcccttcgttcagccccagggtcactgttgaattagtaacgcagctggtaaagacagaagctgtgactggtccaaccccggagccaggcactccgggcacggtgcacccccactccacggatggagagactgaggccccgggctgggcgggctcgtgcgtccacaggccctcctccctggggacccaggtccttggccccaggctgccctcaccccctgcacctctgcca

SEQ ID NO: 40162 - DNA, 917 bp, Bovine  19866881121781
  misc_feature (1)..(1): n is a, c, g, or t
ntcctgggacttacgtgctggatttttagtgtttgttctgttttgttggcagcagcactggggaacccagtcatttctaccccacgctctccagcccaagggcccctctgcaggagctcccaagccaacaatctcaataacctctgagagggaaaaatcgagtgggactgaggcccatctgggactgccccccacccccaggctgccagtcctgcttctgtgggccagcttagggtcaggggtcactagggacacccgccagccagctgggagctcgatgagagctcccctcccaggcaaagcaattttcttccctagaaagcgcttccgtggccagaggggacaagtgctagcctcttggaatgtccccaccctttgggccagacgtgatcacgcagtcctctactcatgggagcccgtctggactgtggcggcagagcgttgccccccttcttttctcagattcttccttctgccctagggtcctctgggcggctattgagggacccctcctgctgtgggcctcagtttctccactgagatcctcaggaagccctgaccgttaggctcagaccgtctacgcccctcctccaagcccgagcctttcccggggtcacgttgtgtctggcggggagggttgtcgtttttttgcagcctcacgggagacccccgaggacaccgcgaggacccgaacttccgcgaagccagtgcggcagcaggctcagggcgacaggttcttgcgcagaggacgcggatcagcggaccggcggaccggctgggtgtccggatcgctctccgagccccatcgggcactcgtgcgggggccgggcggagggcggccccgccgcgctccgcttcctctcggcaacgcgtccggccgcggcgccctcattggccgcgcgccccgcggccgacca

SEQ ID NO: 40163 - DNA, 1257 bp, Bovine  19866881200228
  misc_feature (1)..(1): n is a, c, g, or t
ngagccggggccgagacagaggaggggacagagagacggacagacagaaagaaagggcgcaagtgttagagcagctgcagacgggtgctcaggcccggccctggggcaagagcatcgggggcacaaacggggagcaggtgggtcagcgcaggccgtgggggatcagagcaggcagtcacaatggaggccaggggggtcaaggtgcagaggcggccacgccgggagcacagtgtgagccagggtcgtggggcgggatggtggggcgtgcgggtgggcacagggccagggcatcggagctggagctcggcgtgccaggcaggcgtgggacagagctgttacctgctgggggcccgtgaacacgcagccaaaaggccttctcagccacgcctatgaaattggaggctcgacagaggtactcgcccccatcacgctcggacacattggccaggcggaggcgggcgtcggcctccgcactctcactgatccacgactgcggggacaagagacccggctcaggcgcgggggccccgccggacacacgggcgtgactgccgaggagctggccctcgcccggccccgaggaacgggtgggcagaccaggcggcgccagccaggagggctgcctggaggaggcatggagacacctcacggcgggcactgtgctcacactggacacaactgcccatcatgcacccccgccgcccgctgaccctcagagaggccctcctcggggcgctcaggccgcccacccctggggtcccagccacaacgctgccaggcctgagagctccgggcaccgcccccgcccccagtctgtactcctgatcccgcccctcagccccatcgtgtgtcttaacagatgtttctctttgggcggcaaatgtcgcaatcgccccaactcgggtggcccccaacccccagggccgtgggaaccgagcggacacagccctgccctgagggcccagggaggcgcctgggcaggcggtggagagctccgctctgggtctgcaggccaatgcggacagaccctgccccccaggccgaccccgctgcatcgcccccaggcccagcccgacaggcctccggcctggcacaccctccccgcccagccggccagcggcggtgcccaccttgagcacggtgacgtagggcgtgccgtcgggccccaccttgctgccgttcacctccacgtgcttgagccactggatgtggggctgggcgtcgctgtagaccttgcagtgaactccacatcgctgc

SEQ ID NO: 40164 - DNA, 620 bp, Bovine  19866881210648
  misc_feature (1)..(1): n is a, c, g, or t
nctgtttgacagtggaatacacacgcacaaaaaacagcgcgtgtgggagaagaaaagtatataatggagggtatattatgtattgagattatttttattttctaaatgctgtaattcaaaaccatttccataaatctatttaaggattgcagacactcttgtttctcgtgtgagcatggatggactcctttttctctgtctgggacgtgatggggttcttgctcaagtgcactgtcctccaggaaacgaggagggcttctggtctcctgagacagtgggaaggcaggacgtggcttcccaccagcccccaggagaagggtgaccagcccttcccctaccccatcccactccctgcgatgggctccagcctcccccgccctgcgcgcccaccctgcccagcaccccaggcaggccagcagacaggtggacacccacacggggcgggggcacaggagaggagaaagactgttcgtgtcctggaggcttggtggtggcgggaggaccactggcagcatatggtagggtggaggcttggggtacactccccttcccccatgggtctgggctcctccaaggcccctgctgctgcctctagcggccaccagggggcaccccgccca

SEQ ID NO: 40165 - DNA, 1708 bp, Bovine  19866881257402
  misc_feature (1)..(1): n is a, c, g, or t
ngagtagcagtttactattaatatttatgtagcttgtattttaattttcctcttttaagtctaccacagtcctttaaaattaggtagatgttagacgtgaagattaaatctcaaaggctgacttgacttaggtcttacatgacagccagcgtcagacctcagtcttccgtttcaagttctttgccgtttctgctgcctcatagttgtgttctgtgaaagaagtgttctctagggcggtatctctgaagggtactttaattgaagtaggttagtggcagttaaagtcaaaaagaattttatgtctaaaacttggaagatgggaaaactgggaattcagatacgataattagaatatgtatttctgtaatgagatagtattgtcgttggaaagtttttaattgtttgattaatatttacaattgttagctttcccaaagatgccccaatatagtgggttataattttgaaaactgtactgacttaagaatttcttctaatttttatttccacattttaggctttatcaacttttagaaggagagaataagaaaaaagaattgtttataacccatggaaacctggaagaagtagctgagaaattaaaacaggaggtttctttggtacaagagcagttggcagtatctgctcaagaacattctttctttctgtccaaactaaacagtgatgtgaacatgctttgtgaagctttgtatcaaggaggaaatcagcttttgcttagtgatcaggtaggtgcttaccctggtaattaaaaatgcttaaaaaaaatgttcattgtaaaagatactaaagaaaatgttaacatgaagaaaatattaccccatttccctgatagtaacatttttatatctcatttttattcacatatatttttcaagtagttttggtcaaagtttttaaaatttattaaatatttcagatatgaaaggatatgtaatgtttatggtaagaattaaaaaaaaaaaacaccatccctgtattttttttcacttattttaacacacaggatagcttttatatctttaaaattctgtgtacccttagtaatagcagctccttctaataggcttccctggtggctcagacgggtaaagcgtctgcctgcaatgcgggggacccggggttcgattcctgggtcgtccgggaagatcccctggagaaggaaatggcagtccactcccagcactcttgcctggaaaatcccatggacggaggaagcctgataggctacagtccatggggtcgcaaagagtcggacatgaccaagagacttcactttcactttctaatagcattctcctctcttttttcagggaggaactatgctaagatttgtcatttgctttcttttatttataatacagactgtgtgttagttttgtatgtttctgaactttatatagattgtattatatatattcttcagtaacttgcttgtttcttaatatgattttgggttttatccatgtgggtatttgtaaaacgtagctcatttatagctcgtttatagttttctcttttgtatagttagtattcccttatgtgaaattccacagtctaattacctgttctgttgacagacatttagattatttccagttcttgctgttgtagatcatactgatgtggatagccttgctgcatgtcccacagatgcatgtctctctctctctgtcacctcacataggag

SEQ ID NO: 40166 - DNA, 1646 bp, Bovine  19866881264466
  misc_feature (1)..(1): n is a, c, g, or t
nacaaagtaataagaattgcatattaaagagtgacaacttgcagttttctcagtgtgaaagtccatccctagctgaactgtttgaggaacacaagaaaaacaatccaagcgagtgctttactctacctgatttttgtcaccaaccatcttccagtttcacagatctcagtttgggatcttttcccttgtcacaactagcaaatcggtatcagtcttcaactggaatatcagagttaacaggatctctatcatctttggcattttgtaaagcttctccgacaagagaccttgagaatttgtcactttctgatttgattgcagaaacgattgatatagacaaccctcagattaggaaagattcctgtatgctcagtttatctgaaatgaggtcacctggaatagactcaaatattgatcttagtgtcctcataaaagccccagattttgttcccaaacctgtagtagaccaatcagttgctccaataccagaaactaaagttctaagttcaaaattagggaaaaattccaattctgctaaggataataagaaaaacagtaaaagctctctgcctaggaaaccacctttttctctctcttggaccaaagcccttgctgccagaccttcagctttcgcttcaaccctgtgtcttcgttacccattgaaaagctgcaagcgacgtacctttgatctctataaggcttttctttatagtagacaagtccaagacgtaaaagacaaagaaataagtcctcttatagcaataacaccgtttgacttcaaatcagcatctcctgatgacattgtgaaagctaatcaaaagaaagcttttactagagaatagtaacaaaaggaaaacttgctaactgttgtagagctttttcttttaaattaatttaattttaagcttttatagggttactttatattacgggatttaagttgtgaaatttatattaaaattgtcttaagtcagttgataaatttagttgatatatgcttttgcactgaaatttctttttactatatcttcttttagtgataactggctttaagttgatagcctgtaataggtgtatgtttacaaagtgcttatggtaacttgatattgtgaaatcaaacctcagctatttttgtttaaagcattcagctttgaaaatttttatgatgagacattttcttttataaaatatttttgtgctttgttcttaaatgaaaatgctaccacttgggattagtatagtttagtgataaagatttttcttgtgatatatggcatggcatagccaagacagtattatattttgaaatattaatgaaatcattccaagtttcattatttttctgccagtgaatactaaaacttttctattagaaaatcttaaaattcctaacttttaagaatactgttaggttgttgaaataacatttttcatgatataaaatataaatccttttaagggaccatgtacatattgaagatggattaatacataatttatttttatacattttcaaaaccatttgtcctaaatgaacactttaaaataaatatgtagaaggtcttttcaagtatggttgcatgttccttgagtaatctaccagatctctttcatgttttgttttgtttttctttttactataagta

SEQ ID NO: 40167 - DNA, 1418 bp, Bovine  19866881292662
  misc_feature (1)..(1): n is a, c, g, or t
ngtgttgtggtatgtgttattgtttccacaaataaatcttagtggaggggagaaataataattataacccaaccacattatctagctcattttcaaaagtacttttgtattcttggttcatacacagataaggctgacgtcttttttttgatgaatgagtaaagagccttattgctgttatagggagtctgccttatttgctctgaccagaggatgatgctaatgaaatccaattcagtggattgaaactcttgattgtttttaaagaatgtacaaatgtattaaagatatctacttgcactcttaggtagcttgctttcctggtcatgtaatcagtagatagttgagtaaaaagaagagcttttctgaagctatatacctataattgtctcaaacttcagaatgatgtgtgaagtactgtcattctgtagaagttctaaagtcaacaagcagggtgggagaatagctactgagattattttaagaaaagcataaatagcatacgttagtgtttggtaagtagtgtggtaatgggtgattttttttgtaagatgaacttgaccaaaaaaatctgttttggtagccatttatgtgtatagtattttacatagtagtaatagcattaaaatttagcagttcataatggctttacccttggtttcatcttctctgtgccattttaaactgggtttttggcttttgttaatacaaaacaagtttctattagtgaatatgttatctgataacctaaaatggaaagtgaaaataatttaaaaactattcctactttgtatttacagtttgaaatgtaattgttttctttgtgtaggctcttggcaaagataatttggatgctaaaatttctagcttgaacagtgaaattctgaaacttgaagaacaaatcactcatataaaagacaaaattttgcctgctatggtaaaagagaatgcccagttattgaatatgccagttgtaaagggagattttgatcgacagattgctaaacaagactattacacagaaagacaagagttggttttaaatcagttgataaagcaaaaggcatcatttgaacttcttcatttatcatatgaaattgaattgagaaagcattgggacatatatcgtcagctggaaaacttggttcacctacttaagcaaagtaatttgatgttccaccagcgattagaaatgctaacagatccatcagtatctcagcagataaatccaaggaataccattgataccaaggattattctactcataggtaagtttctttgtttctttagtgagtaattatttttctgtttgtttttgttaagtactagagtttgaactaaaatttgtgaaagtttaaaaagttctttgtacttcatttttggcgtttgtattcttccacctttctgttatatgggt

SEQ ID NO: 40168 - DNA, 601 bp, Bovine  19866881346383
  misc_feature (1)..(1): n is a, c, g, or t
nccccctgggcacctcccgtgccccagtttgcagttagaaacacagtgacatctcagtcagctgtggagcgaggtgtgagtgactaacggtcttgctcttcggtcttggccgcaccagcagctcagaagttcaccgtgtgatttcaggaagtgtgagaactcttgctgctaaatctggaagaagttacaagtgcctactctgagttctgcccctcggaacactaagtccccttgggagcctaagagcacagcagaggccttgatgtcggcttcagagagcgaatgccgccgccgccggccaggctgccttccgggaggactgcgccgacagccgtgatcccaaggctgtgcagaaaactccggccccctgcccggggtctgccggcccccagcccactccctgtgggccccacgtgccctgtgggtgcatctgctcccgcacagccctaggaagctgggctgcaggtgcctggtcccagcggctccgtcccccaggtgggctgtccccacgggcaggagtccagcagcagcactggcttcggttcagaggctcagggcggcaggctgaggcccctctggctccctggcccttcccctcttg

SEQ ID NO: 40169 - DNA, 2148 bp, Bovine  19866881354345
  misc_feature (1)..(1): n is a, c, g, or t
ntcttgcccttgctttaggcctcacagctctttttccttttccttagcagacggcactccgattttcacgagggtcctcctccccactttccctcagccagcagaacctgtcctctggctacggcgactagctcaatagaccagtggctattccagacagagatgcaaagagatgcttgctgagggcatctgcagaaggtgtttcctcctcctttcatggaaggggcacggagagacactgctcgtttccactggagagaaactaagctggtgtccccaagacctgctaagatgctgagaaagagaggctgggagatgggggacggaagctggactgcccatctgactttgactgctagactgagccttgccttaagccagccctgccttgaactccttaggccgggtacgctgagactgctgaggccagtttagtctgacttgctgccactcgcagctgaaaggtgtccgaatgagcacacggcctaagaggtgcttccatcaccagtttagacgtggggagaagcacccactcagcaaaggcccagcagtcctccaagcccagcctcctccttgactttttctgtcatgcccctcccgctccgggcggcatctgccgggagaagcctacaaacccactgtatcaggaaggcgcgggacctgcgtcagcagcctggcgctacctgccctcactgctttggctggtgaagccagttatcacaccagggccgacatccaatggcccctcctctgccgacctggttctggcgttggctctgcctgacaaggctgatctgctgaaactcaggtcctggacttggccttgggctgtccacttcacagcccccgctgtgacctgttcagaccagacaaatatggtagccctgcatttccataccaggggacccggggcccagggaccatggacttcccagtcctcactcaggcccttagggcctatggagtcttggtaggagagccacttagggttcctgcccaaggctcacgcccggtctcggcctggagctcctggaaacacccttctcccaggcttctgggccggaagcaagcctcagtcccaaggcttgcagcttgtgtcagcctacctgctctgggtttctcccccaaagggcccggccaggccctttcggaggaggtgcttgcctccctctcagcacttcctccaaggccgggaggagttcccacgcctccctgtgaaatggacctgtccgtatagcatacttgcataccttacattataaactctgaaaaatacagtcctgagtcttgatatttaaagggaagcttttgaaaggaaaaaaaaaaaaaaaaaaaacccaaacactttctgatggtcgttcctgacactttcttgtttccgctgagcactttcacaagttccatgctgaaagccagagccaaacacagacttccttattctcagctgtatccccctctccccctgaagaaacagaggcctcggccccaagaggtgctgggagtgaaatccacagaagacagtgctttgaaagcttccttgtgcaagcaaggcttttgttccgttaaagatgccaattaggagactacgcttccaggaaggtgtgcgggtgctctcccacccccagccagtacaaccagagcccggatgaaccaaggcgggcaagcaggtggacagtgaggcagaccggctcgggaccacagggccaagggttactagtccaatcccccaccgagtccccccaaactgagcacgtgctaaataagtgacagctggattagcacgcaggaaaccgcacagtctaacaggtgaggcctcctttcagaatctcccctggtggctcagacggtaaagcatcagcccacagtgcgggagacctgggttcaatccctgggtcgggaagatcccctggagaaggaatggcaacccactccagtactcttgtctggaaaatcccatggacggagaagcctggtaggctacagtccacggggtcgcaaagagttggacatgactgagcgacttcactttttctttctcctttcagaaacaaaaagtgcacaggcagccacacatccaggcaaaacttcaccctcacacagagacgggcgctccaccagcgctgactcacggggtgcttcgctgacagc

SEQ ID NO: 40170 - DNA, 756 bp, Bovine  19866881364610
  misc_feature (1)..(1): n is a, c, g, or t
ncccccctcccccgcagaccacacgcccgccctacccttctctctgagctcccctaagatgtcttggacgttggggttctgctcttccaggtccaggttaagggccccggagtcaggaaaggacttcaggatgtcagccaccatgagcacccaggggtccgagtccaggctggcgagctggatgatctccgtgagtgcgcccttcatctgcgagacagcacaggcgcgtctgggcccaccccgtgctgcccgcgcgggtctgagggcaggcgccgagctgggcctctgagcgcctcgccttctcacaccttctcacacgtgggcccgcgtcagacctgcagggctcctgggggcgctgaggggccagcctcaagggggcctcccagcgcgcggcagacggaacaggagccggcagactgggcagcagttgagggagctggccagggtaggtggtggagcgcggtcctggcgggcagggagcaggcaagggctgccaggaggcccgggccgaggccacaactgggctcctgggatggagcagcacctggggaggctgccctcccgaggccccggtgacaggggcctgggcctgggctgtggccgcgtctgctgaggccccagccacctccccaggccgccagcggcttgagtgtccccactccctgcagcttggggcccagacagagccggactcacccggccccctggccccaccccgcagaccgaaccccccagcacggccctcgggaacagggg

SEQ ID NO: 40171 - DNA, 1952 bp, Bovine  19866880376982
  misc_feature (1)..(1): n is a, c, g, or t
nccaatgcatgaaagggaaaagtgaaagtgaagtcgctcagtcgtgtccgactcttcgcgaccccatggactgcagcctaccaggatcctccgtccatgggattttccaggcaagagtactggagtggggtgccatcgccttctccaaagcattttgcatagtacttgacaaatggtaagagcttgatgtacttgcgtgtgtgctgtggcttcagttgtgtccaactgtttgcgactccatggactgtgacctgccaggctcctctgtccttgggattgtccatgcaagaattctaaagtgggtggtcatgccctcctccaggagatcttccctaagaatcaaacctgtgtttcttacgtctcctgcgttgccaggtgggttctttaccactagtgccacctgggaagcccaagaactggatacatattcactattgttatttttaatattgctatgattattgttattttattatgcaacgtgtctaacacaaggcaggttttcaacaaaggtaactcgagtaactcctctgccaccaagtcactatgtggcccagaaacaggcaccctctcctctggacctcagtttcctattttgaatgaaatgaagacggcccctcccagctctgcacactgtctatacttagtctctagagtctgtgattctgcacggctcaagaatccaaagggacagtcgtagggaaaagggatgtgaacgtattgaggatgcaaagaacagttctcacgatgctgatttgcttgtgaaggctcactccgtaatcaaatcaaaataatcaggagaagaaagaaatgaagcattgtggcagcttcaatgttgccatactgctcatggctttcaaaacacggtttcatttctggttaacttggttctggtacctgggtgagtcacccacacatacaaccagtgtagacagggagaatagggtccttgctctgtgtagcccttactcccagaaccccattgatgtcaaattaacgtggcaaaatatttcaagggcaagtcacttctctgaagcatagagtctgtagtcagatctccagggatcacaggacacatctgtgacttagtgagggggccagcccatctcttttcttaactcagtgtcctcatctgtaaaatgggaaatattcatggttgcggggtgtgacaggactttcataagatgacacatagccttgtgtctgacacattggaatctcaaaaaatgccgttttctttgtttaaaaaaatatatagtaggttagcaaggctgtactggaggcctctttaaaaaatgtatgatttcaagtttgaagggttggttgatcacagggcaattagcaaaatcttttaatggattttgaaaaaggaaaaacgtgggcaatgatacagaaagaattgtctattgacgcagtttgtagaattcaataaatattgtatcaggtccaggatggaaaaaaggatgttgccgaaatcactgtgatgtgatagtctaaaaaaataaacccaacaataggccagtgtgctggccagcaggaagccccaacaatacccccacctttttcctgtaccttacccggagttccttccaggccacacagataaccgatgggtgatgaaaagtcacggactgggtctggtgccagcagagaatggaagagtgagtgtcaaattgttatctgatcagagaacggactcagcaaacacccttcctaggctgtgcttaagaaagtccctggtggggggaagtcctttcttcacctgagcggtccctctgagtcacactgacccactgagactcagctcccccagaagaggaccaccgccatccccggggcccttttagcatcctgcccactgccctcgttgccctcggtgatgtgaacggtaatttctcgcatttatagagagcaccgagctctcagcctgttgccttcccgcattccactta

SEQ ID NO: 40172 - DNA, 2141 bp, Bovine  19866880428500
  misc_feature (1)..(1): n is a, c, g, or t
ntctgtcacctgcctgataggttcaagacttgaggttttcaccacaatgcagataaacaattgcagagactctgggtacctaaaaggaaggcctccaaggatgcagagaccgaccaccacagttcctgccttcaaggaattcacagtcttattaagggcttattgtaagtgatgatttcaatttagcaggaatttattgaattcctactgcagatctggcatggaggacacaaaacgtaataagataacggcccctgcccaagaggaacctgccctgctgacatcttccatccgatgcccagattgcagtttctgttttctgttttcatcctgggttgagactcataacatcattaacttttcatattctgcttacgagccctagtttttgttttgtcttttttgctccatgtactgataacataacatcattggaagaactttgctgtagataaatttagtcttcctaaaatttaggaaaacagaagacacaaacagaagccattttcccttttttttttttccctatagagagacatttttctaagaaaaacatctggcttcccaactcctaactagtgcctggcaaagtgtaggaattaagtagtttgtttgttgaaataatgcatgaatgcctatgacaagaaatggatggaggaaattccgatgtctaacccaattcactcttcccctgacatcccttttatttacttaatcagcgatgtatatacagagctgaggaaagagggcttcagacgaagggacagtgggtccgaaggccttgaaatggggacaagttgggataccttccaagaagcagaaggaaggccagtgtggttggaggatgcagggagaaaggcagttagaagtgacattggccatttatgcagggcctgtagtctttgtcgtgggtcttgtgtgttttctgagtgtggtgggaatgagaaaactgatttccatttttaaaagatctcattgatcacgatgtggagaatgggttacaaggaggcaagagagaagccaaaaggccagtgaggtggtgtccagctcagggcaagtaagaggtgatgggggacagtgccaccaagtctgagctcaccctgcttgctgtgtgcacgcctgcatgctcagtggcttcagttgtgtccaactctttgggaccatatggactgaagcccaccaggctcctctgtccatgggattctctaggcaagaatactggagtgggtttccatgccatcctccaggggatcttccccacccagggatgtaacccaagtctcctgcactgcaggggaattcttggcagtttctttaccttttggccagttaactgagagacaaggggttgaggcaaggaatacgaccttattcggagagccggcagaccgagaagaggtcagactaatgtctcaaaataaccatcttgtcatcactctctggatgccactttcttttatagaacagagagggagagaaggggagggagtaaagtaaaaaggccattagtcttacaaatatctcctgaaatggccaacatcagggaaggggtgtgtttatctcttccttcctgtagccactcacaggtggacagggtcttgaacaaaggcagtttggttttaacattcaggcagttggttaaggctccccaaggcaggccatatgtgtggacattatccttctggtgaacaaaagattccagaagcaaaagtaaaagaaacagacccaacatgggagtcagttcttccctgtaacaacacctgtaggatgacaatggctatggaagcagattcaggacagactttgaagactgagtgtgtgctgggcccgtgacaccatctaactgatatagcacaccgattatatgtgtaatttaaaattttctaggaaccatcttttctagtagcaacgtttttggttcacgttttgcggcaggggctcttttcaaatctactgatatttgctgaaaatgtctttttatattgtccattttattacatttaacttttatacaacaatcagctttgttcttttctgctgcagtaaatcgcagtcaacatacctcttgaaacttgtggtattccttcttttagtctaaagggtgggatttttttttttttttttagtccattttgtcttaa

SEQ ID NO: 40173 - DNA, 1575 bp, Bovine  19866880444198
  misc_feature (1)..(1): n is a, c, g, or t
ncttatacactttaaaatctgtctctacttattggttttaactggaaattaatgtaatgatttacaactagcacccattatttttaattctcaattatgatttatgtagaaacccctgtttatttatgctgtctgcataaaatatttaaataaacatattataatgctgtctgttgcaaaggaaagccattcaagctgaatcgatgtgttgacaggaacgaacacacagtgtgtggtagtatcatagaaatgacacatgttccccactctctcaactacgaaatgactatattatcttgtgtgatacaatcgctacatggatggaaatggatcattccagcatcatagccatgcttgacggaaaggtattttgcactgcttaaaattttaaatttgactctgcatcagttaaatttaaacaaaaaatttcagttccctggtctctccagccacatttcaagtcctcaacagccacctgtgacaactcactggtgcctgccatgttggacatgcaaccccagtgaaattctaagctcagaggccctgcccttacctctcctggcctgttcccctctgactagagaaggcattggctgataggggctctaaatgccacactcaaatgccacggggctcaaaactgaactcttggggctccattaacaaataagccaaggccatgtgatgccaagcacataagcaccaggttacatttaagagatgttttacacacagaccgatgagtgtcttctttacgagaaggaaagggtccatttgacatagaaaaattgtctcgtgcacacaaatgtggctttcttttacctgttccattttaaacgtacatgttcataagcctggcagccttgagtgggccgggactggctaccagccctgatggctgatgtccacatcacagctttgaggagtggctgccgaaagttggcagaatatgtgcatttttgttaaatgccaactagggggctgttggaaggctgtcatgctccatcgaacaaatcatgccagtaaacaccatcagtattcagtagaccgtcacatttctgaagtctgttgagcaaattatactcattttaaaatttgtgtaactgggaattgacacttattcttgtgtttgcttgataggcagagtcattggctgtcactcacacacacacacacacacacacacacacacacacccatgcaaactctcactcatctacatccgtcacatttttgttctgcagaagcactatcctgcttaaactttgatcccaccgtagccctcctaatggttctctggacctgccaacactatgccttgtccttggggagcactttaaagcaagaacaaaccccttaatgtctgcgagacttgggtttcaagaaggatccactttgacttcctgctgctgaggcaagaccctctttgcaaccccgtcccccatggctagtgtcacaaatattaatgccacatttccacatgctgggctcagaacggccccttttaattaaaatatggatctatttttttcaaatgcgttttctgatatctgcacatggggagaagcgcttctc

SEQ ID NO: 40174 - DNA, 1652 bp, Bovine  19866880462742
  misc_feature (1)..(1): n is a, c, g, or t
ntagaagtcctgaatctgcagagagaaagctggagacccgggagaacaatggcatagttccggtccaaatctaaaggccagaaaaaccaatagagtaaattacaggttcaggtttgagtctgaaggcaagaaaagactgaccatgtccccccagccagccagccccaacctttttggcaccagggacatgttttgtggaagacagtttttccatggacggtgcccgggatgggagggtgggtggtttccagactatcccatttattgtgccctttctttctattattattacaactccacctcagatcatcaggcatttgatccaggaggttggggactcctgccaccagctcaaagaatgtcacagagagagagagtgaattttttcttctcagcctttaggttctattcaggctgtccttctaagggttggataggcctgcccacatggaggagagcagtctgctcttcttagtctatgggctcaaatgctaatctcatccagacgcacccttacagacacacccaacataattaattgaggcaagtggtgacccaggcatcagagtgtcctaattttatttcttggaaatatggtaactgatgctgagaaatgtgtcttaatgtgttttaaaagcagagcctttattaaactatgacatactacatatgcttccatggtggctcagctggtaaagactccacctgcaatgagggacacctgggtttttgatccccagttgggaagataccctggagaagggaaaggctacccactccagtattctggcctggagaattccatggactctatagtccacggggttgcaaagagtccgaccggacagagcaacttttgctttcatactacataagcatttgagtgttagtatttatttcagcagaaaggcagtgggcatggtagacaacaaataacctttgaggccatgcacaaatcatggtcagtttccatccttctggctgttgctttagaggcttagttttcttatctataaaacaaggataagtacaagtgatatgcgaaatatttagcagctggtttgtacaggcacccagcagttaaaagagaagtcagccataggggaggaggggtgtatcactgtgtaccatcagcatatccatcctagagctgatgacgcccacttcactggagagagtgggggtgaattggtggagaaattgacacagagacacctaacaatggccagagagtcaagagctcatcttccatcttctcgagtctttgaaaggtactgtctttgtttcctaatcaagcagacatggtttctctcaaccttgcctctctgcagcaggcagagatgagctcatttcacataacctctgcgggctctgcttctggtctccacggtcattcaggaaaaagcaattggcttcaggttttattgacagaggcaacgaaggctaaggctcatccaaacagcttaccctgatgtttggttgacctcaggcagctaagctgtctctgtcagaggtctaggggctactgaaggaggagacatgttcttacaaagagctccccttttttttgcagctgaagaaccttggcattcatattccaggcttccacagaggagccagtggagaatcaggcacggttttttcctttctca

SEQ ID NO: 40175 - DNA, 1898 bp, Bovine  19866880516672
  misc_feature (1)..(1): n is a, c, g, or t
naaaatattagacaggaagagaaaagaaaaacccagctcctgctgtcctggcacttctggtctcatgggaaaggcaggaatatagataattatagaacccagcaagtgcaaaataagtctttcaactgcagttgaccctgaacaacacaggggatcggtgcactgactcccagtgcagttgaaaacccacagagaactttatggtcagccttctgtatatgcagttctgccctggtgggattcagctagccggggtcatgtagtactgctatgcatatttgctgaaaagcccacgtgtaagtggacccatacagtccaaccccatgttgttcacggtcaactgttgctgcaaaaataatcaagattaataaaattatatatcttggtagttattattaaaatgttggccctgagcccaaagtcacttaaacccttaacactatatacatcttaatatattaatagtgcccatgcaacatatgttgaacatttaaaaatatgagctctaatgatctatcaagatgatatctgtgtatcttttcccattgcaacaatttaattcaatatgttaaaacataaaaataaatcaaagccagacttgacttatttatacagagatttccccatttctttagtacaagattatttagaatcccatcaaatacacgtatctgtctgtgcttaattaaacaaagatgtttgtcagattaggaaggactatttggcatattggcagatgctcattaagcttttattaatgataggaagatgaacggtatatttcatacccgcaggaacacctctgttgggagaagtcagtgttgataactgagtatcatcacatcctgggacttcccaggtagtgctagtggtaatgaacccgcctgccaacgcaggagacttaagagatgtggttccatccctgagttgggaagattccctggaggagggcatgcaacccaccccagtgttcttgcctggagaatcccatggacagaggagcctggcgagctgtagtccatgggattgcaaagtcagactggagagtatttcgtctctttctgtatcacatccctctatccctggagagtggagaggaagttgaaatggttttacctgggaaggactgaagtacaagaaggcaaacccccaggtgtggatcacatgcccactggtgacacaggctagacaccatggcaagtgctgtcgggaccacacagaagaggaaacttctattaactagtgagcctcattcacctcctatgacatagatgggtttctcaggtggcgcagtggtaaagaatccacctgccaatgcaggagacacaagagacacagtttgatcctgggttgggaagataccctggagaaggaaatggcaacccactccagtaagatgatgctgttaaactgctgcactcaatatgccagcaaatttggaaaactcaccagtggccacaagacaggaaaaggacagtttccactccaatcccaaagaagggcaaagccaaagaatgctcaaactactgcactcatctcacacgctagcaacttaatgctcaaaatccttcaagctaggcttcaacagtacgtgaactgagaggttccagatgtacaagctggatttagaaaagacagaggaaccagagatcaaattgccaacattcatcagatcatagaaaaagcaagagaattttaaaaaaaaccaaaaaaaaccatttacttctgtttcattgactacgctaaagcctttgactgtgtgaatcacaagaaactgtagaaaattattcaagagatgggaataccagaccatcttacctgcttcctgagaaacctgtatgcaggtcaagaagcaacggttagaactggacatggaacaacatattgggttcaaattg

SEQ ID NO: 40176 - DNA, 1378 bp, Bovine  19866880643945
  misc_feature (1)..(1): n is a, c, g, or t
ncagttcagtcttcaggagtctacttgcttcctccagtaacctcaacaattctcaaaggtaaaacacactgtcaattctgtgtgactgattcaaaaactatttcagacctgtattacttagtaagaaaaatcaaaataacagcaagcattgtattttaactaagtattccataagcaactgccctatgcccagcactgtgctaaaaagtgagtgctctctcattcaggacacgaacaaacctaggtaagcagggttatttccttttgacagatgaggaagttgcaatgcagttgggtcaagaaacaataagacttaaccgtagagtcataatcctgactttcttacttcagcccagttcttcttccatttttgccctctttttcatgaccctggggttgaaacattattagttatacgtgagggcttcggaaccatagcaatctggtagatttacacacctagccaagtgtgtactgctttgatttaatttaaaaataagaaggaactttgccctgaggtcaaaccctctttcataattttaactctgaactgtttttcttaaatgatacaaatttacacttgctccaactcttcccccaaatcctcctttcctggaaagtcagctttcttctagattatcaagagccatcatattcttctatctgattcccgagaaattgatgatttcaattatctgagtcaatgacttaatgtagacttgggaaccttcaaaccaaaaaggggattggagatgggtcatgagtgaaagggttcagtgattcttgaatcaagactaagtgatattcctcagcacacagtagttcctgttattctggtgtgatccaacaggcaggatccccagactgagatacaactgcttcaaagctgatgttttggggctgtgctgctgcgtgactagcaggatcttagttccctgaccagggatcaaatcccagtagtgaaattgcagagtcctgaccactgagctgccagggaaatccctgagatagaactgcttcaaaccatctctctaggataccagtcttacacagcctttcctttaagccatgggacacaaaatgtattttttttcaaggccattggtgaaggggacctttaggccaagtgactgcctcctgactgtttcatgactcagttccagtttcaggaaagcatgcaaagatcttcttatttaaggttcctgaagctcagaggttttccccttaaaaccttggcctgagctgaatgctcctggacatcaggagttcacaccagccctggaccctcttccttggagtcctcgtccactcttcccatccgtgcccattgcagttccaccagcagcgaccatgggcaaacctttattcaaagccactc

SEQ ID NO: 40177 - DNA, 788 bp, Bovine  19866880645731
  misc_feature (1)..(1): n is a, c, g, or t
ncaatatgcatgaggctaaaatgccaaggcatgtattcaaacctggcagtggtggggttaaaagcagcttcatttttttctccccctgagggaaagtaggaaggcagaagacttagcatccgttggattcatctgatttcttcctgttggaatgtatctcctgctccctggtcagctgcaatagagagtgggcttgagagtaagggtggaggttatcttaatggttgttttaatgtaaatagaactttaaacaattcttccaggaagcagcactcagacaaactctctgacaggtctgaggttttattgtattaagtggttcttcccaggaaaaaaaaagtgagtgagtctggtcacctcttaccctgacacaagcttttttcaggaagggacacacaaaacttcattagggaaagcagaaggccccattatgaaccactttaatacagcttttattcagttggccatttgctaatttaataaagattgcatatcccctgactgatactcagaaatttgatatgtcaattcctgaaggattcagtggaaaagcttgagagaaaactagagatgaacatttcagtttttagagagggagacatgcctggctcatgttcagaaggaaaagccatgaagatcaaaagagcagtggacccaaaggcagtacctgggcttggagtccctactttggcattctcaggcttcatgccctctctgagtgcctggacttctctgagtcttagcttccttatctgtaaaatggacatgctaatagcttccttctagaa

SEQ ID NO: 40178 - DNA, 2321 bp, Bovine  19866880665944
  misc_feature (1)..(1): n is a, c, g, or t
ntgcacaagagttggacatgactgagcaacaccagcacacagcacaccagtgagaagaaatgtgaataaaataggaactagggaattttctgacagtccagtggttaggacgtggccatttcacggccatgagtccaggttcaatccctgatcagggaactaagatcctgtaagctgccaaaaaaaaaaagaaaaatgaactgcatgccaaaaatcatctgactttcaaaagcagataaaaatgctaccttgtctctgatcactctataagactcactatatttcattaataatatacatttatcttaggttaatttggctccccaaagcctggccctttatacaagcagaattcgtcatgtctaatagaatgtgattcaaggaatttactctaaaatgtctttctttccaaacatccgtaattgataacccacagccttgggttaagcaccaccctctgacatttctctttggaaatgaaaacttcttctgcttcagttcagctcagttcagtcactcagtcctgtccgactccttgtgaccccatggcctgcagcatgccaggcttccctgtccatcaccaactcccagagcttactcaaactcatgtccatcaagttggtgatgccatccaaccatctcatcctctgtcgtccccttctcctcctgcctgggtgagcttgaagtaactcatatttacacggaatacttgtattaggtactttctcccagagtaggataaccgagattagaacagagctcaaactcttagtctagaaggatgatgaaagtggaggagaaaggagatgaaagcatgctaatgttatgggggacacatgtaccaggagtgtttgacacagcatcgctataagatgggttttgttcgcatatttacaaatgaagaaataggggctcgtggactttctgccaaaactagttgagttaccagtagctcatggctggtgagctgctgtgctgacctttgaccccattaatttcagagctgagaccttgctccatggatgcgtcacctgtgccacgtttttgccaagatcgagcacctgccaagaggagtcagggagaccgcgttgagtggctgacatgtgaattacaaaaacgttcgcgatcaccaagtgcataaccattgatcctcctgtttgtcccttccaggtgtgtacagaaggcagactgatttttggagttcacctttgacgacctcatgagaataaaaacatggcactttaccattagacaatacagagagttagtcccaagaagcattctagccatgcacgtaagtacttaatttctatttcactttcttccctttcatcccctcatcttacccagaaaagagaagccctgttttctcactgtgaaagggctcccagaaacttcacactttaggcaattaactctaaattttgagttttctcatcaaccattttcatccataggccccttttgccctcctttgtttctgagtttggtaaattgtgagactatttcctttcctactttattattttaaactccaaatggaggttacctcaataaacagtctgtacttttcttaaattccacgcatttgttatcaagtaccactcagcctgggctaataaacctgttatgtataaatgagagaaataaaacaaggagtaggaaaacagtttccagtttttattggaaccatctgacaagatgtggggttcacacaccgccgatgtgtgtgcacacacttcctaaccacggcattggaaacccgaggaagacctgggttcctcttgattgcatttggctgtaaatcatatcaaattgcttggacatcaagaaggtccgagggtggattcgatgccaatctagagagatgttttaatggtaagccctgacagaaactcatcaggtcagtcccgtgagaaggaatcaccaggcactgacttaatgaatgcttcttccagagtgcacgatgcagcagcttctgagaaaatgctctggagcaaaatcagatttgagcctgatttttaagacccgatgtggtgaaaagagaatacaatcacagttgtaattgcaacccactccagtactgattgacaacccgctccagtattcttgcctagagaatcccatgggcagaggagccctggtgggctacagtccgtagagcctcagagtcagacacaactgaagtgacttaggatgcacgcacgcatgtgtacagaggaccctcttttcagaaattgagatgaaaaatggcaagctattttcacctacattagttttttttttttaatttatctacacaaagccaattggttgcatta

SEQ ID NO: 40179 - DNA, 722 bp, Bovine  19866880688106
  misc_feature (1)..(1): n is a, c, g, or t
ntgaagtatctatcatttctgcattttttcttttctaatgtattcatttctgcttttatcttcaggattcctctctttgttctttgctaatttaattttcacaggcttttaaaagagaaaaaagtggtatctgtctgtgcctttcatagctaacaccagtctagctgcatctgtaatcatgatattaatcatcgcaggcaggggtcatgacaaacatggagacttgggtctgctgccaattgcctgggtcatgtcccagctctacctttgccaaatgtatgacttggacaagcagattccacatctgtaaaatgaggattattattatgataaaacttacctcatagggttagtgtgaagattacttgagctaatatttgtaaagattttgaaacagggcttggctcacagtaatggctatgtaatacatgaataaattacattcatgcagcactttatcctttgcaaagcattttcacattaattttctcccttagttatcgggacagccccatgaagcaaacagttcttgtccctacttcatacataatagaactggaactttgacaagttagtgaatggaagacccaggtcttacgaccctgtgatcagtgtgtgacttaaagtccagattacctcttttatttgtgggggcttcgctggatggagagaagttcatgttagtccagcttaaagacggcaactctttccaattttcaggc

SEQ ID NO: 40180 - DNA, 1203 bp, Bovine  19866880710439
  misc_feature (1)..(1): n is a, c, g, or t
nttgcaatgtttcttttcggaggcccttagcagtttgatggcaagaagagttctcagctggtttgctgcatggcaataaacaaagaacacagttgaacatggccttagagattctccagctgagtaattcatcagaagaactgcacccaggcctccccttatgaaattctattcctgtggaagtaaaccagaacctgtctctgccttaggtttttgtctcataaacacaagacaaatagattagataataaaaaaaaaagcatgacatttaactgggctaatatttgcttaaacatccaataaccccctctctttaaaagaaaaggattatggcatccaaatatccctgtcctgtattgtcaagacatttctctgcccatgtctggccatagtcacctctcttctgggaaagcctcccctgcctgtggcttctgtcctgttaacactcagggaagaattgcgtggcttaatctccatgcaactctttggaaaaccttggtaaattaagtctgatgctggggggcaaggctctggaggagtggtgtggggacgctgaagtcttccctcatttcactgtgctctactctcatggcgaagatccagaaacgaggctctgaagaccactcagtcgaggagtttgagggcaagcagcccaaacgcctggaattacccacagcttgtgctaattggatctgagtcagaggccttcacccagattatcaataattatctgacagtgcttctgagacctttgatgaaatgaaaatggcaggtgttattagcatctttcttttttttttttttcaaagcatctttcttaagtcatgctctatcaacaggttactactaattctcctgcacttggtgttctgcttgtttaaagaaaatagttctttaaattagagagactaggaagcacctaacccagtgcctaggacatagttgcaattcagtaattgatggtttttggtataaaattcccaaagaaggaagtgattattcagttcagttcagttgctcagtcctgtccgactctttgagaccccatggactgcagcacgccaggcctccctgtccattgccaactcccagagtttactcaaactcatgtccattgactcgttgatgccatccaaccatctcatcctctgttgtccccttctcctcccaccttcaatctttcccagcatcagggtcttttca

SEQ ID NO: 40181 - DNA, 2444 bp, Bovine  19866880796566
  misc_feature (1)..(1): n is a, c, g, or t
ngcaagtctgagtgtgtctctcttctccttggatccttctagaagaacctctttgcccacaaaataacctcattgtgctttagcatgcagcaaggtcctctaatatctggcctctgccttctccagccttccagccctcactggtccaaagggccatgggttatctgctgccaggggtcctcctgggtgctgggaccactggcaccacgtttttagaccatgctgagctctgtggctgcaaagccaaataagaccagtccttgccctttaagggaccactaacccaccaaatataacatacgatatgacacccatgataataagggaatataaagcaggaaagttgagaaatgtcattcagatgagggtcgtggctcatagaaggcttctgtctaaacaaagtgactgtcacctagtagacgctccatagatggctgtgcaaagaatgtttgttgttgttcagtccctaagttcagtccctgacactttgcaaccggatgaactacagcacgccaggcctccttgtccccagaaaaaataagtgcctcgtgttagtaataataacctattcaggccttgagaacacattacattaccagcttgtggtaagtggcgtttacatgattttaatcatttatcctgcataaccacccgtgagttgtatttgttgttgttcttcagccgctacgtcttttacaactctttctgacctcatggactgcagcgtgccaggctcctctgtccttctctactcctggagtttgctcacattcacgtccattgagtcggtgatgctgtctaaacatcctctgttgtccccttctccttttgccttcagtctttctcagcatcagggtttttttcaatgagtcagctcttcccatcaggtggccagagtattggagcttcagcttcagcatcagtccttccaatgaatattcagggttgagttatgtattctgctactgctttacagatgaagaaatgggcttaagtcctatgcccaccatcaccctagctagttaactgctggagcatcgcatgaattcagaatggtctgactctaaagcttggtcttctcatcaccaggccaaactcttgcccattgtgaatacagcagggttttgtagaatgaataggagtgtctcacccagaccacaaaggagatgggcatcgaaggtggagggcaaagcaaagatattctaaaggtgagacccagagaggttaactcagttgctcgagttcacacagtgagcattgggagtttcaacatgtttcagagaacgcattaaatgtcaaggctggagatgatgaaatgagaaatggaaggagtttttttttaaacccttttactctcccacttgctatgtaaaaataaaaggactattgactggtagggccgaacatgccgttagtaataagattccctctgaaaatcctttaaagtctccataattaatttatttgggaggtgaaacaaaccatgcacatgaaatgagttgaaattattaacaggtctgcacagggtccattgcctgaagccacccagcctgacgctgggcactgggactcaggtctgcactcagcatttccattgcaattggaaacagtctctgaatcaattattgatcacacccgggattcaagcagcggtctctgtcttggctacaggagctcagttctgctgaggcttctgcccctgttcttgccctgctggacagaaccaagagtgggaagtgtggaggagagctggggccctttcaccctgagaactccctactccattcttccacgttgcttctctgagtatatagagtggaggcacacctgattgtaaggatctggccattgagaagccccttgttgcatgacaggataacctggcttagaaattcaagaagaggcaaaactcatctatgctgataaagtcagaatcatgtaatctgggtgggtggagtcttggctgagaaaaggacatgggaacttaatgggaagattgaaatatctgccttggtcctgatggtctccaagcacagctaaggtttgtgcattttattgtacgtaagttcagttcagttcagtcgctctatggcgtctgactctttgggaccccatggactgcagcacaccaggcttccctgtctatcaccagtgcctggagcctactcaaactcatgtccatcgagtcggtgataccatcaaccatctcatcctctgtcatctcagaaaagaaagaaattatttttattacttgtcttgttccttctaatataaaacagtaaataataataataaacaaaggctgaaagtgaaagtaaaagtcactcagctgtgtctgactctttgcaaccccatggactataaacagtccatagaattctccaggccagaatactggagtgggtagcctttcccttctaccaggggatcttccaaactcaggg

SEQ ID NO: 40182 - DNA, 1663 bp, Bovine  19866880811268
  misc_feature (1)..(1): n is a, c, g, or t
nccataaaactgattttagacatgtatatgtatgaagctcacatatatattcattatatattatgattattatttatatataaattactgacatctgtaatgttagtttagctctaatgttctagctaatctatttatggattatcaattaataaaggaatatgtagaaagaagatagatagagcaagctagctataacattaagagaaaaacaatactcagatcagaaatgagcaaattgactttaaatcacatttatgatgaaataaaagtcatcagagcacatctattaccaacagttcagtatctataggcttccagccttaatttcagcgtaaacaaaagaaaaaggataaaaattaaactcagttcaggtgatcctggccatttaaaacacacaagtccctattacaatacagatgacactgatttacaattactacttccacaaatctgagaattttgaaacttacaccccacccctagaatatgaatattcagcagcaaatggatggattacattcttatgcaaaggccatcacctttctggtgagcagcaattccttctgcctccatctggtgagcagggctcctcccacagagggttcttcaagaagcctttcctacaactgccaaaactgaactctaatgcacaccttcaaacaggaaaattctctctctaagcctgtttctgattcatgagcttattcatttgactgcaaaggcttgagaaaaatctgcttttttcaacaagcataaacattctgggaagagtcaggacaataggaggaaaaagagaagggataaacacacacacacacacacacacacacacacacacacacacggaaaaagtactacgttaaatgccaatggcaaaagttagggaggcttgaagcctgacatttgaactgcaaggacttgactggtgtttcaagattgattaaatacagaactaggcttgatgggtggaatggttcaatcataatcctgacctggagaagggacctacaggaaggttctcgggggtgggggtcacccaagaaagcacaaacccatccacagaaaaggcatttagagaattctcatttactattcatttttacatcgtgccatatttaaaggagggctcataaaataaaaacagcaacccccaccaccaggagccagaatccagatctggagatgtggttagagaatctccttagaggaacggcccatgcccctggcccacacagaaggcagctccactccggatgaaagtgtctgcccctcagtcttgtctgatgctttgtgaccccgtgaactgcaacccaccaagctcctctgctcgtgaatactggagtgggcagccattcccttttcccggggatcttcccaacccagggatcccacctgggttcaagctagggaaccttcaaatagatggagggcagcatagaaatggccaatgtggagaggctgggtaggggcctgatgttttctaagggaatttggagttataaaaagtgcaagaaataattacacagatgaatcaaaaattctttgctcttcaacatattcagaatttttctaccctacttgggaaggaacccaaaaccgaaaaaagaaaatagaatgaacaccaggataatagattaaaaaaagtctacagttgtcacat

SEQ ID NO: 40183 - DNA, 1242 bp, Bovine  19866880815809
  misc_feature (1)..(1): n is a, c, g, or t
ngtgaatagcgtcccccatcgtcttccgcccagatttccccgtcaccttttgtgtccttgcttgcagctgctgtaggtctttcaatattggcacttgcaagaccctgaaagggagcacctccttacatttttatgtcctgggcacctcagcagcctcccccaagtcccagcaccgttgtcaaggcttcttgccattgcaccccttatcctttctacaggcagaaaggtctttgcaggatttagttctgtgccctgcttaaatacatcacttctccccttggttccttcactcagtgtatgagttcattgaggagcccctggagaggacaggaggtctccacggcagtggcccatcttcacccccttgcagctccagggacacccctggttccctgaaagcttgatcacaactcatccctcattctctgttcctcacgcttctgtgagcctctccagatggcctttcctctgacatgcctggcaaaagctaacagcatcactcctccctccaggtttcaattttcttctgagtgtctggtagataggggttccctaacaagaacaacaagaaaagacctgatcctaagagataaatggggaaagtgggggtgggtgccatcctttatctcaccaagtaccaaatacctgtctcccacaatctgctcttgacctctgtctgcaatttcattcagcttttcagtcattatcttaataggcatctacccatcatttaccaaaatgcagttaagtggggtgatcatttttctgaagataaaaatgacatttctctcttctctttttctctctcttaaaggtgatgcttgtccattattttaactcaagctctttggggctctccaggatggttccatgttctggctttgtctgtaaaacttggggaggcagagagttaagccatcagctagagaatttgatcactacagacctagactcctggtagttcagtgaaaatgaaaacaacaagtttcttttagccttaattatctgtgtaattgccttagctcagagagacagaggctcagactctcaagaaaggtgaatttcttttcttcaatcaacaacatttattatatgccaactgtatgaagcaactctacattaagtcttgaagggtaccctggaaggagtattatagatgctgctaatgaacctctaaacaacctaactacagagtcaagttcattggaatgccttgataaggaccaggcagtacaccagctg

SEQ ID NO: 40184 - DNA, 2531 bp, Bovine  19866880833578
  misc_feature (1)..(1): n is a, c, g, or t
naagagcttgaaggcaaaggagaaggtggtgacagaagataagatggttagatggcatcaccaagacaatggacatgaatttgagcaaactccaggagatagtggaggacaggggagcctggcatgctgcagtccctgaggctgcaaacagtcgggcataacttagggactaaatagcaacagcagtctctactcttcctctgcgatggtggggggaccttagaagggatggtaggctgaccacattcaacacacacacactaaacagacatgcataccatctcatctcccacccacttcattctgcttcatccctacacagatgcctggggtcaaccacaccgagacctggacagcttgcctctgaatgcgtgcttctcaattgcaggagagaggaatttgtaaaaggggggctgccatgagtgaaacagatcaacactgtttacaaaaatgcctgactttttaaataattcctggctcgatttgcaaagattgttgagatgcttgttggagttttcaattccccattagcatttttaagccaacaagtccctgagattcaaatcctgtgaccagcacatgaagctataaaacactgttctgctgatgcagtaattgtctgacatggctacctggttccaactcctgcttagtatgcaaatctgctccaagaatgcatttgacaatcacttttctgtccgcagaaactgccccttgacagaaaatgtattcctaaaatgactttttttttttttgcctttaaaactaaagcttgcaagtccagtggtagctgagagcaacaacatatgcttataattatgattaccatcagggaattcaaccgtacagagggaaggggaagaggcccggcaagggggagcacaaaagctctgaaatacggcagaggaagcacacccagccaggttggctattctgggtaacgggagaaacttgattgtagaaaccaacactggtttccctccagactcgaaagaaatgttgcgtgggcagaatgagaaatgctgacagacaaaatcaagccttagggatttgcctttcatggtgggctaaaggagcctgcataaaaaggcagccttgtcctgtacctgcccgcagcatggacctttatacccggtggccactcactccagccctgtacaactgctgtgctaccctgctcccagagaggacttggggtccacttgcttctactctggttccctagcatatttttggatcccaagcacgagtttgcactcaaataagcaagactttgcatcccagctctcaagctgcatgatttgggcaggtaatgcaacttctctgaccttcagcctttcaaacggggatggtaacaccccacctcccagaaccatgatgagaattaaatcacacagacgaagtaaaggaatgtctggtggccagtggccacttaatcagtgatgactgccgttcattgcattgttgggttggcttctgagcttcttggtgtcagctactacttatggctccgttgttttttttgttttgtttttttgtttttttacatttcaattatatatttttaattgaaggataattgtgctacaatactgtgttggtttctgccacacattagcatgaatcagccatttgttgctgttgttattcagtcgccaagtcctgtctgactctttgagaccccagggactgcaggaagcctggcctccctgtcccttaccatctctcggagttctctcaagctcatgtccattgaatctgtgatgcatccagctatttcattaccctcttctcctcctgctcttctccacccttcccagcattagaagcttttccaatgagtcagctcttcacatgaggtggccaaagtattggagcttcagcttcaacatcaggtcttccagtgaatattcagggttgatttcctttagggttgactgatttgttcccctttcagtccaagggactctcaagagtcttctccagcaccgtagttcaaaagcatcaattcttcagtgctctgccttctttacggtccaactctcacatccatacatgactactggaaaaaccatagacttgactatacagaactttgttgacaaaatgatgtctttgctttttaatacactgtttaggtttgttctccaggagatcttcctgatccaggaatcagacccaggtctcctgcattgcaggcagattctttaccatctgagccaccagggaagccctctggtctctgggaggggaatgcagatacagccaatgtatagcctgggtggggagctaaccccccatctcactctgctttctccctcagctctttcaccacttttccccattggctgaaactaccatgatgcttaggacaagagatcttgcagatgtagttcatacacagtcctggacagaggtcagggtggaaaagcatggggaatagatctggagggataagctgtaaatattctgcacccttctggtctccacaaacccttaggaggataacaggacagaaaaccgtgtaaatg

SEQ ID NO: 40185 - DNA, 2574 bp, Bovine  19866880888190
  misc_feature (1)..(1): n is a, c, g, or t
ntcagtgttactggttggggcatagacttggattactgtgatattgaatggtttgccttggaaacaaacagagatcattctgtcatttttgagattgcatccaagtactgcattttggactcttttgtcgaccataatggccactccatttcttctgagggattcctgcctgcagtagtagatataatggtcatctgaattaaattcacccattccagtccatttcagttcgcataacacactcactacacagaaatccacaatttcaagtgcctcccatcctccactgggagtatcagctgacacaactgtattcattacactgccccaaagctttggcttattagccactgaggccaaagtcctctgagtctagaaacaccattccgactctcttccagaactggaacacacattttgggtgtctctgtgtatatccaggcttctctggaggttcagtgacaaaaaacctgcctgccaatgcagaagatgtgggttcgatccctgggtcaggaagatctccaggtgaaggggaatggctactcactccaatattcttgcctgggaaatcccatggacagaggtgcctggcaggccaaagtccatggggtggtaaaagaatcagacacgccttagcgactaaacaacaaacaataaaaactgtgtatatccttttaggaaatctctttatgtgcaccagagttcgagatgagttctgttcctccatgacctccttatcgatgaatgtaaatagttagcttggattgaagggctgacagcagaggcattgcttgggtaaattgaataggatctgtttactttaaaaattccaaagaaaagttcataaagtcaggattcaaaatagacagattagcaacattctccaggagcaactgaaatgcaagcttgtataccaaaaattcctccttctggaaccccaaatccaaaagagagcgaggatcttatcagaatgtgtgaaagtccaaatatatctctgtgaggagttcgctttacacacataagcagtcctgtgtgtaggctggtctggaagcatgctgaagaccctgtcgtcaaaggcagattcaacaagttattcttaatgttttacgataggcaccacccttacagcccgcagagcagttctggaagctcagagaaatgaccagcagcctctgaaggggccctgctcagctagagtcctagggccatttcttttgccattgctgtgtattcagtcacgtctgactcttggcgaccctgtgaattgtagcctactaggctcctccatccatgaaatttcccaagcaaaaatactgaagtgggttgccgttaccttcttcaggggatcttcccgagctagggatccagtctgagtctcctacactgcaggtggatctaagtcagtcagggttttcaccttcacgaaatgcagacatttgaattctaaggggggaagaggtggcacggtagtaaagaatccacatgccaaggcaggagatggcaggagacgcaggttcaatccctgctaagcacaatgaggtcaggagctatgatcgtccagatgcacacagttcttccttgtctttctttttttttttttttcttttttcccctgtaataacactcagtggctgagaataaaagagaaaaggtcattatcttcagtgtctttagtggcaattacacacatgccataagagtacacttaactccatctgttctttccgtgtgtctccttaagaggagtgaggctaccgtcatcacggttccatctcaccagtggagcaccatcttattggaatgggatggaaattaaagacaatcatctccaaccgaagcttaacaatttcttctgcttaaggacccaagcaaagcagtacagaaagagagggataggcaaaaatggcagagggtaaaatttaaagaactcgactctctcaaagacctgtaatatctgagcttccatccatagagcattgtgtacatttactgagggaaagaaaatatatccaacaagttctttgatgctttttcttttcaaggtcaatgcttgatgctgttggaataacatttactcattgtagaaaattcagaaaatacagataaggaaaagcaggcaaatttaaattattcatagtcttgccacgctgagagattccctgtggactccatagatgcacatttgcatttgtctctatctatctatatatctgtctatctatccatatctatctgtatagacatacacgtctatctacacattcacatacaaatacccaatttttacaaactgtattgtcattttagactctcaacaatacatctttatggtaagcaattctagtactcatcaatatccagttatcctctactttctgactctctagatgacttccttctctgtcctttgacataggatgcagccattgactttggcaaacgaaatgaaagctgaagctttcacgtgccacctggaggcagaaatatcctgaaatgctaagtcaacacatgggagaagagcttcccttgagagcgaccagctcaatatggtcttttgttgtaagacattaaaaa

SEQ ID NO: 40186 - DNA, 2218 bp, Bovine  19866880904525
  misc_feature (1)..(1): n is a, c, g, or t
ntgaggaatttgaggttctgggtataacttgtttgggcatataactgaccaaagttaagtttcagaactggagttcgagcttacaccttactgactttagaacttgatctcttaatcaccacagaatgtagatttttagattctaaattaaattttacattagaatgtcagtttactggcttacagttcacattcaggatatcagaaataccctctgagttacaaagactcttggctgttcaggacagggtgattcatttagctgggattccagaggtaagagtgaaagtgtgagctgacaggtccagtgagcctgtgatgactgaatgagtgtaccagttgggaaaggagagatggggcagaaagaaactggaaataagagttcagacaagtgaaggacataggaattagaagggctcatgatttgggagtatccttttcagtcctgagcctgggacttggggtctattcttaatttgaaggtttaaggagaagctctttaaagaaacagcagaataatgctgcttcatggagtacctggaaagtcaggtagtcttaaagcacagatgttaatgaaccaaaacagggcaaacctgtgaaaacatcaggccttcactgtctgatttaacactaagttggttgtttaaaaactggctttcctctgcatgtgtttattgtcaagattgcatgtgggttattcctgttgccataatagtaatgttgatgatttttcaggtgaagcacatgaggaagaattggaatccatggcaaaacatgaatctaaggaagatagaattttccagaagtttaaaactaaaatatcccttgaaccagaacaggtaaaatggaactcatatagctccttctgctgttcaagtggtgtaggggtatgaatcttgagttgggaattccctggtggtccggtggttaggactttgcactcccactattgggggcccaggttcgatccctggtagggggactaagatcccaaaaacccccaccccaccccgcccccacgccaggaaaaaaaaaacacacctgtgtagaagtaatttttctaatacagttagtctcttgtctgtgggattccttcacacaagtggtccatatggaaagctgtttgtagtgctgatccttttaatagttagggaaagactaaaggttacattgtgtatcatatagtcattttctaaaaccatcagcagagataaacatcttttgttgcctgtaacacatggagtttagacactaatggcaagacagagaggaaattttggcccatttttccaacagggacctttgacttaaaaaattaacctgacacattcgtagagaaatcactgactttgtgaaaagaataatgggttttcgtggtgtgaggatttctggctccttgagttatattttggccttctgatgtagttgtatctacagtatagggagaagaaaaaagtggttttgaggatcaaggtagattatagacttacagtaagtgttcagcaactgtttcactttgcctgttttcttccattaactttattcccttaatttccttcaccataaatataaaccagtaaagactttgcaaaattcccataagtcagtcactagagcaaataaatacttaggggcttataggaagaataggtctaggtcctaaatactgagaaggtggtttttagcaatgtgtaaaacatctaggaaaatcactcggttgttacgtaacattttattatagtgaaatttacttctgttgtatttaaaacagtgtgtctcacttggtatttgtttgtttcaaaattggcaactaaggctccttatctgtgtgaaggtccgcagagacactgggctgcattttatattcaaaacctggtaatggggaaatagaattattgttagtctcttcacaaaacagccatagaattcagaatttaaccgtattgtcatctaagaaaaatagttgtgatgacctgcatcagatgagcggaaagtgtcactttgacgatactgaggcaggcattaagggtgccatgtgtatgtgccagggagttggggagaggcaggcaggaaaccggttttcagatgagcgtttcatcaattgtcagagtatgtacaaagtttcttgagatgatcctcaggtaacatgagatgttggtgatttaaaccgatcctaactattttagattctcagatacggcagagggattgccccgct

SEQ ID NO: 40187 - DNA, 1018 bp, Bovine  19866880926859
  misc_feature (1)..(1): n is a, c, g, or t
ntgaactgaaaatatggcaaagcacaaaacctttggcatttgattccatttgctgacagagcctagttgtctctgataactaggacttgttataattaataatttggacctgaatttctttacctttaggagtggaaattatagaaaaggaaggtagaattctgagaacttggttcaaatctgtgtaagaagcatagctgaaatgtcccaggtacatattagttattgttggacagagaaaaaggaagggtgacctttcagagatcaataacaaatagatttttcaaggttagcctatgaaacctagtaggaaaaggcaggaaaaacactgattatactgagaaggattcaacttccatctgagcaaaggttacaaagttatgaggaagggtgaaagagagagaggggcaaaaaaaaaaaaaaaaaaaagagggagaaaaaataacacagacaaatcaggattcaattttcagaaacaccaaccaacagaattgcagattcaaataatgaaagcgtaaacaatttgggcactactttatttcttttgcttatcttcttttccctcttttctttgatatgaatgtggtaatgagaaacccaaaacaacaggaggagaggtatgaatgaaggaagaatgggagaaagtggaatactgcagcacttattctctcatttctatctcctatatttaaatttcagataaacaataaatacttttatagtgtaaatatgtcccaaatattgcatgggacactcatacactaaaaaatcatttgctgtttatttgaactgagtatcctgtacttttatttgctaaatctggtagccctaggaaagacccactagtcttagtagaggtggatcgcccttcgtttatccccttcttaaaaaattatattaattgaagcaaaacacatgtacaaaagaacactcatcatgagtgtacaggtcactgaacattcacaaatgaagacatccatgtagccaggacctaggtcaaaatccagactgttagccc

SEQ ID NO: 40188 - DNA, 935 bp, Bovine  19866881020984
  misc_feature (1)..(1): n is a, c, g, or t
nacactcacctgctctgtggactaggacaagtgatctaacctctctaagtcttggattctcacctgctgaattcctacaattccaaactagtagggtgatggtgaagacgacattccagggtacctatgaaaatgccaggcaaaagctaatgctcaatgaatacatgtatgttctaacaaacacaaaataacaggaagttatgaaaaaaactgcagcatcaaaatgaggttccttgagtttgttcaaagctaaattagtatgtggagtccaccattggtcaactacacagcagccaggaaatgttcatttaaatgaagtaaagtgctgacaatgaaaagctatttaaaccacatcagatgaatcacatgatattatgtacaaggaaggctttgagcagaaggaggaccagcctgagggtcatttacaaccaaactgtcattactggtaacatgtgttcaatgcctatttaaggtgtttttgaatgtcgcttagaattaaagcaagtaaagaaaaaatattcatcagatgacaaaacagtcctaaatccatccttggacattttccagaaaagactggatctctttcaaaagccttagatagccgctaacagtaagaaatctggaacacagaaattgcgtacatatattataggtgtacacgtgtaattattttttaacaatgttcgtgataatgtgggtcagcttgctttagaaaaatagcataattatggtagtttctctgtgctctgttgctctgtcttgtccaactctttgcgaccccatggattatagctcactaggctcctctctccatggaattctccaggcaagaatactggagtggacagccattcccttctctaggggatcttcccggcccagggatcaaacccacatctcttgtgtcgcggcatcagcaggcaggttctctccca

SEQ ID NO: 40189 - DNA, 891 bp, Bovine  19866881037382
  misc_feature (1)..(1): n is a, c, g, or t
nactgaaaacaaccctcaggtatccctaacaatcatttccttcagtgacagaaaggattcagtgaagcaaagtcgacaccctctatgtctattgagtatagagcttgtgcattatctagagtcagagagaatatactagatgcagaaaaatactctataattccacttatacacgtcacctagagtagtcaaattcatagagtcagaaagtatattagatgccagggaacaaggggtcaggaggcggggaggggagccagtatttaaaggggacagagtttcagtttaggaaggtgaaaacttgaggaggtaggtgatggtgagagctgcccagcaaagtgaacatacttttagaataatatgctgtgttttatgtgacttttatcacaaaaaaaaagattgaaaaatttcaattgaaagttaaggaattttgaacttttttcccatttgaatttccttaaactatgaatgaaaataatgcttacatatagcaaacactactacagagaaattaaattgtgcatgattcatgaataaatgataatgtggctaatccagtgatgtttatttgcataacctttttaatgtgacaattccttggatattgtagtgaaatattttcaccctacatctatatttttatggtgtgtgtttactttccacagtacatatcccaaaatgtcaaaattgctagagctgatttatggtaattagttttaacttggaatatttgaaatgcatttaattaattttagctgtttagcaaagtacaataaggtttttcatattagcaaagttttctttatgacatatcagctatgcatatgtttaaggatatgacggactcaaatgactcttatttgaattttatatttagcaaataagcatgca

SEQ ID NO: 40190 - DNA, 1077 bp, Bovine  19866881043465
  misc_feature (1)..(1): n is a, c, g, or t
ntgtgaaggctcgtaaactgtgcggaagcaactgacaagttgacaaaacattgacaaaaaacaattactcaagaagcagcacttggaaaggttgcttgttgttgaggagatatcagagaaagaacaggggaagatgccgtttatgccaaggcgctaaaacgtaatttctcggacggcatcacagagctatctgtaaggaaagagtcaacagatgaaatgatatactctaatacagtaaatgggctctgcgggtggcgactgtggtaaagaatcctcctgccaatgcaggagatgtaagagacgccaattcgatccctgggtctggaaaatcccctggaggaggaaatggcacgccactccagaattcttgcctggaaaattccatggacagaggaacccagtgggctacagtccatggggccgcaaagagctggacacgactgagtgactgagcacacaatacagtaaataaattccttacattttatttgtgagatgcgctgaatcactgggcagctttaaaaaaaaaaaaatcactaatcactttccacccaagaccaaaatgcagaagttattttaagatgcctgtattcaaatacttgaaatagacaacacactttgaagtgcttaaaatacaaaatatatcttatcagtttgaaataattgctgtatttttaggcatgatctgcatactctacttattttgagactgatttaacttcttgggttgaaaaatacaaaggaagcaggttttaaaacaatttaactacagtaataataatttggtgaggatgatgtaaaataccatttaggtcttattttgtgccagttagtcatgcttaattttttacttgtattgtttaataactcctcgatccctctctatgaaataggaacttctattaagcctttttacagataggaagtttgaaccttgaagcagttatattacttttccacgatcatacagctagcaatcagaggagtgaggtttgaacataggtatgtgagttcctgccctgggcactgcaggtatacacaggagtctccagggaatcaggaagcaggtctctccct

SEQ ID NO: 40191 - DNA, 949 bp, Bovine  19866881073470
  misc_feature (1)..(1): n is a, c, g, or t
ncaaggggtgatgctgtctttctcttccaaggtcttttgttacccaaattttctcagaaaaagagctcagaacagatgattgttactacctctgtttgcaagctgtgcagaaatgcaaaatctctgtggaaaactgtttaccaaaacccgctgttgcatcagaattcaagagatgaaccagttctatggctatgagtgaaccatacaaaagagacaagttagacgtagctctggtctctagaaacaatgactgcggacatggttttcaggggcctggagtagaagaacccggacctcaaacaagctgtggccttgaattatggaggacggcagccagtggacacatgcccgttccatccttatttatgagccctttccttcctctactgaagtctatatttagtgaaacaggggtcaaaacccacagaatcccctgaggaatggactccaggtcccgtgtggttggtgacatttttatttattgctttaattatgcctattgtaaccagcccacaagaccaagcaaagggcacatgtttgaaaaatgggtttattatggaaattgctagtgatttttttgagtgtgtgtgactgtaacagtatcaagccagcttagtcctgctaacagttgtgaaattataacagaatgttctgctagacttttcaggtccatttagtcagttatttgtctctgacttgaggagaacttgggttttattcacttatttattcaactgatactaagaagtatcaagcactgtgagaggttctgaaggtaaagtgatgaaaaacactaaactcctgtgcacctacatggagctcccatcctagtggggaaggtggaagaccaactggtaactagacagatgaacaacatcaggtggaggtggaggtaagggcagtggagaaaaggaagcaggacaaggggaggaaagccggggaggagggt

SEQ ID NO: 40192 - DNA, 1467 bp, Bovine  19866881086348
  misc_feature (1)..(1): n is a, c, g, or t
nattcaataaggactttgaaagatggtccacaataacagcaaaatatcttaaaaataaaaaatccccatcttagtaacaagacacggagcttgaactctggagaccacggcttggagtctttttgttttgttttgttttttatttttggctgtgctgggtctttgttgctgtaagtgtgctttctctgggtggggacagtgggggctactctagaatttcagtgtgcagtatcctcactgcagtggcttctcctgcagtagagtgtgggctccaggggttgagggcttcagcagctgcagcatgtaagttcagtagttctatacaccaggctctagagctcaggctcagtaattgtggtgcacgggcttagtcatgctgtggcatgtgagatcttcccagaccagggattgccctgtgcctcctgcactggcaggggaattccttaccaccgagccaccaaggaaggccctggattcatatttttaaaaccataccaatttctctctgcgaaggacaactgggcatggagttagactcccaggctggaatctaagctctcagctctcagcacccagttttccttacctgctgtacagctgtggtgaggagtatgtgaacagacgtatatcaagttcatgaaacctagcggagtaagtttactataaaaggaaacagttatcattacacttcaacaaaaaggaaacattgcaaagaaaaaaagaaagtctaccataattacatcacaccaccatcgttttttttttcgtttgctgtacttttccctttcctcattgttagcatatttgcaaccattcagtatatacaaatctgtactctatttctcaatagagcataaacacttttctcacaaacgccatgctcaatatctacatccagtaaacttataagtgatcatttccttagtttttaaacaccgagattgtttccaattttagctttaaaaataatggtgtaataaatgtcttcctgaatttagcatttccacacactgggctatttcctaagaagggatgtttcatatgtgtgcttcttcagagttcgaatcatgtctttcctctttattgttaagtccccagagactagcagagagtctggctcaagaacgagttgacgaatgaatgaatgacttcaacacgttatacattaaacatggggtgtaaatgtagaatatcgcccatgaaaatgtaaatgccaagtattaacaactgtagaatgttttcattccatacattactgaaggcattatcaaatggcatacttttttatcaaaatcttagaaaaaacttttttataatcttatcattttttttttattctgggctttgctgggtcctcgttgccgtgtggtcctttctctagtggcagctagtgggcagctgctcttggttgactggcttctcttgctatctatggagcacggccactagggtgtttaggcgtcagta

SEQ ID NO: 40193 - DNA, 3027 bp, Bovine  19866881125401
  misc_feature (1)..(1): n is a, c, g, or t
ntaggcttgtgtgacgttcttgctgggggtagatttacaggagtttggccaactgcagagaactgctttgggattaaacacagcaaggagagcatctagcccaatacttggcgcaaggcagcagttttataatcacgagctccctcgggttttatttttattcccatctccatggagatgtatgaggtcttcttctgaggtctaactatttgggtaagtgtgaccactgttatgttcctatttatttattttgctgagttttctgtgcaagaacacatttttgtattgtccttttgagccctttctgttgttctttgaaacaacggcaatagcaactgaatatgggtggccttccattacaatcccacaactgtaaatgaaactggattcaaaaaatatgtccagattaaagcgattaacgtcttccttgtcttcttgttaatgcacacatgcccaacctgcataattttctctcccagtcatgcaagaggcaagggtaatttagaaacacgcatgctgtctttgtaccgctgttgacaaaaggctcagagaaaaaacacataatacacctttgttgaaaataaacaagaataaaccccttaagacatacaaagcaaggtctataatttggtgcacattttttagcctgaataaatcatgcctgttattttcttagcgccaaagcaaggaaaggctgcccctgggatgggatgacactttctacctgtttccaaaaggcacttgatgatgttaggaggtagtgcactctgtgagaatgtcaggcagaaatcatccagtgaatattcatgatttgatgttgttgttgagtcactaagtcatgtccaattctttgtgacccccacctgccaggctcccctgttcctcactatctatctcccagagtttgctcaaactcatgtccaatgagttggtgatgccatccaaccatctcatcttctgtttctcccttctcttcctgccttcaatctttcccagcatcaggatcttttccaatgagtcggctctttgcatcaagtcgccaaagtattggagcttcagcttcagcagcagtccttcccatgaatatttagggttgatttcctttaggattcactggtttgatcaccttgcacctctcaagagtcttctccagcaccacagtttgaaaacatcaattcttcagtgctcagccttttttatagtccaactctcatatctgtatgtgactactggaaaaaccatagctctgactatatatagacctttgtgggcaaaatgatgtctctgctttttaatatgctatctagctatgtcgcagatgttcttccaaggagcaagctgcagtctatgatgggaaagagtaatttgttacggatctgaatcgtcaggtccagtcatttggcttgaaggattcagttgactccactgaaagcacatggcaagtatagctcctaaatgacagtaagaactccctcatttatattctctcatgtctctatctcatctaaccctgtcgggtgaacccctgctgccctttaaatgcaaattccatccattcccccatctgcatggagctgacaacccatcttccatgatgcttcggcactctgtatgtacttctgttagggcccctgcatgcatatcagagatttgtgtttccattcttgtgtccctcactggagaattacgtccttgaaaggagaacctcatttcactgtcgtttgattccccaaagtgaactgtgttcctacctgtggagtaatgtgttttgcacatttgctgaattgaatcagaatttcaggtttggaaggaaactttcccatcattctaggaagcctagaacagtagaaccaataacatctgtggcccgtccacccctcatttagtcgatggggttacagggctggttcaagatctcacagcaagttggtggtaagcagagaccagaatccagaaggccccatagcagtccaaggacatagtactcagtggacacccgcatgttatcagtttctttgagaaaaaggaatgtgctgtatctttcagttagttggcctggtttcctcatcataaaactctcttgtgaagttccaaaactaagtgatggtatgcagcatttcccaaacatgtttccccatggaaccttttcctcacactatctgactcaactggtgttccccaaaacacactttggaaaacacaattgcagtagacagaataatgaccacccccccacccaaatgttcaagttacaatccccagaacctgtacatatgctatgttatggacaaaggaggaattaaggtgttggatggaattaaattagataatcagctcaccttaaaatgcaaagattttcctggattatctgggtgggcccgtatgtgtacatgtgctaagttgctgagtcatgtccaactcttcgggcccccatgaactgtagccaaccaggctcttctgtccatgggattctccaggcaagaatattgggagtgggttgccatgccctcctccagggaatcttcccaacccaggggtcaaacctgtatctctgtattggcaggcagattctttactactgagccactggggaagcccctcttaaaggagaaagaaagcagcagaggaggtcagagggatgcagtgtggggagtgctcagaccatcactgtgggctttgaaagtggaggaatgggccgcaagacaagggaagcaggtggcctttgagctggaaagggcatggtaatggattgtcccctagaacaggggcccccagcctcaaggatctaatgcctggtgaagtgaggtggagccaatgcagtaataacaggagaaagtgcacgataaggacaagggacttgaatgatcctgaaatgactccccctcctccagcctgtggaaaaattgtttcctatgaaaccagtccccggtgccaaaaaggttggggaccagtgtctaggggcctccagaaaggaaacgcagcccttcccatgtcctattttagcccagagaggcccgtgtcagactt

SEQ ID NO: 40194 - DNA, 2246 bp, Bovine  19866881361394
  misc_feature (1)..(1): n is a, c, g, or t
ncagagacttcaagctcctgttcatttgaaatgaagaaatttggctcaagacgtacgggcggcaggcttaccgcatcaagtcatgggtctggctctgggaggcctggccccttcccccggaggagctcacagtgcagtgggagagaaagatgcggacaaaactagctgctaaacaagctagcctggggaagtgcttcagtggaggcataaacacgaaaacccgggtccagaggagagagatccactggtgtgggggcaaagggagggtgggaagactgtgtttgagctagtgtttgaaggacgagaaagaccttgacagctttctgtgggaaatgaaaactggccagtgctgtatctctagcttttcggagttttattcctaggctgcggaaacatgagttcaggagatgtgtgatttgggcctttttaaagccgatgtaaccagatttctggctaatgggaacatagtcataacattgtcactgaatgcaagaacttgttgatatattttgctaaattgcccttattaatgattcatcaactcttttttccttcctgcactaaaaaaaaaaaaaaaatcttgctataaaatttaacccgcatatctacacacccagctgctgctggtgcctggcagtcttcctaagcagcgtgtgttttccagatgtgattgttgacatgcaaattttggaattcagcaacaatgaatatgtataaggaggacagaagcctcagaatacatctatgatatacaaagatcagtgtttcttaacctgtagtgcccggagcattatttctttttggaaagattcacagaggtaaaaaaaggaaaaaaaggtctgtgtggtgtgtagggtcccttggactgcaaggaaatccaagcagtcaatcttaaaggaaatcagtcctgaatattcattgaaaggactgatgctgaagctgaaactccaggactttggccacctgattcgaaggactgactcattggaaaagagcctgatgctgggcaagtttgaaggcgggagaagaaggggacgacagaggatgagatggctggatggcatcaccaacgtgatggacatgagtttgaggaggctctgcgagttgatgaaggacagggaagcctggcgtgctgcagtccatggggtcataaagagtcgggcaccactgagcgactgaactgaactgaattgagtgttttaagtcagtgtgtcagctatcgatttatcacctcttcgttccaaatgcacctcgaatattaccagctccatgatgaagcgttaagtattctttgtagagagagagtattaggatttgtcagtagagggcgctggagagacaccgcaggaaggagaggatgctcttcctggtgccaggtggctgttttcttcttgcttcagaggcacccttgccagcagctctgttcctccattgcaagtccagagcttgcggttgctctgcaagctcacagccccacgcagcctggagacctcctcacacagtcctgctgaagaacacaccgggcactcaggctttgtgctgcccggacaaccttgcagcctgccctcctgtgctctggaggtgtgtttcctgctcacctgggccctgtggagctcacctgcaggcccatctagtgggctgcagccacagctctggcaccccagcaatgggggaggggctctctcttgcaaggttttgtccttccttagtttccctcgtacagctctaggatattatttgtttaaagattttttttttaaatgttgaccgttttttaaaaggctttattgaatttgttacaatgttgcttctgttttatgccttttgggttttctttttttgttttggccatggggcatgtgcgatcttaactctccaaggagggatggaactcacacccacccctgccctggaagacagtccgtcaaccactggatggccagggaagctccatagggcgttatttagagtcctaggttcatgtttatagttactcctttatgatgttgggaaattcttcagagtcagtaatctttatattaagctttccctgttcaagttcccatggggctcctgtctcctcactggtcctcctgggactgtgtcagtccagccatagttctcaaacactggttttcaggacccccttctatactcttagaattattgaggactccaaagagcttttgttcaagtatgttatacctcttgatatttccatataaaaggaaacaaaatttaaacac

SEQ ID NO: 40195 - DNA, 900 bp, Bovine  19866881364449
  misc_feature (1)..(1): n is a, c, g, or t
ngaagagatgcagaggtgagcttacctgggaatttattgcttagcagggaagctaattcttgtaatctagcaaaaatataaagacaaacccagtgcttaaagagagaaaaaaatgaggtttttttggacaaggtagcatgtgagctggttttaaaagattggtaagatttagacatgcaaggatgaaggcatccgtagtaaaggaactcatgaatagacatgccaaaatgataaagcataaaatagttcggaaaaatgaagcctagaacttcagcttcagagcctgaaaaactcagtttcaaatccgagctgattaagccagctcagacatcttggaggcacaaagggttattttcctctatgaaagtgatagtcgctcagtcatgtccaactccttgcgacctcatctttttctctctttaagcattggtttgtttttgtattgaacctgcatctcctgctctgcaggcagattctttaccatctgagtcacctgatgttgagatgtagacacggctttggtcctctgaggcaacacatttcctccaatagtgccccattctttccttccctccagcactcatttcatgccatggttaagatcagttactcggatttataaagccacctgcccaaggacacatacttttcagagcctgaattcaacctgaaatctcttgaatttcaaaactcccactcagccaagatctgctgcctacatcccttcacctcctgcactagaatctgtctcctctagttttaaccatcctgggagctcagagtacacgcatcccacccacaccttgctaggcaaccagcagcctcaggaaaacagaagacgtagaagcttaatgtcaccaactgacctttgttcttctctgcaccattttaagaacaaac

SEQ ID NO: 40196 - DNA, 744 bp, Bovine  19866881675145
  misc_feature (1)..(1): n is a, c, g, or t
ncctgggaaatccatcgacagaggagcctggtgggctcagtcctggtgccgaaaagagtagacgtgactgagcatgcacgcaagacgtaaagaatcccacagtggccaaattcattgaacagaacaagaccacacaaagctggaaagagatgctcacggtcccccagcaaccgtctcctgcctccaggaccctgatctaccggatccagctcctgcgctgcctttgctccagagccacctctgagtcttgctgaccctctgccctctcccccaacatccatcagagtatctgggaccccctagggcaactcatgtctctttgaggaataagtgaatattcagctggaaatgaacaccctgaattttgagcattagctaaaggctaggtaggcaaacacacccttatctataaacttgaggaatctcctatgaagtgggtagaggctcccctctgcggttcatgtgcttccagaagaagagcagctccataatcacgctgtcttcctggagttttcctggcaaacccacaggctgccattggtggtgacatggcctgtggctttcagccttgctctgcggtttccttaacatgaaaccttaaaccaagctcttgaaagaagctacgtgggaagtaatgagcctcaaaaatgaatgcattgtaccagcaaagaagacatttaattagccaccataatagcatcggttagggttctctttttcttttctttcttttaaaaataagtt

SEQ ID NO: 40197 - DNA, 789 bp, Bovine  19866881762360
  misc_feature (1)..(1): n is a, c, g, or t
nggattgcaaggccgcaataagtagcaacttcagtgggagtgaaaaggaaagccaaccaagacccatgattattgtttctctcttttctttctcctttgctttggagtgggcaccaaatgccccggtccagctcgggacgctgcttctggcacgggctcgtggtccactcaacattaatgctgtgatcacaccttcggatgaatcttggagctaaaggaagagacaaaaagaaaatttcataaaccaccccgagtcttggaagctaaagtgccacacggtttcagggcttcaccagccggtctcttagatcgctagcgaccccaagtggccaactgcaaatgatggtattttttttttcttcagataagaaacctaaggcttttttttttttttttttttttaactcccaaagcttcttcaaatttaaaaactggggagctggaagatccatggatgtcacctcattttacaggaaggagaggttcagagaggtaaataggggtcccaaaagtcacacagcatattaaggtcgagttgggaagcagtacaaggaaaggttgcaagagattctgtggggctggattttaattccttaatggaaggaggaaaaggtctttccccacagaccacaaaagaaatgttgctagtacaaacgaattgcatgctgaggggggtgtgttctaacagatctgaagtttcattaggtgctcacccaacacacacatttctttttttcctcttctatctataaaatgaccagggcacttcagcttaatcaaggcagcctg

SEQ ID NO: 40198 - DNA, 1085 bp, Bovine  19866881977024
  misc_feature (1)..(1): n is a, c, g, or t
ncttaagaggcccctgctacaagcatttaataagaccagggttatgaagtcaaatggcttggcacataggtgctacgtaagcgcttgttccaaacataaaagttgcaactatctcccaattccatctaaataaaaggcaacctcagaccagaagtacatcgcaagcctacaaacatcccatatgaacacagccatccaggcagctcaccactcactctgctggacaaggtggtccctgctccctcatcatcgtccccaggcgcagcacagcccccagccccagtgggtgctcagcgaacatgtgctcaacacccccttaaatagaggggtctgggggaactgagatccaggtgaacacaagcaagcagaaagcgcatcctctcctgaccttccaaagccactcatattcacaaagggccttgggggccgaatatgatctgggggacaaaggacgcttttctgaggtttggcactaattcagacacgtgggcccagaggtctcacccaggtcagcggctcactccatgcagctgtgcttgttaacagagagagccagtgttccaggcgatgggctcacacagcatttctgtgggtcagacatgggctgggagcctgtcccactctacgacggcttaccctcccaaaggtcatcacggacccccattgtacagactgagaggctgaggcctagaggaattgaaccactcctggtggaggcggaggcaccattaacccctccagcctgcgaggttcacacagagttgcgagatgcccttggaggtcaggacctcatggagtagcgagttgattgataagccaggagaacatgggcctgtcctttcacccgcaagagggaggcacgagggctgtgagctgctgagtcagtgacgtgactgcgatactcactcgaccaggaactccaagggcgtccaggagctgaagtcggcttcgggcattgacttcctgttcaccggggtgtccagggtgaccctgcagagcagagacaagcctgtcacgtgtgtgtccccactcccaggagacgatggcaccaagggtgaccacgccgacgtggacagaccactcga

SEQ ID NO: 40199 - DNA, 1639 bp, Bovine  19866882002036
  misc_feature (1)..(1): n is a, c, g, or t
nccccgtactgttttagattccacgtgtaagcagtctcatgtgattcaaatggtgtcctataatgggagccggaccccagggcccagcacttgtgttaatatgatgggcaacatgtatggaggtgctcccctgtcctgggcctagaattgagtactttatccccatttttgcagatgggaaaactgagggttagcaaggccttgagaagctgcccaggatttctgcagtggtgaatgggaagggctgggctttggacctgcgcagcctgaccctaaagcctgtacttcaaactgctgtgccaacccacaggggcacccagcggtgaatgctggctgctcacaagctgttatggattcaagggttcagaacccttgcctggcttttcacctctccgctggcctcggtacgagtctgtgtgtgagcctgggcctgtccaagcctccgtttccttagcaatagaactaggattagcctcatggcttctctgataaccattaaatgccaggtgaatagtaggttatgtccttcccaatttccaaagatgtccctagttctctcttcccagcctccttggggaccctggcatgctgccctttggatgtgccagtggtggccagtggtccctgaaatgttttctccccgtttcccagggatgatcggctacggcatggccaaggccgcggttcaccagctctgccagagcctggccgggaagagcagtggcctgccgcccggggctgcagccgtcgccctgctcccgtaagtggctgggggtccctccacatctgaccccacccagggttaacgtgggtcctggagtcactccacaccagggatgagcgcgtgctgtcacctcagcccctgagagccgtcaaaggccctgacgacacttgtttggcttttggattatctgggctttcccggatggttgcttagctgatgggatgggtcttcctggcctgcgtcttcctcattttctgtccttgtgtccctcttgattaagaaatagtggacacatttaattttaatatctgtagctctgtctttcaagtcatgttaaggtcagcatggaagaaagactcctgtttggtctgtgggtgtgggaagagaatttggggagaatttggggaactctgggagatgtttctggaaggatttccagaccaaagaccttgtctcttggctttagtcctgaaagatgatgtcggtgggctggggcgctggacggtcctctcacctttcattctgagattctgtgacctggtcccagggctatgattctgagtgatttcccaggcctgaaagttctgggaaagtcattcatttcagaattctgtattctgttattgaaagtcataagattccctggaaaacagtacacaatgaaggatgaggctgtcttccccccatatttaaagaaatattattattacacttaaaaaaatcctgagaaatgagtctgctgcattttagggagggaatggagacacaggcagaaaaagagtttactgcagtaaagactgttttagaaaaaggcaaaacgtggctcttacccaaagtgccttgctggctcagggctgggctgggctgtggtctctgaccgggggcagcttcccagcctccctggtgagcttcgag

SEQ ID NO: 40200 - DNA, 1849 bp, Bovine  19866880340147
  misc_feature (1)..(1): n is a, c, g, or t
nggacaggcaggatccgctgttgtcatttcggtcaagccggacggcctcaggctgtcaccctgatccccttgccacggccgctgaggccagcccccgccaacccgcatccccggccgggctcccggctcccctctcccggacccctgccctcaccttcccccggtgctcagcgctgctcgcccatagtccgtagcccggagccggggctactcggcgctccgtcccgggggaccggggccgggcaaggggcgtgggagccgctcaccgccgtctcccggcgcagcctcccgagccgccgccgccgccgctgccgccgcctccctccatggctgcagcgccgccacctgacaacggaagtgacgcaccgccccctcctcccggataggccgcggccccgccccttgcccgtatctacagcccacggctccgggattggacgccatcttgacgaagggcggaagccttcaggtaacagaccagaatctgattgaggattggtttagggtggagctcgggctgaaatctgggaaacgattggagacaaagactctaaggggcggtacttaccgcttatctgaatctgcggtgaggttgggccggaggcaccgccccctccgctactccactgagcctcgcgtgccctacactcgccctcccggatctggagacttctccagcagctgaaagatcggccggttgtagtatctttgtcagagaactggctctttcttgacccccatttctcgcttcctggagctttgtgcggcgagcgctggcgtggggctcatcaatgacaggaattcctgccgtagcccttacaattcatttccctctgggcccctcgcttttgtagaaatcccgcttcaatctgaagatccttagagtctcgaccagtcaggttaacagtgaagagttcctgttagctattccagccacctaacctcagcccctcctgctgcagtttcggtccctttctcctccttctccagcaaccacgccctccatgaatcagcttcttgcaccagcagatgagccctttaaagggattgcatcaggctgatgactcactggggccctctgagagcctggcttccctccgctggcatgcagaagcagctagaagggcgccgtggtggcagtacccgcgatcatggacccactcctttgtctccgaggtgtgagccagtatgccagctgcatatgactgtcttaactcctgagtctctttccagctgtgttattctgtatccatgtgggcacacgtgtccaagcctgtgtgcacagctctggattttcctagggtgtgtggccaagcacttacgtgtatgcacgcatttgtcatctccacacaggcagtgactgccaggacatgagagctgatgtgagtgagtctggctgcctcctcctgtgtccttgtctttgtctctatatgcctagtgctcactgagctgaaagggctgagtaacagtagtaatcgaaacagcagtagtatgtcagacactgtgttaagcgctttagagacatcagcgttaaggagtctgtttgcagatgaagcagctagaactctgagagggaaagtaaccaaagacacatagctaataatggcagagctgtgatttgaaccaagtctggcaggttccaaaaaggttggatttgagtccttgctgtgtctcttacaagttcagtgactgtgcaatttccctaatcattcccatctgtcaacatagggataatactttgtgggctcactgtgaggatccagtgagtgtggaaacagcttctcatgggacctggtgaactaagagtgcccatactcctctcagtacagtggaggactgaaagcaggca

SEQ ID NO: 40201 - DNA, 1386 bp, Bovine  19866880395993
  misc_feature (1)..(1): n is a, c, g, or t
ntaggagttacttggcgcactcacacagacacatctctgcacacccacacacacccatctggggcacgcacacatacatgtaatgacaacacacggctacaggcgcctatcctggcacgtacggaaccaaacacgcctgcacagatgctgagatgtgggatccacgggacccgaatgcacgtgtgaacacagggctgtgtgttcacactgagcccacatgcagatgtgtgcacatagagccacgcgtgcccggccagaacccagcacaaacgcaccttgttcttctccagcttctgccgctgccgctcctccagagctgcccggcgctgctcggctttgagccgctgttcctccagccgccgccggcgctcctggagctgcttctcccgcagtgccttggccttctcctccttctccagccacactgccttcttggcagctgcagggggttggggaaggagccccgagggtgtgaacatctggtagcacctgggcccccaagtgtctgctctgagtggccttgcctgttcttccggcccggggtgggtcttccccactgcctgcctactggggagatgcctgtgttctgagactacccccactcaagttgaagggcatgctgaaggtgggctggggcctcagaatgagggcttcccgggcaggaggcctatttcccctccaccagcgtcgtggtctctgggcacccgagaagaagtgagctctttagggccaggtccctgtctaacttcggggcctgctgacatattgtgattaagagcatggggtgagatgaggcttctgggtctgagtctcagctactccacctagctgcgtggcttaggcaaaggactgcctctttccgagcctctgtctccccatcctcaaaatgggtacagggttaagtgagataagcgaactgctcttagcacagtgtacacaacagagattcccaaagggttagtgctactaacaggatgtccatgggggtgaggctgaaggggagctgtcacacacttacccaggtacttggcccgctcttcccgccgttcctttgccagcttgtgtctctctcctgccttctttacatcttaacaaaaggaataagaagagacttaggtcaagaggttcctctcaaaggggagtcagcctcagggccctgcccccaggctgcatgcccacgccttttccatctcctccggagcccaggagactccctctggggtcatcacccagggctgggactgggcccgggatgagggacatcactcataccttgcttggtgggagggctgtcagaggcgggtgctgctggcggggatggctggctgctccttcgaggaggcctggcatcccgtgggcccgtggctggtggggtgggtcccctgg

SEQ ID NO: 40202 - DNA, 672 bp, Bovine  19866880398489
  misc_feature (1)..(1): n is a, c, g, or t
nggagtaattacaggcctgcaccaccgccttacccaggtctctaatctgctccgggtctctcccggctccgaactgggtggtcctggccctaaacctcccctagactcatcggatgacccccctcatgtacccgggaaggattttctcccctgtgttctgtccaaggagggagtgagttccttctgacccgcctcccccaagtagttctgcttcccagcccagggaagtagatcccccaatccccttgttagtgccagctgaggtgggcctcaatccaagtcaggcccagcctgggcagagaggggggagcttgctgggaaggtggatcgatgctgctgctgcagggactgacggggcggaaggagcaggcgcagctgggccctgcgcaccccatccctgccctttgtcctgacctccagaaggtcagttgtctagttcttcatcgcccagagatgatgcccagtgacctgttgtcctcctgctcccctttcctaccagtgtcttcttcctttgagcaactccagaaagcagtcatttattttttattttgattttatttttggctgcactgggtcttggttgctgtgggtgggggactactcttcattgcagtgcgtgggcttctcactgcagtgccgtctcttgatttggagcttggactttagagtggg

SEQ ID NO: 40203 - DNA, 986 bp, Bovine  19866880495606
  misc_feature (1)..(1): n is a, c, g, or t
ngagtctgcaagactcctgtgacttgttagccttcagatggccctccagagcagcccttccgtctggtgctgtccacactgactcagcaagtgatgggtcccaaagagcagtgtgccctcagggcaaagatggtgttcccggggcctgggaggtctcatctagaaagagaccttgaggtgggatttactctggaggctgggttggccgacccagtccttcttctcaggaaggagagatgtctgccacaggccacctgggacccactcagccatcagggaagtgagagggagctgccttcatgtccttgtccccctgagctctgcagagagggatgtgctggtagatgggacttcacacaggccctttgaactggggagattttcacaggatttgaccttgcacttgcggtgtacagaaagtcaaagggaaagtggcctaagacaagggcatttcttcctcctgcacctgctcaggtgagactgtggccttgaaggtggcccggggcccacagcagccctgcatctcctctcgggatctgtcaccaagatccaagaagggaaagcgtggtgtcgcttgcactgatttccttactatcttagagatggttccactttgtctcatgcacgtctgggttattttgggtgatactgtgtcatcatggtttgtgtaatttattcagcaaactctctgctgatgaacttaggtttttctcggccttttgctcttcaaacaaagctgaagtgactgtatctgcatgtgtgtggttctgcccaccttaggcatccacaggataaattccaaaaggagttgctgcctcaaagagtaccttttataattattattattattattttaaagtagtttctcagcctccttctagtgaactggagcagcctggttttcccccagccagcaaagatgctccttcctgaagggaactgagaaccccagtggtgataaccctcttctggctcttcgcggtcag

SEQ ID NO: 40204 - DNA, 2747 bp, Bovine  19866880562243
  misc_feature (1)..(1): n is a, c, g, or t
ntgcccctacttttttgagaggtgggcactgcatttgggaagtacagacagacaaatatctctttgggacactgagctgggctcaagaaagggctggattcagggaaagttatactcattatttgcctccaagtctctctgacaacctgtgtcttaactgcttccagtctccatgtaaatttcacaccatgtaaatttctctctttcctcctcagcccttctctggcttgcttggctctgagctcctgtctgtctgtctcagagtctctctatgcctctctttttgtctctcaagggcccttttgtctcttaagtcttaaactctcttgagtatctgtttcctctcagcctccgggtgccgtgtctctgagtaccaccatcccttgcctcaggctcctttctctccccacctcagtctgtctctctgtgatctctctccagcatttcggtttgtgcaccccactttcctactttttccacctgtctttctctgtctgaaccacatctaggaagtcctctcccttgttttgtcccagccccctcctctccccaaccctcttcccaaggaaagaatcttcacgtgaaggggagacagaggcgtgaactggagaagggggaggcgagaaggctgagtgcgatgggatggaaaggagaggaaagaagaaaggtggtggggagcaggggttggtgatgcagtgaccccaggggacaacatagcgtgctgggactccagagtccagagagtgagcagggatggctggaagcaaagggggagactggggggccaaggagcagggaacccagaaacggggctttgaaacatgaaatgtgacacagacaaaagcaaggtggcagtcctaggaggcggagaccacacagttggtaagcaggggagagaggtactaaaccgtgctgattccatgaggtggtatcctgctttatggcacatgaaaataacatggtcatggagtgcttcctctatgcaagctccgtgctaagtgcctttatcacggaccatctcacttcattcctcaccccaaaccggagatgcgggagctgttgttatccttccttcacagatggggtaaccgaggctcagaaaggtggaataatctgcccaaggtcgccaagctggtaagtggtggacctggagttcagaccaggtggtctgactcaaagctgggcccccagaaagtgacaccatgctccacctggtcccagatcccgctcggcgggggtggggagcatccaaggctgccatgggtggaccagggactgatgccaaatgtgccaacccctggcaacccagggagaagatgcctgggcccttgggatttggggttgggttgcccactgggagccagtggagagggatgaagcggtacctcaccgggcaggagggctaggatatgatcaaaaatacacaggaacgggcacgagtgtcccgaaatctgagccaaggagacgaaatcttccccaacaagtgtgcgttggtggatagtcagatgccagaggaacaagggtgccaaccgctaactggtagactggggtcctctgaacaattgtgcgcgtttctcactgcacaaagctgcccagaaagtagaggctgaaatccagcctgttctctagttgccaggtccttgtgtggagctgcatttgtccagaggaagggatgctttgttcctgatgtgcaaaaagatgactcaggggctagcatgcacctggtatcccgatcctgcaacatataataaggagggaccagggatttaagtaagacccctgcaggcagaaacagctttgggtatctgcagttgttattcactcctctgtcttggagcgaaagaagcttaatcttttctgagcaccggggatcggctgggacaccacctacatgtatgtgttcatgtatgtacatacaaaagctggtcaacgattcccactgatctgccacccagatgtcagttagtgctggaggaccaggtgtctggccccaagaccccaatgggagcagaatggaaaggctggaagccaccccagcaatagaaacctttgcttacttcctgagattaatgtactaatgctccctccatctgggcactgtcgccatgaccacaggatatctggtcccagaaggcctccagaggtctgtgcccagaattggggtatcctctcaacccacccttccctttagccattgctggggaagccagcttttcaaggtgcagcctgtcctcagctgttctgtgggagttgtccctttctgccaggcagtgagcgtctctgactcttggagcatggctcaccttgggggacctgcccggtactcagacatgtgcaatgtgacacgtgccagggagttaacaccccaaggaacagtccttgaccaacaaggggcaggaactggtggacaatgttcccatcctgtctgccagccaagttctgaggcatgttcagcgtggctccttgcaagattccagcaggattgagccccagctgtcctcagtttgatgatgcacccttgtgttggctttccttcttacccgtttcattctctccactcccttactctgttcctggagtcttcccccaaataaactacctgtaggcaagccttcatctcagactttgctttcagcgggctgggagactggctaaaacagaagggaacgggaagaatggtgttccccgtggctcccttccctgctctctccttaaaggcacatataataataacagtcatttaagag

SEQ ID NO: 40205 - DNA, 1993 bp, Bovine  19866880563297
  misc_feature (1)..(1): n is a, c, g, or t
ntctcaagcaaggcactggtatctccgggttcagtttctcctctgcaaatcttgtgggcatctgccttgatatttcatgctaggagtagacagcctttcccaagatcctgtactgtgcctgtgcctctcacacacctgtctggctctacagttatcatgtcccgctaggatgggtcctcctgcggacggactgagtttgactccctttgaatcccccccagtctggtcctgtggctcagcacagaacaggcactctacaaatactcgctggctgactgcatgaatgaaataaggggcttacttaaggagatgtctgaaaggtaaacaccagatagagataacaagaaagcctcagccttggtgtgtgcttgcaggtaagggagagacaaggcagagatccacttgtcctctccactctgaccctgctctgccattacactaataatattaagcaaataatattaagatctagtaagagaaatctgaacagctatgcagactgcctggggatgggaaaccaggctctccacctgggaagggcggacacaaggcgctgtattttaggtaagcctcggtagtgtaaggcccctgcctctcaatggttcatttccactcacgcccactctaaaagctcctgctcccatcctccccttctcctgcccttcatggcaggatccaggcccacgactttgttgcaagggtgaatgtgggcttcttcgcaggacctctgcaccatcacccctccacgcctgcctctgggtggctttaagtaaccacctcaagcctcccaggcaattgaatctttcttccgcctcaagtcgcatccagttcctacctggtttctgggtggcatatccgcgggcagcctggaggatgagacctacgcaaaaaaaaaaaaaaaaaaaaaggtcgggggggcttaggtccgtctccttcaacagtccagccgtgattctggtctatggccgtcgcattacccttcctctgtgccgaaccgccgccgcattttttcggcaccaggataccccatgtctctcccacctcacttcacttctttcccactcaccactttttctcctgccgctacaccgtcccccagtagcctcttcccccctcataccctctatatcctccaaatcctatttctctactcttgctgtccggcttctcagctcacctccaggacttgagggaaggtcccgctggacggagagaagcttggcgcaccctccgcccggcagcccgaggaccgggggctgtgtcactgcctgggttcgaatcgaactcagcgccctccacgccgccctcagcatggtgacttccgacccccaatggacccgcgcacggccgcgtcgccttcgcggtacggactgggttacacgggcgccgccatgttggctccggctcgaccaatcgagtgcagttgcgagaccggagcagatgaggaccgagatgatggattgacaggtaggcctccgtgatgacgcggagttgggtcaagtggagaggtctggttagctctagcgctccagtactcttgcctggaaaatcccgtggacggaggagcctggtaggctgcagtccatggggtcgctaagagtcgggcaggactgagcgacttcactttcacttttcactttcatgcattggagaaggaaatggcaacccactccagtgttcttgcctagagaatccagggacgggggagcctggtgggctgccgtctatggggtcgcacagagtccgacacgactaaagcgacttagcagcagcagtagcagcagcagcagcagctgcagcagcgcgagactggaggggcttggttgcctggccctgttagtggcgtgaggtgctgtatcagctctaatgccaccttttcttgatcatgcatcctgcccttaatcccactccagtttcctgacgagttatcctaagggcttcccgtgggcctgtcagggtcttcttcccccgacctagaatttccatcccctct

SEQ ID NO: 40206 - DNA, 4999 bp, Bovine  19866880671717
  misc_feature (1)..(1): n is a, c, g, or t
nacttcttgttcattacctgatttagtgctcaactaacccattgaataggttctgttactatcctcagacgaccaaagagaaaggtagcataacttaccaaaaaactcagagccaaggagaggcccagctgagctgtgcgcctggacagtgtaacgtcggcaggccatgctgccagcgtacaaatcctcagcactttgcactttcgctgccttgcgtgcaacagatgcttattcttggcaatgttactgatataatcttgtggaattttagagtttgaaggaacgcttcaagtttatctcactttacagatgaggaagaaactgatttttttttttttttggccatgctgtacaacttgtgggatctcagttccccaaccagagactgaacccaggccccctgcagtgaaagcacccagtcttaaccactggactgccaggaaactccccaataaaactgatgggatttaattcaaccaacacctcaatacaagagtgcatgaagcaaggaggagaaataagcatagtgtggggttttgactcatgtagtagactttcagactctatgcccgctggacccacccggccggcccctcctcaccagtccagcacgtggctgagagcttgcagtcagaaacacaagggtgtgaatcctcagctctgccccttatgagctggtaggcctggagggagtggtcaacctctgaggagataatgagggtcttaacagctccagcctcagagctatatagagagtttataaggaaccaaggaatggacatagaatctggagtcatccttgattttgaatccttctgggcaagtcgcttcactctctgaaccccaacctcctcatcgtgaaggcaggggtcgcgctatccatgggcttccctggtagctcagctggtaaagaacctgcctgcaatgcaggagaccccggttcgatccctgggttgggaagatcccctggaggagggcatggcaacccactccagaattctaccctggagaatccccataaacagaggagcctggcaggctgcagtccacagggacacatgagttggacacgactgagcgactaagcacagcacagcagcactaccctccctgggaggtttgttatgtggctcaaagaggttctgtttgtaaaaacactatactccgccagttgtttgtcatggtgtgtttttctctcgtcttaagccattacacacttcccattctcagaatgcatatgtctgtggaaatatgccaagaaaatgacaccaaagtattttttccccccaggtgtccatatttctaaaggacaaagttcagaattccagtggtcgcttcgtgttgccagtgtccgggcccgtcccctggggaactgaagtccctggactcatcaggtgaatgaatgctcaacagtaattgtcagaccagtgttcagggggccgggaaagcaatatgtgggccgccacatagactgcagccatgctcggcccctccctttctccagttaagcacagcagagaggaggtaaggtttaatcccagcttgtcacctagcagatactgcaagatttatttcttcatctattgaatgtttactgtgaggatgaatatgataatactgtaatgctctaaagtgctacacaccacccagtacatagcatatactcaataaatattattatcattattattgtattactatcacccagctggcgttagcggtaaagaatccacctgccaatgcgggagatgcaagagacgtggatttgatcctgggtctgggtcgggaagatcccctggagtaggaaatggcaccctgcttcagtattcttgcctggaaaattcgacagacaaaggagcctggcgtgctaccgtccttggggctgcaaagtcagatgcgactgagcgcacaaacccgcacacacacacacacagttacatcagctagcatctttattttgaagcagcatgtaaattccctctggtcccatagtacaaagaatactgaagcctccggggctctccaggcttggagagcgtggcgtcacgtcctgctttgtcttttttttttagtatttatttatttggctgcatcaggtcttagctgtggcgcgtgggatcgcttgttgagacacgggctctctacttggcgcacagagcgtgcaggcttagcagctgtagcgtgcgggcttagctgctctgtggcatatgggatcttagttccccaaccaagattcagacccatgcgttgcgcggtgagttcctaaccactagaccaccagggaaatcccatcatgtcctactttgtctcgtagaacattcaacaacaaaggcaaagaagtgaagaggacagaatttaagcacggcgggagctacgtcgcggcccccaaagaagggtctcttgagctctatggagaccgagtcctgaaactgggaactaatatgtaagcaaattcttccttccccaaatgaattccagtgcagcagaggtcccttcatttaaaacactggcttgacttctgcagtgaaaaacccctgctgacaattgaagaaatttccccttagagacacggcaggcagggcccccgcatttccaaagggcacctcggatcttccaccagaaggtagattaacaggtcaaaaagataaataacttaaaaatagccatacaagagaactagccaaaaccttttaatgcagtagagacccaaaaggccttggccttcatgtaccgatcatgtttttttccagaaatacacattactttgcaagaggaaatatcgccatacagcttcctaggtattttgatttgggaagaagcaaaacttgagtggttgacacccacttagttatagtctgtatccccagcacctttctggatgctttttgatacctcagagtaaaagctatgcactatatttacgagttagaaggaagtcagggtaagaggcctggacaatgttttcgtggttttccgttgccaccaggtatagcgtgaaccggcccgtggaaacccacatgtctgcagcatcaaagaacttagcttcacagacgcaggtgagcttctgcctcccgtgtttaccttcagagctaatttctagataccagagtctggacagggagaaggggaggggtctctagagttcagagctggccaaggctccctccttgtttgcagtcttctccattccgccttacccagtacgcaggtttttaattatagtttctcatggagacttccagtgatctgactaattaggtaattttaagcttgtctccaccaccataattaagcaggaaccacacataaggacatgtgaaatagcattgtaccagtgctgtgaggtccgtggctgctgagttcagcacttgtgtgtattctgatcgttaaaacatcccctttccctgcttccctgggtgatgatgtgaaagttgggttcaaaatggggtttgggttctctgaattcttttgtacaaattttcactgaactagctgtcatctagctataggccccatggactattcagttatgctataaacatttattgaactgtgtctatgggtggggggggggcgttcccaggacacagagctggcttagatttggtcccatcctgaagggccttgtaatacgctaggcttataaagacagcaatagaaacaaataactataacctggcggaagacagaaggtgaactcactgagcattctgagcaaagaactatgtcagaacacatatcctgtccaggggggtgggaaggagccccctggacagggaacaagaaggcttttcggaggaggggacattcaagtggggctctggagcgaggcagatgctaaacagctcagaaggagaaaaagacacacaaaccaagatgacaggacgagcaaaggcaccagaggcacgctcctggggggaagcaggcagtcagcgtccctctcgtgtagctggatcataaggcgatagcagcagtggccagagacccgcccagacaggcacacgggcctgattccagaggcaaagcaggggaaaagccgggttagagagagccaggtaggaggagggtgcaggctgcagtggggccaggccatgagagaaggagccacgggagagaagggattcgagggtgtgctcaccggtcaccaccggagggcagtgtggtcgctcctgtggaaggagtgcccttggacctggaggcttcacccaggccgcgcgggtaaaggctgggggaactagactgcctgaagaggaagcagtgttctccttcgaggaggaaggtggtttgaggagaacgaggatccctggggccttccactcatcttgaaagtgtgagaatctctggcttgtcgccttgctagagtccctctgcttctgacacgggctatttctcttctggttctatttcctatgcttcgtgtggacccagtgcttcccagaaatcatttagacagttactgttttgccttgttttgaaataccaccctgggtctctggggtatcagcaaggaattgaatcaccttcacgtggctaaaaattatgaaattgattttgcaggaaagcatcgttccaaaccctcttgctaaagaagagctgaatctcttggccaggctgataggaggcatggagattcagaaacccagtggccctgagccaggattccggttgaatctcttcaccactgatgaagaggaggagtatgttttcaacctgtttctttaaagacctatgtaaaaatcctaaatgtggtaagaaccaaaaaatgaccatcagaaaccaaataagtggttcttatcacttataaacacagatgtaaataaagttcaaaaatgaaagatcagcaaactcaacaaccttagttaaagaagaacccactagtattaaatggcctgaatcttttggatttgttcaaaaagtagctctaacattttatttagctcagttcaagagaatggaagtcaagataatcatagtttaaaaagactgttaagaaaccaga

SEQ ID NO: 40207 - DNA, 944 bp, Bovine  19866880709453
  misc_feature (1)..(1): n is a, c, g, or t
ncggcaaatggggcccaactcacccaagaccctagaacttgctgggcctgacttgccttaaaaagtaagagtgagagtctgaacaccaaagagggggacaggttacgatcgggacgggagggtgaggaaggagcaccttggcagcatcctgagtgggctgaagacagaagaccaggacaaaaccaggacatctcggggaacaccaagtgggactgcccttcccgtgctttggcatcttgaaaggaaatgccctggaattcaactgattccaaagaaagtgatggggaaccctgaattgactgcaattaagtttctgccactctggctgagtaaagcaaaatatgaattcagttgagttagagaaaattcaagttatgtttcttacacacttgagattggaacgagctatactcctgacccacaaggccctgtatcatttgcctcacctctttcccatttctcctgtctcacctgtctgcttctcctccaccaacagtcatagtggtatttggttattgcccccaaccctcaagctttccacctcaggacctttgcattggcgatttcctctgtcttcccttggctctttaaatggtaggtgccttctcagtttaaatttaacttcttcagactacacttttgaaaataaaacctattttctctccatgtgccctgtttatttccttcctgtttacttccttcctgtatatttttctctgttcatctccccctccagaacgtcagctccatgagagcaggacccctgtctctcttgttgctccctcagtagctggcactgtggctcatattacttgtggaatgaatgacccatggcttgccatagcttggtggcactgagctccccccaatccctacctgggccctggtcaatttcccagcagtccaggaccagatgccaagacccataacctggtagagctgtg

SEQ ID NO: 40208 - DNA, 737 bp, Bovine  19866880806455
  misc_feature (1)..(1): n is a, c, g, or t
naccctctgcccttagataccaaggaggcaccgtgcctcacaggtctttgtagaaatcttgcatctctcaatcctgtgagggaagacatggtgtccccattttgtagagtatcagactccccaatgtcatacagcttctaaggggaatcagggctgaaagacatcaaaaccaggcccctgtgtgcagcctctgtcctgtgcagtgggagctgggcagtccgtccagtccctcccacagtgcagtgtgacaggagaaagaaacaatgactgtagaattggcgtgtctcaagacagactgagccatatcccagctaaaatggaaatcctcttttgccctccctgcagtgaacctggaacactcgagctgacagccccagtttcctgttaccacatcattgcatgttctcagcctagcagatcagatccatgcagacttttaattcctgagaaatggcaccccacttccagagaggctcctgttgtaaaagaaatttttaaccattcttgcttttcaaactaaaatgaagacagcattgcttccccttccccctttccctccacacccgtctctcattgctgtggttttttcccacagggttgatgatgttgtgaaaagactcatatctttggaaatggccaacaaggtgagtggcctctgccaagctttgacctctctctgtcctctggagactccctcctaccctgctagcacccccagcccatgcttctcaagtcag

SEQ ID NO: 40209 - DNA, 1363 bp, Bovine  19866880859698
  misc_feature (1)..(1): n is a, c, g, or t
ntttgaaagagggacttcccaagaccatccctgacgggaggaatttgcggagcatcagagtgagggttaggcagggtgggaaagaattgtgtggatgatacaggattactgcaagttgcggacgccacccagtggccataaaccaggcgatagggagccatgttacaagagttctctgtgcgcggagcattctgggagttgtagttgggctgcactaaggggtggtgttaccagtgggactgttgggtgctgtggttcggcgtttattgcgcgggaattaccctcgtctgccggactacgagtcccgtggtgccccgcggccagctgcgcaggcgcggtgagtcggtgccggtcaattcttaacgctgagggggcagctagctgggtcgagctgtgttgggaggggttgccgagtgggtctgtggtgaggcagggtaaggcggccggcacgatgtcgaggcaggcgaaccgtggcaccgagagcaagaaaatggtaaccggagcgtgtgacctcggcgggtggggcggaatggaggtgttctggggaaggggcccagcgcggggtgcaagtctcaactggaaaggcgccttctacctgccctgggagggagtggttcaactggagggaaggaaggggctcattggtgggtcgagagcggagattagctctgggagcgtcccgagtgccgggcaggttggagggccgctggaggagctcgaagacctcttcccccgcctcctgagtgctattgcgtacgagaccaacaacgacggtgacgataatagtagctcccactgttgctctcttactgcgttaggcactgggccatgcactttacgtctgttatctcatttaatccgcaaaataactcgtcaggtggatgataacatcgccgctttaaaactcagatgttgcataacttgcccctatttacagctaagacgagttaggatttgaacctaagtctctctgacatcaaagctaatgcttcagactactggactataatgtctcccacactgtgccgtggtcattgtgagatgctcaggtactgatttaaccagaaagcaagaaagtaaggggtgggccagagtaggccgtaagtggtctccctctggtgaaggtggacaggctcccttcttgtcctggaaatagtgggacacctgtctatcctagaaagtttggctgctggtgagggctgggcctggaaagtaaggttgatgatgtttttctccaaactaaggggatttcttgacaggtgtttgttttctttggcatcttcgtacttcctctagaattgcccatttgtctttattttccgatttacaaactgagttattgaaggtcgcatgcagggcagat

SEQ ID NO: 40210 - DNA, 2187 bp, Bovine  19866880888682
  misc_feature (1)..(1): n is a, c, g, or t
ngctggcagagagtctctaggccgggccagcttctgctctgatctggatttccttcagtgagggagctggatccaggcagctggttcatatccccatgcactggggtgggcaggtggaagggagagagaagataggggcatttttcctaaaaatcctgcccggaagagtagccaggagaagtcaaataacctggttaagacaagagaggggtgaaggcaggcccataacttcctagatgagaacctggaatctgcattttttctgctgctccctggggtgcctggcctggatcctgagaggaagaggggtcatcaggctttgccagtctgttcccttggtcctatgtcctctgtccgtctagtctggagccggggccacagatgggggcttttgcccataggtgagcctttgggctgggggcccccaggaagaagcagagggatggcggctttcgccacctcctgtggttacagctgttctgatgagtggtgtagactgctggggcaaggcctggcctattagctctgtcacctctctgaccgcccaggcttctcctgtgtttgctggaatgtccggttcattcagttcactctctcatttattcacctcgctccccttcccctgcctgcatatccctccatctcacttttcccattcaccctctcactcactggtccatccacacatccatctacccatctgctcactcatctgtccacgcatccacagccccaccgtcaatccatcacattgccacccatgcactcacctgtcggcccagccctcatcagttcagcaaatgttttctgtgggtgtaaaccttccacacacacaagctcttcatgcaacctctggccgcctcccatccctcccatcctacctccctgaggcccttatgaaaggaagcagctcctcccaagttccaggtatgacaggaacgaggactatggtgggatttcctgttgatcgcaaggttgtatccagatgtggctcctgggtcctcatctgaaggccttgccatggagctgtgtcgccctcaacctttccctggtacgcgtcttctggcctcactcgctcttgatttgtgttcctgcctcatggtcttcctctccactgccatcctgccaccatctgggggcatcttactggccacgtggatggtgcccccccatccgggttcttcatttccttgaccagtcacctcatggcttttccactttagccgccagagctgtggtcacactatggacctcagcatcacctggaactactcaacctctcaaacctcacactccaacgcccatctctttgcccacatccctcccttcatctagctctcacgcctcctgcacagctcctacactctcagctcagagagttcaggcctaggcttcctcatctgtcagcctcctcctcgcctttcttcctttccttctgcctgggggggccagtgacgactcactgatgacttctgactggagacctgcggtacctttgcagccctatcctctctcctctctggctagaagagcctcatggatcatgctgtcactgcctgtctccccctccccagcccaccctgtcctggcgtggggcctgtgaagacccctcatggaagacgagacaagggcctggtcctggctccagtttctcctgggctctcaactgtccatgaagctgtattcttgtcctgtgtccccaaactctcctttcaatgctttttgaggcacttgaaggcccttttcaagagttccctcccaccaattctcgattggccagtaagagagcctcaccttgattttctgacccccaaacatgcctgtcctggcctttttccaaaacgaggcatctctcccatggtccaaaaccaacttctccttccacccttcttccaagttcctcccacttctgtagtgatcttcaccaccatttctgcctctgcttttgtgctaataataacaccataacttcctctgccagtgcttcctgggtgctgtgctctgctttaaacgctctgcattcttttatgtatctaatctttatggctgttctgggaggcagggtctttgatcaccattgccccataccaaaggtgggaaaactgagagagcaggccagaggcagagctaaggtcttgttctgagcctggaaacttgactccagattctgtgcgcatgcccactgtg

SEQ ID NO: 40211 - DNA, 867 bp, Bovine  19866880953943
  misc_feature (1)..(1): n is a, c, g, or t
ncattggactcccagggccctggcttcttctcttcctcctccagcaccgtgatcttggtgatgggtggcatgccggggtcccgaaggctgggcagctgtaagatatcctgacataaagatgtgtggtgagggcctggtttgtttcagatgtctgttccagccactgtcccttcctgcactggggtggtggggggacattcctgctgttccttgctggaacgcaaagggttattcaggggatgcaaagcacctcatatgtgccggacgcgtgctatgtgctgttcagacttagcccggtgaatctccccagtgcttttgtgtgtgatttgtcccatttcacaatgaggtgactgaggctttgaaatgggtggagctgggattcacactcaggtctgctttgctctataaagaggtgaagtgatgggaaggcctgagtactcattcttgggggagtttcccttcactttgagcctggggtaggagcctaacccgcagacccatttccctctccctccagtgttctcacctccgccgtgatggttggcacccaggaacccaggctgctgcgggctgggtccgggacactcggccagagggaatacttcctgctggagaagagggcaggtgaaggctgggtcagcatgccctcctgtcctcccagcatttctcccaccttctcccagcagcagaagggatgaccccttcgtgcagagaggagaaggaggggggcctgactcccagacctgaaccctgtggcctggcaagtctgagaggagccagccttgctcacttgggccttcagttccttcggcagggttacctgggtgtcaggtctactcagaaggactcacctgggtctgcaacaga

SEQ ID NO: 40212 - DNA, 743 bp, Bovine  19866880965765
  misc_feature (1)..(1): n is a, c, g, or t
nctacccgccggcgcagtacgtgcagcccatgcacaaaggccccgtggggccgcccttccgcgagggcaagggccagtacctgggtgagcatcgcccgccccgcctcggcccgtcctcaccccccagctccctgtctcctgacctccaccggctcttcccaggcccctcacagccacagcccgtccatcccaccaaagaccttcccatctccacttgcttcttgatgcgggtccagggcctcccaccccaagagcgcccggaagtggggtggagctggctggcggaggtggtctttgggtaggggaggggcgggaaggtttgtggggaaataggaagggttggcgccgattggctctaaggagggctgctggtgccacctggtggccattccaccacagttccgcaggaatgagaggctgctggggaagggaggcccagcctgggtaggttgggaaccaggagtcctggctgtggctaccctgcagctcccaagaccgccaccagaccacccctaaattgcgtctttcatgagagaagggagggaggaccagggtggtcttcatgagcaggtacagaaccctaacttctcaagttggaccccatgctggctagggagtgggaagatgggtcccctggccccactggccaggcccctgactgccttttttctttttctctctcagaaatgcctctaccactgttgccgatggacctgaaaggagagcctggaccccctggaaag

SEQ ID NO: 40213 - DNA, 769 bp, Bovine  19866881046925
  misc_feature (1)..(1): n is a, c, g, or t
ntgcgccctgcaggccggccgtaccggggcaagcccagcgacatgtgggccctgggcgtggtactgttcaccatgctctatggccagttccccttctacgacagcatcccgcaggagctcttccgcaagatcaaggccgccgagtacaccatccccgagtgagtccccgctccctgggcgccagcccgtcaggctcgaggggcagaaacagcacggggaggcttggcgtcctgggccgagacctggcaccagcccaccccgcctgagtgcccgctgcccctctctcctgcatcagggacggacgggtttctgagaacacggtgtgtctcatccggaaactgcttgtcctcgacccccagcagcgcctggccgccgccgacgtcctggaggccctcagttccatcatcgcgtcgtggtacgtgggccgggccagagctgggtcctgcccacccgtgggcactgccctgcctccccagagaggtcgcctgaggttgggcctgtctctccaccaggcagagtcaggtctccagatggtcctgatgggcagggttggaggacacaggcaaaactcagggttgagcatctcctgcgtgccagtcgatgccagctctaggatgggccttatctccctgagttctcaccacagcctgcaagatagaagttgcccccacttactgggcgagaaagctgaggctcggagaagcagaggcagtggcatcaggaaggggcttgtgggtgctcagcccaggtctgctgactccagccaagt

SEQ ID NO: 40214 - DNA, 900 bp, Bovine  19866881053704
  misc_feature (1)..(1): n is a, c, g, or t
nccccctgcattgggagtcttagccattggactgccagggaagtcctagggactatgttttagctggaaaacactagaactttgtctcccatttccttggcagaatagactctatgtgtgtgtgtgtgtgtgtgtgtgggtaggcactgccaccagcttaacttggttctggctagtgataataatagtcactaacacatacggaacagttactttgtgtaggcacatgtctaaactcatgtaatcttcacagcaatgctttgagttagacactgtaccattcccatttgcgagatgagtaaactgaggccagggagggtaagtaacttgcccagatctcattgctaacaagtaacaggattagatttgaacccaggcagtctagcctctgaatttacttgcttaaccaccatactgtactagctgtgggccctctttacctctgctttccaagaaaaccacgggggtgggatgcgaggtcccagctgtgttataggccttaaggaccacctcccgggcttctgaaggcagttggaaggtacagttcagctccgtggtgtcacagagggttggctctgccccagcctggtctgagggtctccaggaaaccaggtaaccttggatctgtccgctgtcttcttccagggctattggctgttagtgggcataggaggaaaaagataaggagatgcgcagctcatcctgagtaggggagagcttctagatggagtgtccgtgtccccggaactgagccacccagactgggagtcagtcctcttccctccctccctgccttctcccccgtgctaggtcctagaagagaggaaaggataaagtaactcagtgtgagcagcaggcacctaacaaggtgagtcctgcattgagtctctgcagaagggc

SEQ ID NO: 40215 - DNA, 1458 bp, Bovine  19866881148497
  misc_feature (1)..(1): n is a, c, g, or t
ncttgggcccagggcacaggtcagggcctggaccatactaaggccacttcagggctgcttttgtttttaaatctttacttatcatttatttggctgctctgggtcttagctgtggcacataggaccttcagctgtggcgtgcacgatctagttccctgaggatggaacctgggctccctgcattgggagtgcagagtattggtcactggactgcccaggacagtcccagtcaggttgctttgtgatatcacagaaagctctggacgttaggatgtggagtcttgtatttgctttggttaaacaatgagcaagggaatgttaggtcagagctgtgttttcttgatttagttggttggttttgctaaacaatctaaaaactaccaagactgtttcgaacacagagaaaatctgtataggcaatcataaagagcagctgagcagaaataccattaaaggccagatttggaaaagcagccagatgttacagaccagtggctgagtaatgtcaggatatgtgattcctatttctcttgatgaacattctgatgttttattgcctgcccatttagcaattaaagcttaatgtagtttgtggtttaatatgttttaatgattttgttatagacttattattaggagtcttctcatcataatgaatttcatcttgccagaactgagaaatcaatatggctgcttatattacaacgatccataaaatattgtccaaatatgcacaggcttgacagcagggttttcaatattttaaagtaatgtaaaacttaatcttatttgtactttcacatttttaatttcaattgatgactattagagatcttgatttacattgatgttattattgctccatccatagcaaatgaaattattcatgagggttaaaaataaaattggcctcagcattgtcatcaatttatctttccctgttcataggagggaaataacaaggttctaaatatattttatttatttcctttttttttggatttaatattattattattttctggccatactgcacagcatgggggatcttagttccccgatctggagttgaacctgcaccctctgcagtggtccctatttctctttttttttaaaaaatatttctgtttgtgaatatgttacacatgaacatgtacaaaattcaaaaagtccaaagagcgggacttccctgctggcccactggttaggacactgtgcttccactgcagggggcacgggtttgatccccggttggggaaactaagatcctgtaagcttcacaatgtggccaaaaaaaaaaaaaaaaaaaaaagttcaaagagtatacaagggaaagtaggtctcttttgcatccctgtcctccacgcacttccccgcccccaggaggcaaccaccacgaccagggtcctgtccctcctgccagaagcactcggtagtgtgtatatatatacatacaca

SEQ ID NO: 40216 - DNA, 1862 bp, Bovine  19866881151962
  misc_feature (1)..(1): n is a, c, g, or t
ntcaaccctcaaactcctcctctttaaaagggggataatgatagtccctgatgacaacagctaacccttgcggggctcttactccataccaagcactgttctaagaacttctcacggattaactcgttgaatcctcacaccagtcctttgagatagataagagtattgtccccactgtgcaggtgggaaaacagaggcacagaggggttaactgactcaccccatggtcacctggctaggaagtgggtgagctgggaagcgactccatgcaggctggctccccagtctccccgctttcccaccatgctatcgggcctcttagaaacagtgactataaagggcttaacccaagcctggcacatagtaacgacttaactaatgttagcaattgttattactgtcaccgtgattctcccactccttctagatttctgtcttgacaagtcagtaagaaaactctctgggctccaaccactctaggttggagcctggggagggcctgaacggaatcttcctcttgccatcccttccatctgccaggcaaactgaggggagagagggacgttagcatggatgtgtggcctggggtgtgcaagtcatctggggagggggtgggtgctggtaactgtccctactctcccagggtcttggtgattctgcacaccttcatgcccaccccactccctaggggactggactcttggttctacaattcctgggaagcccgtccctctcttgagcccttctttctttccagctaccagaggcctctcttacagaactagggtaatgaagacccctccttcagcccccaccgttctcctcacttccacccctggggacctctcagccccatcctcaaaaatcccagtaattccatggaaattgaagttaccttaaatattctaatcttataacaattttgcttcaatcaacatctaaatgtgaccacatgtgcccagaccacccagaggcctggttggtggtttggggtgggggggtaagttcctagacagatggagggcaagagggctgctctcaggaatggcctggctcaggaggggctccctgggggagacgtctgcaggtcactgagtcccttcctggcctgcttacactgagcaatcctcaggcagcctgggaagcacaggcctgggcggagtctcctatactccctcccagctgggctgggggagggctgggggctggtgatgctcaaaggcaaggggaggctggggctggcttcatgggcctgcagctcagaagggcttggtttagggctcttttgggtcatcttttctgaaccaggggctctgcattttcgttttgccctgagttcacactgcccatccaccctctctctatgggccctccttactccattcttacacttagtcaacagtgaataaaaatttattgagtacctgctttgtgctgaaaatgatgctagacacttggggatacagcaatgaacaatagaggcatggacttgattttgcaaaattaccatctgcagacactcatatatccacacacagcaattctgcaagataattcccccaaatatcatgttcatcataactgccaattagggaacactcagcctaggccaggaaatacacatacttcattttgttttaccctcaaaacagtcagcaaggtaggcattattatccccattttccagacaaaaaaactaaggacccagagttccaattcttcgtccagagtcacataaccaataagtggcagagcttggggttcacccttggctccacgttttcaacctgtcctccccatcaccatacatgccttcagctgcttccccatggataaaagctcccagcatcgtgtctccagcc

SEQ ID NO: 40217 - DNA, 2647 bp, Bovine  19866881300680
  misc_feature (1)..(1): n is a, c, g, or t
ntcttcacctgggtaccctgcggcctccctgcctggctgatcccccgtcacttctggctgcctgcgtcttgtctgccctgagcatcgctccaggctgggttgggtgcacaccaccccttggtgatcttataatgcggcagtggctgctggcagcctgcctcctccgttaagactgtgcactccttgagggcagaaaccacttctcctctctgcctccagcctcagccccgggtgcacaggagacctcagcgcaggtctactgggctgcggactcctggcgaagctgtttacctctccaagcctcggtttccttgtctgccacagggataacaactcttcccacggggtgttgtgaggattaagggagctatgggaggtacagagcctcgcacaatcatgtagcaggataacgatcacgtagtaggtgttcaagaaaagtgcttcctgtggcattcagcatgtcagagcagggtgtggccgatctcacctgtgctccgttctccactgagaacctgtaccaggcaatggagctgcagccaccgaagtgaaaattaggcttaaagaagaactctccttaggtaagaagcactggcatatagaaaggttaagagcaggggctgaggagtagactgcttagatttccctctgaaggctgtgtgaccctgggcaggttgtttgacctctctgagcctcggtttcatcatctttaaaatggggatgaggttagtatttaccacaggggatccttgagcgaaatcagggaactaatgtgtgtgaggctcacagtaaatgctcaacagatgtttactctgaggagctggcaagcacggggcagatgtgggctcacccgtccctcacacctagtgtctgctttgaggacacttcctcctccatctatcctgccccgccccctcttccatcagacggggtggcctctgtgggctggaaaccccagtcagggaaccttttaagtggggaggggaaccccattctccgcagccctactgagggttgggtggtttctgtttgttattgcctgtgaggtgtgggctgtggggttggtccaggagctgcctgttgctgagggtcccgggcggaggccaggtgggctagccctggtgagggtctggaaggagaggctttgcttgtctgccaggggctggtttgtctggaagacagcagccggctaagattgtgcaaacaggtcattgtgcaaacacacccccgtgtgtgacctcgattgtgcaaacaggtgtttactggagggtgcccagcttgggctgcccgcttacaaaaagcgccggagctgttgactcagaaggaaccggaatctggacactcattctttcttgaacacaccctgaactttctgcctcccagccttggctcgggccattctctctgcctggagtgccctcctccctcctcggcctccatctctacttgttgaaattgtacccattttgcagagctcagagaaaatgccagtaaatctttctccataaactttcccctcatttgcatactcaggacatttgatatttctctgaaatcacaggtcacttttttacctgatggccctttctggactgtgagccccctgagaacaagaacttttccttattgtcctctgaaaggttagcaactgaggcacagagagggaaggtgaccagccccatgtcacacagctagttctctacagagctgtgctctaaatcaggtctctgcacttcctgccacactcactgcctctctttcagcctcacccctcttctgaccctggattttgcctcctgaccccgggttgtgatgtaactccagctggaatttgagggatggtgggatttgcacagaggagggaagggtattcagggctggggaatagcaggagcagaggtgtggaggctggaatggcaagagtgtgtgtggaggccataagaggtaggaagaggttgcaagggcctgggaacgggggagatggggtaggcgtagggctgcatcctagactcagagacgacattaactctgcgaccttgggtagcacctcacagtcctgcttcacaggcccctgcctccccctagtactctgcaggtaccccagctagacacgccctcacctggtctctgctaccttttctcctgaccaccttcttttcagtcctggtgagcggcatctggatacctggacgcggccctgactcctccctgcccctcacacccacatccagcctgtggccccttcctgtgggtccttccccttctccccctcctcaccgccatggcaggagtcaggctaccatcattgctcttcaggatgatggcagtgacctcctcctggtctcgctgccttcatgcctggaataatgccctgctcagctggagggcttcttccaaaacacaagtcccagcatgccactcaccaacccaaatcctccattggttcttcgctgcccatgtgataacgttccgagtcaccctcatggcctttgaggccatcacccccagcccctaatcctccccagtgctagagtctcatctccccacactccccttcccaacctcctctcccctttcccaggcccgagactccagccgttctatttaccatcactgtgcaatcatgtgctgcttttcctgggctccagga

SEQ ID NO: 40218 - DNA, 789 bp, Bovine  19866881310090
  misc_feature (1)..(1): n is a, c, g, or t
nttggggctaggggagctgtcggcccatgccacgcccgccttcaccgctgtgctcacctcgcccttccccgcctcgggcatgcccgtcaagtttgaccggactctctacaacggccacagtggctacaacccggccacgggcatcttcacttgccccgtgggcggggtctactacttcgcctaccacgtgcatgtcaagggcaccaacgtgtgggtggccctctacaagaacaacgtgccggccacgtacacctacgacgagtacaagaagggctacctggaccaggcgtctggcggggccgtgctgcagctgcggcccaacgaccaggtctgggtgcagatgccctcagaccaggccaatggcctctactccaccgagtacatccactcctccttttcgggattcttgctgtgtcccacataacccgtgctgccctggcctcctcctctttagcggtagagagaccttctcacttaccaagaacctccatttaaagaaaaaaaaccaaagactgaaacagaggcgggcacaaaggcggccgcggcctcagcctggggagactgacttggattctctccacgcaggctgaggtttcttcctggaagaagctggcctgagttcctctcccccacgtgtctgtgcagtggtggggggttgtgcccccattcctgccctgcctggccccctggcagggccccggacgttcggcctggctggtggagacccctgcccccttgagtcctgggctctgccgggcggtgaaggaggctgcttctcagtgagtcagt

SEQ ID NO: 40219 - DNA, 1026 bp, Bovine  19866881891366
  misc_feature (1)..(1): n is a, c, g, or t
ncaaagggaaaagcctagagattccggaagctctgacaggaatgagtgttgggttttccagagctctaattatcagctagatgaatcacttagagctgacaccaccatccccagcctcaggaggctctcagctgattcaaaatataggattttaacgaagaggaggaggaagagaaagaggggagcaggagaggtaatgaatagaaaggaaaggtgccagccagaggaaatgaaaaactgtcatcaggacagcaacacgaggagaccactgcatcagacacacacatactgtgacacacgctcctgctggctctccaactctgggcatcttggcagacgacgctgccataacaaagtgacacctgtcacaacagcatgagatggttgcttgacgatgtacaggcagatctgcctattacagagggagaggaggagaccttcaaccctagggagcttcctcaggcttctgaaacccagcaaacctttcctactggctgacttctgggttctctgtggccaagcccctagaacaaaggtgtgcaagtttgagtgctggcccatacctggtggctgggtaccatcactgttagcagcgtgcttggttactccattgtgtccaactttgcgactgtttgaactgtaccctgtcaggttcctccatccatggacttttccaggcacaagggatcttcctgacccagggatcaaacctgaacctcctgtgtatcctgcattgcaggccgattcttttacccactgaatcatcaaggcattgcttatctttcctggttaccagtatcaggaatgctggaaggcagaacagtgcagtaaagatcatggagtttcaggcatacagacctgagttcaaatccccaccctgttattcactggctctgtgaccttgagcaagtcaggtaacctctctgggtttgtttgcttatctctaaaatggggctactaatacatacctctagggctgttgtaatgatgaaatgagatgattctttcatttcacaaagatttatg

SEQ ID NO: 40220 - DNA, 2544 bp, Bovine  19866880353041
  misc_feature (1)..(1): n is a, c, g, or t
nctttgagtagactgtagccaaccgagctcctctgtccgtgggattgtctaggcaagaatactggagtgggttgccatgcccttctccagggcatcttcccaacccaggtatccaaccccagtctgctgcattgcaggcagattctttaccatctgagccaccaggaaagccccaaatcttaagctactcacatcttttaaatccacatctgcgtcctcggggaaatctgggtgactgtcaccagatccatcctttgggaatattccccaatcatccccttctttcagttctccacattctgcaataacgcacaactgtaaaaataaccctcaattgtagaagcgcactcctacattagtgatgatttttcaaaggtctgggtttaaaagctctacagccgcaagccatgtgcacgactgtccacgtcgcttcctggcaggcgcagcacactggtaggggcacagccacgccccgtgctacggaagcactcaccgcagccagtaactcagtgcacaaagagtgagtggacggtgtcaccattcccttaggtgttgcacatgctttcaactgactctttccttcgcacactgagtgacagcacacctcccgcaggtctgactctccagtttccactcccaaccctgtggatgcaggtgcctgtgatggctgtgttgatccacagacatgtggaacacaaggatctttgcagtgacaggatctagtccaaacccttaagtgatttctatgggatgagcaatcaggccgaggaaagtgaaatcacaggagcaagcctagaccacaagttacatggcagaggagaccagaggactcctgggttcccgctcgctctgtactctgcacccgtacacacaccgacgcaaagttctacaggcgtaggagacttcagttatcaagatcagcaagactgaagttaaaataataaagtctctttttaaactgccctcatctttcccacaatagaaaacagcttcaaagaaaaagtggcaggtacaggcttctagaacaagagccttctggacattttttaacaatcacccttttattcacgcttctctaatccagcagctaagataatattaccatcttgctactcactttggcaggtttttcacctttcacctccacattttccagaatctttgccacacccattcctttaatcacttggccaaacactacgtgcttcccatccaaatgcggagtcggaacggtggtgatgaagaactgggagccgttggtgttgctgccggcgttggccatgctcagcaatccctccttgtcatgctgcgggaataaaccataaagaaaaccaagatgcgagttcccgctctactctaccaaccattcacagaaaggggggcgggcaccactggaataccacttagagcacataatgtagagtgattttacttcattatcaagtgtgactttaattcacaaaacagagtacttaaccactttttaaactttaaggagagcttatgaaactaaattaagatgaaacaagagtgggggcaggggtggtactcctaaattgatcatactgggaacatgcttggacttcatcattaagatgaagatgccataggagggaagtctagtaattctgcttcaccctttcttatgactgaagcattttttttctgaaaggcactcaacagtgttcccacttgtgggcctacattatgattctctcttcccacgtcagcaaagttaggtcctttcctactctccacccgtgtaacactcatgttagctctcctacctgaaatgccttttacccctaaacccaaatctaatccagctctcaagaccaccaagtgtgcggaagaatcacgtgtccatgaaatagcccctctttttctaaaattttatttttgttttggttgcactgggtctttgtcacttttgtgcaggttttctcttgtggcgagtgggctcttctgttgaggtgctcaggcacctcacgggtggtgcttctcactgcagagcacagcgctgggtgcacaggcctcaccaggtgcagcacacgggctcaatggttgggcgtatgcgtttattcactctgcggcatgtgggatcttccacgtcggggatcaaacctgtgtctcctgcactggcaggcggattcttattcactgcaccaccagggaagtctacctgctttcttttgatcaacttttccatcacataatctgagttttcatccttgtggtactttctttctcccttccaaaagtctggtgctttccccacaatattaaatattattaactttatttcctcagcctcctcatgccttcttccttcttcactcatatccctccctcaaaagtatctgaattttagttccttctaaccaaatctcagccacctggcgaggtccagtctgcctagttcatgcaccattcccccttgatgtcttccctagtaatccagaccacaggagtcagacctttctcctgtagtatacacaggtattggtcaatttagcacttctacattattctccagttgcccta

SEQ ID NO: 40221 - DNA, 1204 bp, Bovine  19866880360220
  misc_feature (1)..(1): n is a, c, g, or t
nccctcgttcatacggtgactgtaactagacatccccaaagaggcagccacaggagtgtgtgttgtcacaggtgagagtgtccttaactgagcaggctgaggagacgggagtgaggccatgggaaagcggaaaccgagtggcaaagaatccataagaaatgagaagagcatgccagtagctatttcagagccacaggaaaccagcacaaccctgattcgtataggattttctagtttgcaaaatactgggttggcctaaaagttcatttgggtttttccataagcgcatacagaaaaattcgaatgaactttttggccaactcaatactttaactgccatttgatcctcatttatgagccatgttttaggactttctgaatattacagataatgaaagtgagcttgacaacagctgaacagtttcttggggtctcagagctttctagctgtgaagctggggctccggaccccagagctggcattttctatcctctgaagtcatcatggctgtcaatgtaaatgaaggatctgaggaaaaaatcatgctgattgatgagatgtggatgtaaaacaacgtaaacacatcaggatctttaaaaatggtttttgatgttgggaagaagaattaaatgattataaatggccgtgtaccttactacagacagcccagctccaatataattgagcactggttttgccacttcttctgcatccattccaaaccagccaaacctggaaatggagaaagtcacatcaaagtcgatgttgcactgtttgcagaggcatggatggacctagagactgtcatacagagtgaagtgagtcagaaggtaatataccataaaatatcgcatattaatgcatatgtggaatctagagaaacaatacagatgaacttatttgcaaagcagaaatagagacacaggtgtagagaacaaacctatggacaccaaggggtggaagcggggtgggatgaattgggagactgggactgatgtatatataactactaggtataacacaggtaactaacgagaacctactgtatacagcacagggaactctactcagtgctttataataacctctatgggaaaaccatctaaaaaaagtggatatatgtgtatgtataactgattcacttttctgtacagcagaaaccaacacaacattataaacaactatattccaataaaataaata

SEQ ID NO: 40222 - DNA, 1350 bp, Bovine  19866880576162
  misc_feature (1)..(1): n is a, c, g, or t
nctggcttgctgcgcttcgagcgcagggtgatgtacaccacgttgggctgcagcgtggtgccattgccctgggactcgggaggggccagcgtgccatccaggggtatctcagggaagggggcctcggtggcagcccggctccggtgcggcccctttcctgccggccttgcgtgctggacagaggcgcgccccacctgactgaccaggaagcccaggtagatggcgcaggcggtgcccagcaggaggttcctccgcgtcctggggcgccgactgctccagagtttccgcaccctcgggacgcacagggagcagaggaaccagtttatgagctgccctggcttgttcgagcagctcatttctccgcggtgtccacatgctgaacagagtttaaactcggccgttggtgcctgctgacatgaagcatggttttctgaacgcagctgtcgcctccgctcaggtgtttaagtggtctccagtgggtcgaggtggaagttaggcgttggtgatggagccgggaaggcttctgacactggccacaacaaaccttttacacccccattagtctccccaaggagaagtctgactagttcctgggaatgaatggaaagagtgcactgagtcacagtctcaaactcccgttcagttcctccacaagaggaaatttttaaaaaacgggaccctttcctttcattactgtcaccactaaatgaatttttaaatggagttaaaaaacaaacaagatagatctatacatttgatattcagttgcaattagtgaaaacaaactaccaaaatccaagactgttttataacttgtagctagagtcttttaatttgatcctgaaggaaaagcattaaaattggacaaatccagttttttctctttgaaattaaaaagtgatttaagaaaagcaacaaagggttttaaaaatctatagctatcttctatttatttttagaagtcttgcattaattaactgggcagaagctccaaatattaacattcaaaatcagaaatatattctcttaatctgatggtacaatcttttcttcataatacatttcattatcttacattaagagtcattatactataaagccatacgtgttcacgtatcttggaagtaattacatttattcagtcatacacacacaaacataaacacaaaacacgcatctaactgctttttattccttttctttccaccaaattcagctgaaagaaaacccaaagctctctagctgtctttttttcacgttattaaaaagaagaactggtaaggcaatgttacttacacagctggccccgtgcttggctccaggaagaatgtaatctctgactctaatgca

SEQ ID NO: 40223 - DNA, 1455 bp, Bovine  19866880635720
  misc_feature (1)..(1): n is a, c, g, or t
nggggaaatgagaaaaaaagaagtcctggaaattcctctgtgcctcttccttctcgcacagtgaaaagatgatgcttatggcaatcttcttcctccggactatggccgggttggaactgcaggtttcttcggccaagctgaacgtctcatccattgacctggaaggagaaggggtttgaggggtcgccctgctgtcagtggaccacagtgaaaatgagccatgaagccaggatgacaccctgacagcctaccagggcatgtggtcctcactcagagcacatcccctgctaagccgtcctcctccatcagattctattgtgaaaatgaaaacctctacttgatactcagtgttatcctaacatgaaaagaaacttcagtgagaactgaaagtaattttaagtgccctcttattagacacttagtccttttcccttgaactgtgttacatcagactggtggtattttggaaggggtgtgaaacatctgttggctcaaaacacaggctctcagttttagctaatagatgccggtagataagactctctgaaagggaaggtctgctgcagtccactgtgtgaccaggacatcgcgtttggacatttactagcagccaaggcttgccttcccaaggttactaaaactattagatgaagttactcctctaaatgctgagactaagccacgtgaccttgaacattctccgggaaaccctccaagaagaaagagccccctcttttctactatagttagcacctggaccaacttaacgttctgtgcaaagactctgcttctaggatgagagaagcacgaagccaacaaactgaatacatattcaatttgttgtaagtgatgaacctcacaaatacagccaatccaggtctctcctttattctgaaaaaccagcatatgaccatgtagctgctaacagcaagagtgaaagatttttaaaattattttgtttttttttttttctattaaaaaaaaaacaccaaagcaaaggatgtgcattcatgctgagttgcttcagttatgtacaactctttgcgaagctatggactgtagcccaccaggctcctctgtccatgggattctccaggtgagaatactgcagtgggtagccatgcgctgctccaggggatcttcctgctccaggggatcttcctgacccagggatagaacccacatctatgtctcctgcactggcaggcgggttctttaccactagcgccaccctttaggaagtcccgaagcaagtgacatcacactgcaaatgaaagagcctagcatggcacaaggtaggttttgcagtaaatctttctcattgaccctagtgttcagcttcgtctgttgctaagcacaggaggacgctgcctccttcacgtcccttactacaaactaacaccccgatggccacatctgctggcagaactcaaggcaggcagcctcattcccggg

SEQ ID NO: 40224 - DNA, 1621 bp, Bovine  19866880680848
  misc_feature (1)..(1): n is a, c, g, or t
nggaataaattgaggagaaaggagtaattcatttttcatttttctagtattttccagcttatgctttttttcatttaacctacagtgatgtggttggggctctcttgctcacctttggaaaacattcaaccagccctgggagcttttgtgccctggagacagcctgtgtgacatttatggataaacccctggttaggcccatgaccccacagatcagcttgcctgaagctagctctgccaaggtcccctgatctgtagactgtttcttgaccagcaccgtaccctctgatctgtccaagaggctggtggctcatggagcacctcatcccatgtgactacttttatataaatttcatagaaaattggcttatgctaacttctcttataatcactgctttctgaagtatgctttttgatgtgaagtctacttacctgcagaaaacagagaggagggtcatttgtctggtagtgggtttgctgtgttagcgaggcaaaactgattcatctccctctggaagtagtgctggtttgggcggggtgctggccctgggtgacatttgcctcagtgcctggcccactgctgggtggtagaagatattacataaacatttgttggatgaataaatacaggatttttgcaacgtaggctcaattttggtactactctttctgcatttctgtcttagcaactgactacctatggtgaccagccctataagatatggaaaaaaacaggaggaagagaaaagatgggagtttagtaaataaaagacttaaaatgacaaaagaatggaaatgacagcctggggacttccctactggtccagtagttaagactgtgcttcaatgcaggagacacaggtttaacccctggtcggggaattaagatcccatgtgctgggtggtactgccaaaaattaaaaaaacaaaagacaatctgtgtcgagccatcttttgaatcttgagcatacgtacaatatttgactagacaaactattcaatgtggtgttttagggggaaatgtacacttcaaagacaaacacaactgtgtctgaatcttaactttgctacttactaaaattctatgcagagtacaatatttaatctctccaaggctcagttttccttcactgcaatggagaaactaccttttgtttcagaagcttgttttgtggtcaatcatttcatacactgtgtacatgtgtgtctcaacaatagtaatgacagttttccattcttaagtatcttctagatgcctgggtcaggctggggtgtatccagacacttttgtgtccttaacccatcaaaagtacaaggctaatagtatgatttccgatatacagaaaattaaattgagactcagtaacgtaaagggagctatacaagtttgcggaactgcaaagaggagacttgagtttaaatgtatctaactccttagcctaggctttaacttaccatgattaatataattttttccctttccaaaaagacatgtaaataacccatttctccctagttagtgtctgccctctataggggtggtcgccctactcccacaataaaccccaataagcctaagtgttctgcttgttcatttagaatctaactgtgggctccatat

SEQ ID NO: 40225 - DNA, 3554 bp, Bovine  19866880730011
  misc_feature (1)..(1): n is a, c, g, or t
nattgtaaaaaaaaaaaaaagcagatatttttgaatatgtgtgcatcacactatttaaggccatggactcaagatcagattcctgattcaaaccctaggtccatgatttattaactgtgacttggataagttaactacctttattgtgtctcaacttttcatgtttaaaatggggataattatatctataattatacctaatatacaagtttcttatgaagattaaatgagtcagtatatataaaagtacttgtctaaaagaaaactccctttcactttaagactaagagataaagaagaaaaaataggttaagtggctaactgaatgctgataaattgactgcaattttgtatagaatttgaaataaacttcagtgactatttggttaaagatctctactctttggcatcgctttaaattctgtttttaatcccttgatcttgcagtgactattaccaataatcactgtgaaccatccaaggatgagaaaaatggaggcaagaagaagaaaacagcacttgtacaaggcagactgggggcggagaaaggacaggaaagaatgtcttggaggttagtttgcttcattataactgaggttgctgtagtgctttgagtaggaagaggagctggaaaagtaaggttagaataaaatcctccttctatttatcatcccaaactcaactggaatattcatcttaatgctgacagaggatggtacagtccaacaggacttctctaatgctccatggctattccatggttgcacagggcagcttctaaccagatacagtgatggagcacttgagatgtggccaggaccactgaggaactgaatgcttaattttatcacattttaatgaatttaaatatacacagccacatgttttgtggcaaccccatctgacagctcaactctagagctgaggggttggctaactttcccataaagagcaagagagtagatattttaggctttgtggactggatggcctctggtaactgctcacccctgcctttatggattaaaagcagccatgctgcaaatgttcctaaagtggatgtgtttggctgtgtgtcaataatattttatttacaaagtggaagctgggcaatgatttgctgaccctggctcagaccctacagggaagaatataggctctagaactattagacctgggtttgaactcggctcattagctccgcgaccttcaacaagccactcatctttttgtgtgtcagttatcttctaagacagcacctacctcatttgtttgtggaaataagattagaatgatgatgtgtacaacatgtgaaacaaaacagtcacactcagaaaaggaaaataaatatcaatgccctttctctctccctatttcattctctaaagaaaattatttatcttggttggtgtgttagatcacttctttagaattaaggcaaataattcaacgtagcacaagttacgtgtgtatcttacaagaagtgacctttctgagggcaggaatcagcgtttaccttacacagaatgtgagtgaagagaatctgagttgaaaacaccctgttttgtgttaccttgagcttgcccatccagttaaggcattaaatgatccccagattaagattccaaggcccaaaccaatggttttgataattgggacaacagctatgttacctgtaggtgaaatataaagaagaaaggtgttatttttcaatacagaaaaatctatttgtaaattaaattagttttaatttcagatgaagcttatgggatttggacaaacttagtaaagcttaattcctcattttaaaaataaaacaaccaatgtttggcattaacctcatgattatgattactaaaagagccaggcttagggcaaaatcctacaaagaaaatgttaagttagctctttgcctaactgcaccaatgttcttcatctttagtgcaggtctccattacgacttttttgcagaagttggtcaatgataaaattaatggtgaccatcctcttagactggaactagaccacctatcagcagatgtccttggctcatatggctccagactttgctctctcatgctcatttacttgtcttttggattgccccacccagcgctttgtgctcttgagggtcactcaggaccaaattcacagtcatttttttttttccagttcctgacctgctatctgactcagtcaatatcctcttgacaggttttctctcttggttttcaagatgccttcatcatcagcttccctcctgttcctcttattctttggctgttctttctcatcataccatctgcatagaggaaccctctaaaaattatccctaaagtacactcctcctcttgctatattctttgggcatttgactagtttcatgatttcagctatcagctagagacacatgcttccagcactagcctggaccttctccagagctttagtgccagtaagagattaccgaccagatgtcccccattgtgggaatattaggaactttaaactaaaaaggttccaagctgaagtcattttccctctcatccatgttcttttcccttttctcctcatccatttcaatgatactgtcactctcctaatcacctacaataatatctctacatcactgttaactcttccccttcctctactaaccatatccagtcagctactgtgccctacactgtgagatggttagatagcatcactacatcaatggacatgagtctgagcaaactccaggagatagtggaagacccaggagcctggtgggctgcagttcatggagtcccaaagagtcagacacaacttagcaaccaaagaaaaatactgtgacccacatcatcccagtctgcagcagttctcaaattaaacttttcccaccaactccttggaccataaagaagcctgagggccaaaggactgatgcttttgaactgtggtattggagaagacccttgacagttccctggactgcaaggagatcaaatcaatccatcctaaaggaaatcaattctgaatagtcattggaaggactgatgctgaagctccaatactttggccacctgatgctaagagcttgactcattagaaaagaccctgatgctgggaaagattgaaggtgggagaagaaggggacaacagaggatgagatggttggatggcatcaccgactcaacggacatgagtttgtgtaaactccaggagatagtgaaggacagggaagcctggcatgctgcagtccatggggtcacaaacagtcagacacaactgaatgactgaacaacaacaaccaactcctggtgtgaacagccgtgtgaatataaatactgaagtggttgtccagatctgcaggatgaatgactggtctctctgttcccctctcctattcaaaatgatgatcacaatcatactaaagtatacatgaggtataataattacaactctagtgcaaatttaactcttttatcctccaactcatcatcttcactaaatcacttaattctgtagagattcaaattaagtaggtgcccaataaatttttaacattt

SEQ ID NO: 40226 - DNA, 1460 bp, Bovine  19866880760219
  misc_feature (1)..(1): n is a, c, g, or t
nacacacactgtcctaactgctgtgcctaaggagggagtggggccacttcccagctctccatcagcactgctgacatcccccgtgaaggcaggcagccttcctgtgtgttccaacagcactcatccccccagaagagtcctgacaactctaaactgaaactgactcccctctcccaccaagtaaattccttgacgggagggtctttcaaccaaaacacctaagcgcctatcagctgcttaatctgtgcccaacattgcgcttaaaatgctttacacacataacacagtctttataacaatcccaggaggaaagcagtatttccacttaacacaaagaaattaagactctaaaattaagaacctcctcaaaataaaaaagtgacagtggtctaagagaaaagccatgtctgctgactaactccacagccacattcttagccattcctgggtttatcttccaatgtccggcacataataggtgctcaatagtcaataaatgagctgagaaagtatcttcatggaagttaagtgatctcgtgttataagctaaatgaatggtttgagaggaagaactgagatccaaatattcagatgtaagaacatcaacagactcacctccaaacagctatcgactgcgccctgccaatcagacatcttcagtttgcaggcgccaatattcagcacgcagctcaaagcgacaggctgcagctttgctccatctgcgtcctcagcagcagccctggaaccttccacatacctagagaacacccccgtacaagcagcaagcaacaccccattaagacactctgcctgtgactcactcataactcgtcagttttgatataaaagttcaccgatgctaatattaatattcttaatgaccaccatctttttattaaatgctttcctttagaagatttttttgttccaacttttttccccaaaatgttcaaaaacaccaacttaaaaacaatccccaaacctaaagattatatatactattaacacttttctatttgtaaaattaaggtttttatcagccactttccaatataattaggtttggaactaaggttgtcacagcaggagaggactgggaaagatgaggaaacctgcagcggtaacgctgactcatcttttactgtagttcccgtgaaaggggccctgaaacaatacatgtacctggtccgacagtctagtccctagtctccctcaatgaaaagaatctgggctcctgagagaaattcagatctggacatgaggttaaatataagatgagcctggaccatcttgtggcagaaagcgggcaagtgctcacagactaagaggaacacgtcagatgggtgcagccaaggggcttccactgggcaaatccgaaaccttacagcatcagaaagaatgatgggaacagtataataggctgaactgaaagaaaaataacccacagatctatagtgata

SEQ ID NO: 40227 - DNA, 1191 bp, Bovine  19866880828579
  misc_feature (1)..(1): n is a, c, g, or t
nacctgaggctgctgaagagccctgagggaactcagtatggagacaaacgggctgcccacttccaaggccacctaccagtcagttgctgcagccaccctgaacagtataccctgaggacactaaggatgagaaaacacaggatactggctccagacagctgagatgcacatcaaatgaatgatttcagggagcccagattcttacatcttcccatacagagaaaagccctaaattccttaactagagatacctggcttcctttaataaacagtaatcctttttcgatattccgaccacctggtctttgttgcaaaaactcccgtataccttgactccttcctcatctctttgaacagagctgagatactctgtcccaggcttaaggcctcagtgttttcctttaaagcagttgtaacgtgttccagaacagcagcaattaagctgcaaagcaacgtgagaattcacaagacctgaggcgcctccaagctgctactgtagcctaggcaaccacaccgccacacagatctcattctccccatgccaaaacggagaaaatgtccaccaatctgaatggatcagtagtaaagaagaatcagtagtaaaaatgaaaaagaaaaccacgcaaaagtcgctttaatttacagataacatggcaactgctgacatacatcacgtggcaaaagacacaaggtgaaaggagcccaccagacgcttaacctggggttttcaaaataggttttcgccctacaaacataaaatcatctcgttttgtgctaacttcacggtgctaggtggcgggcaggtgcggccaagtcgggacggataaacccaaaggcttccagcattcctcgaacagaaatttccagaaacttctccacgccccacggccccggtacaaggtcgcgggcgcaacccagcccggaggcttggaccagtccaggtcccagtgtgggcagccggcccccacctcagagcatcaccctgccagagcagcgctccagcctcagggacccccgacccagggcgccccgcctcctcacctcgctcccctccgatgtccacgtcgaagaaaactcgagggttactggggttggaaggcttagcctggggggatggatgcgacattgtggccctaggacgcgtgtatgaccgcctcgtaacacgggcgtggtcaccgtgcagctcgaacc

SEQ ID NO: 40228 - DNA, 1475 bp, Bovine  19866880834037
  misc_feature (1)..(1): n is a, c, g, or t
natataattttaaatattgtgttaataagtccaaaacctagtatctataagagcataattttactctattttaacacatttacattttaatcaataacactctccatgtaagtttgaggcacttataggtatacattcatgactttatttcttggtcattcctttagaaagtgcacagtaaggatagggtaaaatggtgctgaatatttaaggtgcatcattggaaatgcatcaagatactttcaaccctcagcacatttttaatctccctaaaaattgcagaaccatggtcataactagagaaatagcttgcccagaacacctttgaagtcagaatacattatatcattcttgaaggtattaataattattaactcaagtactgaactaaaagagatacatgaatgaaaataggctcttttttgcaaatacattatataaaaaccatgctaatggcttctaacatgataagaaatgctttaaccacaggtcacagaaaactgaaaaaaatagctttcaatacatttatgaaaagacaagtgattcaccttcagttggaccaagtaatgtcttttcattgaataaattactttctggtctaaattaaatgtgcatctggaaactctattaactctttaaaaataacatagaaaattatattcattctggagttacaatattggtttactaaatggggtttacagtggtagactgaaagaacttcatgcatacataatgtgtaaaggtttatttcttgtttcaccccaaaagtaaatcccatgtcaatttaatctcttgtcatttagagaaacctagctaacctaggaaaataagtttttattcattcagttaatacacatgtatactctagattctaaatccaaactctctttaggattttctctatcatttgataacaaattacagctatggtaaaaacagtattatgctactaccagctttactgaaaagctagtcctaatctaaaaatatttctctctttatccctttcttctttaattttctatttcctccctttccctccttgccctaacaacaacaacaacaaaacagctaagactccttagtatgatggttccacagacaacatgtagacctcagagttgctaggtgtctgtaaagggctcaagtcctttgagaaacaaagaccaatatagtcagactttctgctgactgtactaggatcagacccaggaggctttggggatttttcataactggaggtttgtacactttttcactgccttcatccaattcccccttcctatacccacccgcccccaactctccacctctgataaccacaattctgatctttttttttttttatgcatttgttcatttgattgtgtttgaagcataactgacctaaaacacggtgttagtttctggtacaaaacatagtgttttgatattcctgtatattacaaaattatcaccacaataagtctagt

SEQ ID NO: 40229 - DNA, 936 bp, Bovine  19866880867897
  misc_feature (1)..(1): n is a, c, g, or t
ncaagtgcatctgttaatcttttttaccttgaagacagcaggcgtaaatggtctagaagagaatcacgtcagatggacccttgccagagccatcaggtgacttactgaggtgcctgatgactgcctgccaaacgcagaagcatttgcctctggtgcaaagcacagatggttgctgttctctaaaacacgaagttggacacagttccaagggtagagatgtcctgaaaataattgcctgtctctattgttattagagacctagttaaagtacactcttgagagacaagaaaagttcagaataaccttgttccagtcattcttctgggaatgaattgtaacaaaataatctgaggtatagaaaacaacaacagagatgctttttataaaaaggcattggtaaagaatttttaataacatggggaagggattattagaaagttttttgaaagcagagaataattgtacttatagaatgatttcaactatgtaaaacaaaagcttttttaaaaagactagaagatatatatgaagctcctaacagtcattggaaaaagtaaactgacttgttttacaaaaacctgttctttaatattttttaatttatattagaatatagttgatttataatgtagtgttagtttgaggtgtgcagcaaagtcattcagttatacatatacatgtgctaagtcatgcccaactctttgaggccccatggactatactctgccaggctcctctgtccatgcaattttccaggcaagtggaaaactggaatactgaagtggagtgccatttcccactccaggagatcttcctgacccagggaccaaagccgagtctcttgtgtctcctgcgatagcaggcagactctttgcccatataggttattacagagtactgggtagagttctctgtagtatacggtaagtccctgtt

SEQ ID NO: 40230 - DNA, 921 bp, Bovine  19866880907690
  misc_feature (1)..(1): n is a, c, g, or t
ntgacctgcttcccagaggactccttatgtggccgtccctggatctgtttctctcacctctgtccctggggctttgttcccactgcagtgcaaaaagggagcatgtgtgcattgtgcgtgctgatggctggtcttgttttaggtctcagagcatcagcaaccccaatgtgagaaacttcggccgctccctcctggcaggatactgccccacgtacatgccagacttggtgcttcacgggaccagcagcgacgagaagctgaagcagtgcctagcagccgacctggttcacacggtccaggtgagtgatcccagctgggagtttcaggctgctgaccagggggtgaaggaggggcagccaggcgacgtgggcagtcacaggtatagtcatgggattgttgctacagatgctgccagggttacgggaaccagtgaggctgctgaggcatctggggacgtgcggagctggaggctgtgagcaccacaggacacagcagtggggaaaagaagagggtctgcctggttgtcggagcacgatggggtgggggaacccccgacctctcactcctccagccgctgagctcctacagggcctcctttgggctaagcccagctagaagcctcagagtgaggaggtcatagctgatgcagatccaggcctgcggtctgcagagctcacctctgcacaggacagggaagggcacagggtgaatctggaggcaggtggggcaggccgggcagacagaacagtcagcacagatggtgacaattatatgcatcccaggaagaaccaaagagatgtcacatgcgttttgctttttggctgatccttacaagttcctaaaagtaatctattttaactgatttgtcattaagttcactttgatggctgtttgaggatgactgtataaagattaacacat

SEQ ID NO: 40231 - DNA, 1793 bp, Bovine  19866880953968
  misc_feature (1)..(1): n is a, c, g, or t
nttgatggacatttaggttgctttcatgtcttggctattgtaaatagaactgctgtgaccattattatgttgcatgtactttttgagttttgcttttctccagatatatgcctgggagtgggatttctgtgatcatatggtagctctgtttttagttttttacagtgcttgcatagtggctgccccaaattatattcccaccaacattgtaggagtgttcccttctttccacaccatctccagcatttttttccagcatttattatttgtagaaatttgatgatggccattctgactggtgggtagctatcattattaaattaggagatctatgttgttataaccttctataactcacagattatcattttcaaaatataaatgaaaattgataccaaacgagcctacataatgaccagttctccaagtgtctcattctactcattatttgcctctttctttatgtcctgctcttctccggtgattcaaatggtatccagtatttatttaagaaacttccaaagagctgaaatataagacaaacaagaggtttgtattcattagacaaagctgatttagctgtcattgtcccaggcagtagaaacaaagctatgcatttcttaagagaaacaagatgagagggggaaaaaaatgggtagtttttaagggaagcaggagaacaggacagaatatcaagagctatatctctgtatctcagagaaagaggataaatctgagttagtggaaaagggaaagaaccactggagattttacatagatgaaatggctgcatatggcagaaaaagattccaatagtcagacattgcattgaagaggctttttacctaaaacaaaatagaaggtaatgattctgcaatgcactaaaaacaaaatggaaagagaggaatacaactgataatggaggaatagatctaagacactgaaagctgttgaaggggatgatgttgcaacaaagggaagcagatttacaggaactggcttcttgaactttgctgtctggttcccattactctttctcttcaaaaaaatgtcacccattcctttcagggcagaacattttgccaaatatgctatttaaatattgattttagaacatttccttgatctgaaagcatgctacccagattgccataaatccaagttctttctttccagagtccttgtcatgatttattcgaggagtttttttgtttttttgtttttttaaccaaagataaaaatcaaagaagaacagaccatcaagggcacaaaatacacaattcctgacaataaagtgcattggctggagctatcatgaaggatatttgagatattacataagagattttgattcataaatatatctgaaaaataacatgccttttttagtaggaacagttgaagaacaaaaagaaaaggctaaaggaactctatataaaattagtttttcttatgtgtgaaaaaattagctaatgattctgatttctattctaccacatatagacagatattaacctttacagtttcatgatcaaagatttgaagaaggaagctgctgaaaaaaagtgatcccttattttcctctactaaatcccaagatctaaggcagtgcttggcacatagttggcactcaagaaatagttatcacatgaacaactcaataaagccttaaggaaataaagttaaaaaattatgtagtcatcaccagttaagagctaattataccagaaaatcctgagatctggtttaatctcatggtttggggcaccctcacttaaattaaaagcctcaat

SEQ ID NO: 40232 - DNA, 1142 bp, Bovine  19866881018785
  misc_feature (1)..(1): n is a, c, g, or t
naactgagtcactgagcacacacattcctattaatagcaaattacaatgtatcccaaaagaaattaggcaaaatgaccaaacaaaaactgcaaaggcatcaaagatgaacagacttgttaaaatgaagttagcaacattcccttagcaatcaaggacaagagactacaggggtcagtttatccacatgcatctgttatgttgactgtactcctgaaaaatcaaactccatgacagacttcagtgattcactaagaaagcttcagaaaagtgtgatttacatttggaaaacaaaaatttggaaatgcaatacagctacttacggcagtgatgattggaaaactgaccacagcactgagagagcggttcgctatgaaccaacagcaggtggcgatcgcccagaggactccggacaggaaccctgaaacacagacgcgttcgccaaccacatacctctccagaaaagtccacactcccggcggaacgactactaaagtgaacacatcacacactcctattaacaccgacagccaacatgggtttttgagtcatgtttatgaccatttggaaaacaaatcatttctctttttgtgactgcactaggtgtaaggatcaccttttaccttattgacattaaatcaagtacccaaagtaataggtgcagtaaagattggataatggagtgggacccagggaaggtactgggtctgaatattttctgaaaacaccatttactctaagccatgtacgtcaaactatgtgaaattcagaatgatgcttaaataaggggggggatgtaacttggaatctgaataaaaataccagcttaaaatgttcagggtactttagctagacattcagtaaatattctaccattcttccaaaactgtatagtggggtagtggcactctttggcttaaatgaatcaagcactcaaaagtgaatctcctgatacatgctttgttttgttctttaaaaaatttttacttgtggacctacattccatattgaattatagtaaattcttaagtgagaaattatatttatatacaatgtatttttataattaacttaaagtatattaattttaatctttaatgcataatacatatttaaattgaattatatataatttttataattt

SEQ ID NO: 40233 - DNA, 1676 bp, Bovine  19866881025137
  misc_feature (1)..(1): n is a, c, g, or t
ncagcatcttcgatacaatgaggtcaagtcctactttcataaacagttcattagaagaacttctcatttttacgcttgactgaaagctggttttccttcagtgtcacatttgtgggaaagaaaatcatttaccctaatccaggacggatgaagatccacttgctgtgtgagcatgaactctattttcagcacaatctcttgtgtccaggagagaagtgttctcaagtaccgctgccatctgctggccttgtggttgtcaaattttagaaaaagctgtgcataaggctccagtcaagatgatgcaaaatgcaagcatcatcagcaggtagttttttcgaccctgagtaataaaaagaataactgttattaagaagacctgaatcaaatatataaaaagcacaaactctcaagatttctgtggaccttactaaccatctggtctacctcctgtatgcttttccattatccctctgtatgaatcttccaggttctcaggtcctctgtcattacccattcaataaatacatgtgcactcctactatccatccacatgttctgggattaaaatggtaagcaaaatgtgcccctattcagtgactcgtgtaatgtgggagatgggaatgagtaacaagcaaacagcagtggctattgtaagtgcatcacaagaaaatcttaaggaggcagatctagagttgagttgagctcctaagtatcagtgaattgggggaagaggagggcagcaaaatctcaaatacagattttgagtagaaggaatgtgtgtgcaaagctctgttgtaagagaaacatggtactttccagggactgaaagaaggtctgagagggtgcagcagtgaattaagtgtggcttgatgaggctggaggctatgcatatgcctgagcaggaggtatcttagaggccgtgttatactttggatttacttttcaagcaatgggaagacatgagaggaacaggcagagccaagtatattgaaaagacaggcttgcattttgtaaagcccacacttttgcagatgatgaacagattggagggggccagagtggatgcaaggggactagtgaggaggtgaccgcagtcctcctgggaagagaggatgaagtgcagatggagagacagagaccaagctaaagggcaagggagaaatagaaacaaagatgactcccccagctacatgtgggtgcactggtcttaaagatggaaccacggaggatgccagccaatctttatatgaataaacatataccactctgtgttcagtagaatactgtatttctcacaagttccatctctaagagttcagatagatcgattctaatttctctcccacaagataaaccctcagacacaggaaaataaatgtgctatatccctgaagcatttttttccttggtcaatattttagctcctctgaccatccttcatagggaacaatttgaagctcccacatagtcctggctgttctcctctgaatgattgccaggctaaacagtctatatgattgggtttaaatgtagacccaatactctgaggcaagtggaacaagatctcaattacactgagatctcctggtagtcaaatcatatgatactattatcagcttttagtaaaactaatgacaattaatatataaccaaaatgtcaaaaatgtatatcccca

SEQ ID NO: 40234 - DNA, 1635 bp, Bovine  19866881082730
  misc_feature (1)..(1): n is a, c, g, or t
nattcagtaagggtggcagagtgaggccctcataaacccactcctctgtaaaagcagtgaaacactagcaaaaatggtcaaacgcaactgtgctggagctctggaaataaactaaaagttgacataatctcaggaagatttattcaagtaaaactgctgaacctccacttgacttctcgtcctcctctgccgtgacctgggtagctgacagccgtgtcttacagcccttgcagcggccttgcagctcttgggaggcccagatcggatctggggtccctcaggagtcctctgctcagagcggtgttactgactggcctcggctctctggaggagcccatttgcagagctgatgaggaggagcccacccttgtgtctttgttacgatcaaagctgggggctgaaatagtgggagtatctgtggcccggggacctgagcagctctgacagactgctgtggatcttgaagggtgcttggcagggctgtgtgtgtgcccagggggacctgagaggggcctggcctcatgctgtctagacctgagtcctgcacagacgagaagtgaaggcagaggataactgcctgagggctgaaagtgggcctcagcgtgtccacagatctggcggcatcccggacactcactagtcaacacatgtaaggactccctgactagtcagtcactgatgactcagctaactgagcagagactcagggtagctgcaaactatggggacttacaggcttcgcaggaaagtccctgagcagcaacagcagcagcgacagcccctggggaaggggacagtctgaattccagggctgcctcagtgtattgtctgaaatgccagctttcagtaagaactgataagatgcacgaagaaagaggaaaatatcgtctttacacaggaaaaatgtagtcagtagaaactgtccttgaaagggcccagatgttaggcttaataatactcgacgaggactgtaaattgctaaagaactaaaataaactatgcccaaataattaatgtatgagagtgatatctcaccaaataggagctatcagtaaaaaggtagatgctattttaaaaaacatgaaataggaattctggagttgaaaatacaataactgaaaaatgaaaattcactagaggggtcaagagtagatttgaactggcagaagaaagaaatcagtgaatttgggaataggatttttactttaattaaattaagatctaaattaaggtaagcacagatccagttgaggaacagaaagcaaaaagaatgaagaaagatgaacagagcctcagagactgtgggacaccatcaggtgcactgttgttcagtcgctaagacctgtctctttgtgaccccacgactgcagcacaccaggctcctctgtgcttgctgtctcctggagcttgctcacattcatgtatgttgagtcagcggtgctgtccagccatttcatcctctgccctcccctctccttttgctttcaatctttcccagcatcagtcttttccagtgagatggttctttgcatcaggtggccagagtattggagcctcagcttcagcatcagtccttccagtcaatattcaggggttgatttcctttaggatggactggtctgatctccttgcaat

SEQ ID NO: 40235 - DNA, 698 bp, Bovine  19866881093060
  misc_feature (1)..(1): n is a, c, g, or t
nttttggatatggtagctatcatcatggaacagacttttaatgttatgaagttatatttaacaatgcaaattaagcaactgtgattgtaatttccataatgagccttcctaactggcagtggattgaagatttcatgactctcagagcctaacataccaatcttccagtgtattctacgaaagaatatccttatttggcaaagggaagagtcaaacttgaaacataattctcttttttatttctggtctcagaaacagaaactcctggggctttaatgagtaagctcctttaatgttggtggagttattttagagaagatcccatagaaagccccagtatgtgctctgctcactaactagtgtctgtaaatatctcacatgatggtaggttactggatctcagaacaataaagaccaaactacagagtaagttttagactattgtgtttcacatcatgggttctggttctatgttcagtgggtgatcaaacatccccgaggcaccactttagcttgtgttctgtatgtcataccttccttgactcttcttgttctgtctcctctgatgactttcaaccaatccactgtcatgtctttactgctgcacttcacgtttgcatcttctctggtacttgactaatcactgaatggcagtaggagggacaaaaaccacaaaaaacaaccagaaaagaactggg

SEQ ID NO: 40236 - DNA, 1053 bp, Bovine  19866881210793
  misc_feature (1)..(1): n is a, c, g, or t
ntaaacaggaaagtccctatccatattcctggactgtaaacacagggaaccgaagtatcagagggagcacaggagggatcacagaacagacaaaccattaaactgctcctcgctcatacaataaacacacacttaagcaaaactgaattcctcatcaggcaaacatttttgcataagctgccttctctttatctttctgtgcctttatcttttgcttgactttcagcaattctgcctggatcgctgcaaaataaatatggaatgtaagttatttctcaaaacatccaaaaaattacgttgaccaaactgatgctttagtatggtttaaaaaaaaaaagataaaactcttctcctgaagagtaactgagccctattaacagagcataatttagaagactgtccaccaagagaactaacaattacacacagatgtgccttctcccttccgttagaggcggctccaaagtgcctcccctgtttccttttagcaaaagactcaagatatatttcaatatctagactgatgatcactatttgtaattggtttattgggaaagaagcttatttttgtcacagctttccaaaactttcctacaacatatccagtagctatttgggatatgtccacattcagcttaaggaatggtcccaaacattaattaaatctgccataaatacgactttctaatgctgctccttcatctagcattaccggacagtaaagcaaatagtccagatacgtgcaaatgggtgttgtggacagagactagactaagctgaaggcagggccctgactcgttcattgcagtgtgattggagcctggccccataacaggcgttctgtactatctgcttaacaaataaaactctttaatggcaaagggtacaatggctcacaaacataaattcttaaaagacaaagtgaactttcactccaaaaactgccaacttacctttatcttctggtgctatttcctgagctttcttaagatcagccttttaattgggagagaaaaaaaaagaaataatagattatgattcatgaaagtggtt

SEQ ID NO: 40237 - DNA, 1594 bp, Bovine  19866881317201
  misc_feature (1)..(1): n is a, c, g, or t
ntcctttctgagatggatttcttcaattttaacttctgaaattttaaatagctactttctctttccatattcaaagcaccaacagaaacattaattgtatatttcattcaagtgaattttaaggagaattttaaactgcagatgaaattttctttgatcttgattttgtggttaaatgtaacatgtctaaattaagtaaaaaagaactgtggtaatttactgctgggataacttaagatgtcaactgtagtgagagatatggattacagaataaaatataaaagtaaatataaaatataaaatagtaaaaaaactgtataatcaaatacatctctctcttcttacagaaaagcaagtttcggcctctacatcaacatgatgcacgttgctactagaaggaaaagctgcctgcaagtgcagaacaagggtcatgctgtaagaagccacaggtgcctcctgggtcaccactgggacaggggtcctgccatttaaagcccaaataaaggtttcagtgaataggtggtgtccttcttcacagccgtgagcactgtttcacataagtagttattcttaacaattataccaacagaagctgtcttatgagtgtgtataacatccagtgttactccaagtgctttaggtgaactgtgctcggctgcttcagtcatgtccaactctttgcaaccccaagcactgtaacccgccaggctcctctgtacatgggattctccaggcaagaatactggagtaggttgccatgccctcctccatgggatcttcctgacacaggtattgaacctgggtctcctgcattgcaggcagttcctttgccgctgacccagcggggaagtcccagagaattagccccagtaattcacttagccccagctaagtcaattagcttacttaattcccataacagacaggacagtttctgctgttccccagctttgacaaggtacatggttaggaagcagaggagcctggtctgaatccaggccactgaaagcccactgactgtccactactgtccactggctgcaaggagcctcatctcaccctgggcttggccaggtacaaagcacacctcagcgaggctctcacgtgcttgctgcaaaggtaccagttcacaaaggaaaaagctgaggtgcccaaggaaccaaataggcaaagccagatgtgatccccgtgatgtccctgtgatgccacactgccacctcaatgtttcaaagcccccctccaaggacacaggattcctggctttccaaggggtatggtgcatctgtaggtctggtcacaagaactcaggggaataacccttcctgagcaatcaggcagctgaccgtaatccagccacctacttgcttgttactagctctgcatcttttgtggaggccggaggctggcaaggagatggaggctggcagggagatgctagctgtttggtgcggggctgagtgcagacaggggagggagggggagctgagaatgcaggtgagctcatctcaggtgcgaccctcccagctcctggagttcttcccctcctggtacacgtcttcctgctctggaaacctggctccctccctccttaagt

SEQ ID NO: 40238 - DNA, 1242 bp, Bovine  19866881345876
  misc_feature (1)..(1): n is a, c, g, or t
naatttgaggaaagtacttttccgattatcagaattcttgctaattctgtccctctctttgcctacatataatgatcttaagtaagacattggtatgtcaagttctcagtggtatagaaaactcagtccctttgaaatctgttcttctagtatataattattgagaagtgtaagctagacgctgacagaaatgtttcgattctcaagatattatctgatagtatgatttataccagattaatgactggctgaaccactgggcagggcataatatttccaaacaattacgaagaatgaaatatcattttctcttttcaggtttcccgaatctgcagtttctgttttgaagagccaacacttacggcagaaactccttcagtctctgtttcttgataaagtttactgggagagtcagggaggtagacagggcatcgaaaagctaatcgatgtgatagaacagagagccaaaatcctgctcacctacatcaacgcacacggggccaaagtgttacctatgaatgaataagaaaaggtcttctggctagcggtccagtccttttagagatgaggcagtggagatgaatacacaaagtaaatgaatttaatctagtaaatacgatgaacctgagcacaatagcagtctttaaaagcttttgcaaatatactgctaagatgtatctgtttacattttcctttaacatcatgactcggagtctcaacatctgagcacagaatagttgcaattttgatcccaagttagttgtattaaagcatctgtcacatcgggttaacaggatagtatgaaccagaagtggtgattcctttaataaatcaggtttgatgccatttgctggtctaaccaaatactaatgggaacagttctggatatctttctgttgttgattgttagaacagacagcagtttcaacactacccagaggcaactctacgctggaaaatggaggtgtataaccttcagaaacttcaggactctatagtaattttaaggagaaaagttggtttatttgtaaaacctccaagtgtatattctattgtatctaaaaatgatcagccagctttgtgatcctcaacacaagaatcgcattttccattcccttttggaaatgtattaacattttgtcatcagtatagaaacctacatctgagagtttatacattaggtagttttactctctgttttggtccaacttatgtctggggcttaaaaattcaatctttagg

SEQ ID NO: 40239 - DNA, 1417 bp, Bovine  19866881354290
  misc_feature (1)..(1): n is a, c, g, or t
nagtgtaaggcttttccattaaaagtattttactttcagggactttccttgatggttcagcagttaagattgctcactccccaatgcaagggacctgggttcaatccctggtcagggaactagatcctacatgctgcaactaagtctcagcacagccaaataaataaatatattaaaaatattttactttcaaaatataataggaataatagtgatccatgactattaacataaacttataaattgcaaaaaaaagtttggatgcagtcattttatataatcagtagtaatacttcatatgatatcttgactcataagatttttctggctcacttttctgcagattcatttgtttaggtcatcagaatttgtatgtcagttggcataattgaaagcggtgttagctgctcctttcaaatgccaagatggcagataatttttgataatttttttattttgggaaagctcattttgtttacttgtaacagttactggaattgtatagatcataacaacattgagataaacttttaataaactttaaaaatataaattttagtatgtctagataagattattcttatggagaagttttgctaaagatgttattcttcacacatatccattttgtatgtctgaattcagttttaaatgtaaatttatacaagattattttaatgtttcctctgccaattcctgcaacttatggagatcttacaagaaattagaagtgtctttgtgcattgcatgtaattcagaatgcctgtttatgcattctatactatgttgtcaattatatggaaaattaattttaaaataggcttccttattaataatttcatcatctaaagcttcatctagaaagtaatgggtattttctatccagtgaaacaagctctacacttgatttctatttctgtgcttgtatttgcttggcagtgttgctgcagttttcaaaatgagagattaaaaactctttgaagaactctagtaactccctgatgtattaatactttactgcattgtccactgtaggctcttctttgtgataatttactgccctggggctcaagacaaagagctgagtatttttgtagaccccacaagggcgggctctgatgatagatagacaagctgcctccactatgtctcgcccaagtcctttccctctcccacagccgtgacctctgctgccaccacctgggatctgctggcccaggtcccagccttgccacctggggcctcgtggcacctgggttctggcgtgtgggtatgtgcctgcccccaggctgactgcccagcgtccaagttccccgtgtgctcagctgcctggcatctgtgtgcgtgcccgtgtgcatgcgtcatcaccccatcagacttcacttagagagcacaagttaaagggacccagttaggg

SEQ ID NO: 40240 - DNA, 848 bp, Bovine  19866881379905
  misc_feature (1)..(1): n is a, c, g, or t
ntttctgagccttgtgaaataattacatctgagaagtatgctcagcaacttgatgagatgcactgaaagctgcagtgcctgcagccagcattggtcaacagaaagggcccatttcttctccacagcaacaccaaactgtatgttgcacaaccaatgttttaagagttcaatgaattgggctacaaagttttgcctcatctgccatgttcacctgacctctcgccaactgactaccaattcttcaagtatctcaacaacttttgcaaggaaaatgcttccacaagtagcaggaaacagaaaatgctttccaagaccgtggaatctggaagcatgaatttttacaccacaggaataagcaaactcatttctagttggcaaaaatgtattgagtgtaatggttcctatttgataaataaagatgtgtttgagcctagttatcatgatttaaaattcacagtccaaaactgcaattacttttgtaccaacctcataacatgtttcaaagctagtctctcaactcatcccaccctctccttcccctgctgtatccacaagtccattccctacatctgcatctctattcctgccttgcaaataggttcacccgcactatttttctagattccacatatatgcattaatatatatatttatttttttctttctgacttacttcactctgtgtgacagactctaggtccatctttttactgccttcccaatgtgagattgtttccaacagtgtatttttaaagcattttgcctgatccaatttgaatcactcaacagtctatgataatttcaccacttccctgtcagactgttgtgcccttcaagtctcacagacc

SEQ ID NO: 40241 - DNA, 1506 bp, Bovine  19866881431911
  misc_feature (1)..(1): n is a, c, g, or t
nccaccctccagggtttacagacaataactagatgcaaaatcagtgcaggtagcggcctgtggagcattagacccagcccagggaagctgagctttaaatggtcaattctaagcttcatgcagaaaagatgtggcccagcccctggcagccgagaaaactagcttggcctctgcatgcccccctcccctagaaggaggtgacgagggagacccctcaggacatcaggcagcccgcccctcacggctgccgcctgcaccacagaccaggaatgttgctgctcttctgtaaaccctcctcctctcaagaacatccacctgttctctcataaactcaacctcttcccaaaagtggaaaaagaatctcatggaactgggtggagacacgccagacaccaccccggggccgggttctgtctcagccacagaggtaaggaagggacccgccctcgcccaggcccacctcaagaagaaagcaaaattttaaaaaaaaatgtacaaatagagaaaactacctcagttgacaggattccacctttagggtttcttcaactttgacgtcttacctgttgagtgtacctcttgtagcatcttgcttgtccaggcgaatgggaggcagacggagcgggtgtgtgccagcgttgccgtgcgggccttcctccagcatgtcaaggcttaatttttcgtagattgatgagtgatacgaaatgtaaagatacttgtgtacgtttaaacatgacaatgaaaacttaaaatgtagcttccatacttgtgcataattccaaagtattttatttttatcagtgttaaatagctttttgtacaggctccaatccatttttctgaagtgtgctgttttttaatgaaagtaacgataaacttttcacatcccatgaaactgccgtttacacattgcaactttttaaacttatcatatttttcaaagttaacttttttcgagggaggaaaatccccacctgctaaatgatactaaactcttgttttggctcttctaattaggtcctgagattttataaaattcagtctgtagctttttaggttcctcactggagttggttgtacataaaaataaagaatataaagtgaccctacagttcttttaaatatctgaatttttccacttacatgtgcttttgaaagtattttgttcatgcatactttcaccaataaattgaaaaagtcttgagcttcttggtaaatgtgaaccatttgtttcctattgtgctttgggggcaggaacctttaataatataatatttgcctaaatcaagcagccccctctgaatgttaatttttaaaagtccatatttggtgaaccataaatcttggaagcaagactgcaatatgcttaaatttaagtgatgttttaaaaggagaaaattccaggggttgatttgttatcattgaagttccaatacaacaaattgataggactttgtttttgatcagttaaatagatatcagtatcaatgtttggaagtctttttt

SEQ ID NO: 40242 - DNA, 1676 bp, Bovine  19866881627307
  misc_feature (1)..(1): n is a, c, g, or t
ncaaagtgtagctgcaggaatacatctttaatttcagttctcgccgtccagttttgtatctaactcccagggtcccagcggcttgaggcactggtgcagggttgacctgagcacctccctctcaggaatccaacaagccccgttctcatgctctcatgggtcactgggagacaagcagcttttgctcataagaacttttgagaagtttgaatgaactgcctctaattgcaggatagagctattaaacacttccttaaaagatattctccagctttcatttttggaaacacccccattctgaagggtaccattctaggccccagcctaggattattcccaaattcccactctccccttggaatcagagcctcctccagtgattcctcgggtgctgtttgacacactttcagccagagaagaggaaaacagagagagtcaagtttcatttgtagctgtgcatctcaccacaatagtagataacattcctgagtgattatgaagaaagaacccttcattcaacgctgcaggttcatgcaggtgcttttttttttttttttttaacctagcttcatccctttgtagaaatgtctaggtacagttcccaggcacatgtaagtgtggggtcaagcaatggttaattaaggtggatctgacaaccaaacattcagtgtgtttggcattaaggaatgtgaacgttttatttagactttctctcttctgtgatgagcttgattcttttttcctgcttgggctagagctgcctccttctcttctggaacattttcttcttcaatgatatgaagccttgtctcacgttctgtgtatgtgatcccgggcttccctggggagtacagccaacagcactgagagagagacctgtggcatctgatttggctgcttccggccagttctctctctcttggcattgctggttcagagattcagattccaacagcttagtcttcaccctgacaagtatgcaaattggactaatttgaatatggctaactctcccttttgtgccagagaacacaccctccccctttgcaaggcggttgagaatcctggaacgctgcacaccccctcaccttcctccttatcccctccactctctttatccctcacatggcaacagccgcctccaagagtccctcctggaaacctggatggtgctatcattccaagccctttcaggcaaagttaattgctccattttcttgttttgttttcataacattttgtccacatctctgtaatggttctctttaatcccatgctgtaatttactttctcattctcccatttcctctagccacttgagggaaaggcccatttatttttcttttctagagtcattttcttttattgaagtatagttgacatgatattaaattagtttcaggttcacaacatagttattcaatatttatatagcttagatttcctttaaagttattagaaaataatgggagtattcccctatgctgtgctacatccttgttgcttctttattttatacatagtaatttgtgtctcttaatcacctacacctatccttccctcttctcttccctctccccattggtaaacactagattgttttctatgtctagattttgtttctgttttattatatgcattcacttaaaaagttttttagatttcacttataagta

SEQ ID NO: 40243 - DNA, 1916 bp, Bovine  19866880421905
  misc_feature (1)..(1): n is a, c, g, or t
nccctctgcgtgatggtgaatgcgcgcgtgtcccctcgctctcactgtggtgtggctgggaccttctcgggttgtgtgtgagggcacaggcgtcagccggctcacagcctccaggtcagtccaggaggagccggtccgcgaatctcatgactccggctgttgctagatccgattggtgggcgccaggtcctggctcaccctttcctgcccccacccctagctctggcccatccagctgcccagcaactagtggtgggcagggggagggcctcccagtccagacaaccccgctggctccctggcttggaggagggaaagttgcggagggaaaaagcttagctccaccatcctgtgagactcttccttggttttagggcaaattaggcctggagaggcagcctgtggtggtcaccgcggcaggacaaagctccgctttcacccggcctggctccctctctgacttaggaaagacagcaaatcccaacaggagatgagctcatgtcctcgctttctgccatgttgaccttggccaaggtgtaactgtctcccaacacccccacccccacagccagccgtgaggagcagcagaaggaataccattccctcagttttcctgccctgagtctcacggatatatgcggtcttcgggtcatactgaccttgttcctctcttcctctttcccctcctcagggtacagcagctggagggagctggccaaggctctggccagcagaaacattccggctgtggacccgaatctgcagttctaccgtccccagaggctgggccccaaggtacgtggcagggtcagctgtccccttcctgctgccttaactcgggtcccccacccgcccacccacatagccctgagggcatcctccactttcccgtgttaggagaagcagagcagagggacgccctggatggcagactggcgtcctgggctctcctaccttgtgggtagagatatccatcctgccctccctcctcaaagcctttattatgtcttcaagatgcccaagtctgagctgtccagggatgtggcctccatctctgcaagaacaggggctggaggaaggaccagcacgtctcgcctcctgctaggatgactgggctggtcctccagtcacaatcccggatgctggcagccaagagtcacagatgatgtggtagacagacacccctccctgaaaatagctgcaaataatggagcattttcctgatagtgtttcttgggctgctggtccccagaagcagctctgggtgggggtttgggaactcaaggtcagttcagcttggagccgtaaggttgagcttctgagcctagaacagatactgcccccaaggctggaccagagcctaactgaccccatggacctacagggtagggaagagttggggtgtccccagggggacaaatgttaggataaatgagttgcaccctaagggggtgtagagaaagagggaggcagggtccctgtcctcaggagagcctggtctaattagaaaagaatgcttttggtatgggaagactgagaaaagtcaggaaagcggaaacatcccagaagtctatgttggaggtgtgttggtgagggacagtgtgtgggccagaaacaggaatgtccttaagttgacaagcttccgacagcaggactatgtctcttgaccctctgcatccccctcaggcacattcaaggggccccggtcctatcgcccccttcatattcccaccaagttcattcttctctgttctgccaggacccaggctcagcacgtggtgggagtggaaacagcagctacctgaagtggaataagccggtgccctggctctcagaggtgaggctgctccttgaaaggcagggttaaaaaaacagtgttgatattagtaggtcactccagaggccacagagcattt

SEQ ID NO: 40244 - DNA, 831 bp, Bovine  19866880656034
  misc_feature (1)..(1): n is a, c, g, or t
ncagtcaagcctaaaggaaatcagtcctgaatattcattggaaggactgatgctgaagctaaaactccagtgctttggccacgtgatgtgaagagctgactcatctgaaaagaccctgatgttgggaaggttgagggcaggaggagaaggggacaacagaggatgagatggttagatggcatcacagactcaatggacatgagtttgagtaaactccgggagttgatgatggacagaggccttgtgtgctgcagtccatgaagtcgccaagagtcagacatgactgagtgactgaactgaactgagaaattctcagaattagaaacaagccacctggtataagcttcagttgtattggtgggattttcacagctatggtgtttttgctaattgattggtgagtggctttttattttctctggtgatagtatatgactctctttctttttacagatttgattgagctacgagtaatgctggaggatgctgaggataggaagtacccagagaatgatctctttcgaaaacttagggatgctgtaaaagaagctgagacgtgtgcttctgtggctcagctgcttctgagcaaaaagcagaaacacaggtaaggctgagaagaattctctagtggttttctgttttattttgaccagagtaatgacagtcttaattgtctgtgaggccatgttatccctccccaagtaatgccccagctttgtctcttgctgcttgcgcttctcttgctctgcctgcactacctcccctgctcgtcaccctcactgtgctccccctgcccttcatcctcactgtgctccccctgcccttcaccct

SEQ ID NO: 40245 - DNA, 1452 bp, Bovine  19866880716474
  misc_feature (1)..(1): n is a, c, g, or t
nacatcagttgtatttcagggtgtcctgatgtcggaggaagaggtgtttgagcttgtgcctgatgatgagcgacagtgttcagcctgcaggaccacctgtttcctctctgctctcacgtgctcctgtaaccctgaacggctcgtgtgtctctaccatccgactgatctgtgcccctgccccatgcagaaaaaatgtcttaggtatccagacgtttcttgtaaagcttccattacagtctttttaaaaattgttaatactcttgttcgtaatgcccttccttgtgtttgttctagttacctcttacctgtccgcctcctttcttgaagatcagcccattaaagttggccctaaacttactgaataaaatgagttgctttatcaagttgatgtcacacattccttgactttctctgaattaaaactctgtgagctgcttaggtttttctctttatgtgtacctggccattgtacttcccttaaggtgattctgtttcaatgttaatttattttcaaattattgttgggttttgaaagtttttatttttgtatgtgatcttctttttagatatcgctacccattggaggacctcccttctctgctctatggtgtgaaggtcagggcacagtcctatgacacgtgggtcagtcgtgttacagaagcattatccgccaacttcaatcacaagaaaggttaagtttcttccttttttaagcagacactgaaatggttttcactttgaaagagatcttgttttgtttcatgtgtttttcctccattaaggaaaagtcctaggcttcataagagatttgagaccaatgggttggttgactacagacttaatttcctgtttgagaatcttttgttaagtgataaagttgatataaaatgagattgctaacagcagatgtatcatatattttggggaaccgttgttacaagtagactcacattaacagctcactgagcaattctctgttcaagaaaattagagttaccaagggaacatttcatgcaaagatgggcacaataaaggacagaaatggtatgggcctaacagaagcagaagatattaagaggtggcaagaatacatagaagaactatacaaaaaagattttcacgacccaggtaatcacaatggtgtgatcacttacctagagccagacatcctggaacatgaaatgaagtgggccttaggaagcatcactatgaacaaagctagtgggagttttgaaatggaattctagttgagctatttcaaatcgtaaaagatgatgctgggggaagtgctgcactcaatatgccagcaaatttggaaaactcagcagtggccactggacgtgaaaagggtcaggtttcattccaatcccaaagaaaggtagtgccaaagaatgctcaaactaccacacaattgcactcatctcatacgctagtaaagtaatgctcaatatt

SEQ ID NO: 40246 - DNA, 735 bp, Bovine  19866880754334
  misc_feature (1)..(1): n is a, c, g, or t
nacatttaacttttaaaactctgtgtttccttatatataaaatcaaataagacagtggttgtgaagagaaagctctgctaattggaaaacaatatctaaattaggcaccttcgatctgacttccaaaccaaactacagcgtgccagcatacaacactgtaccttccacttcacagaaacagtcaaggaaaagaaagatgattcagaacacagcaaccaaatgccacagttagagcctgggtacctccacttttactgcaagtgtgacttcaggaaagtttctgcatctctgacccttaccttctttagaggtagaaagagctaaacgcttgccttgtctgtcctttcccctcctgctcaggattatagtatcacagataaaaaaacatgggtaaattatataaaaatatataaactatgtaaaacctcaataaagaaaaccataaagcagaaatactttggcttggtgagagagaaggcaactggagcactatccaccagtcctccccttgtgacctgaggaacctccaaggagctgggacattctaagtggtttaaaccattgtgtaataagcttccaatctgtacctccatgatgtgcaggaatctatcttcagagggtggggtgtgtggcctgcaaaatccgccatatgtgctgagtctcgtccagggacacctccaggagatctcccaccatcatcagctcctccagctgagctttaactcctggcgacaa

SEQ ID NO: 40247 - DNA, 2119 bp, Bovine  19866880759682
  misc_feature (1)..(1): n is a, c, g, or t
nagagaaagagtttgtgtagtgtagctagtatcagttttatttgaagcgtgttagattttcagaagttatcttagtgtatctgttggcttatgaaaagtgatcatttagtaatttatttcacgtaggaaaattaaagtacatgattaaaattaaagtacatgcaatctcatgattgcactttgaattttttctaggccagactggtagttttaaaaataatttttagataacatctaaatagtccttataaaaaatagtccatgtgaactgtttagtgctttttccttcccttcccttccattttccctcctttgtagtagcatctggtttttttttgttttgttttgtggaaacatcaatgttgactacgtccaattatacctttatagcttgataatttttttccttttcttgtaagagcagtcccatgtgactggtgtaaaagagttctgcctcatttatgtgtcaagaaactcatgcttgaggtgcataactgtgtaatgagtggaaatcagctgcttaggctagaagctcagcatcgtgaattagggggattttctttgggaaggccttcgtgaaattcttgctgggtgataaagttttaatatttacagttacctcttatattcaaatgggacgttcttgttctgttgtttataagaaaaaaagaggatttggggtaagcagtggttctgttctggaatgtgttataagcaagtactttaatttgagaatcttgtctttttttcagctgcccattggacgtcagtgtgtgagtcactaccgccgtctgaggcgccattgtgtcttctcacatgaggagctcatcttcaagatggcagcagatccggaatgcttagatgtggggttagctgccatggtgtgcaaggagttgacgctcctgactgaggaggagacacggttaagagagtctgtgatgcagatggtgagtttgctgattatagtgctcacggaatacactaaaaattgaacctatggtggaaagaatccattttcatcttcaatccctctagaagttgaacacagaaattgctagtttggagatttcatacctttgtttctgccattttggtttaagttgaagttttaggaatcttgatgtcagcatctccagatttttaaaaatgcagtcctgtcaggtagaatttattaggtatatatttatttttaaaattgtcctatgtatagtgtttctttaggtgagaaagatcaagttcttctctcagctttctaattaaacaaaagttgtgtttctggtgattgcagattgtccgagttaatcgatttgtctttttcctccaatctaagttttaagtgaatataagaggcactgaataacccagtgctgggattttgaatgcttcaaataaactaaatatcatattgaaatggaaactaaatgagaaaatacatgtcttcagcctgtcttagcccattttccctaaccctccctacgtagctagcctcactgggtgtgtaccatgctccctccgtctctgcatagcccactttatttcccatgatacacgattccttgtgggatcttggttcctggaccagggatcgaatccgtgttccctgtattggtaggcggattcttaaccaccagatcactatggaggtcctttagtggaattctttactgtaaaacttacctgatcctttaatatgctggtgtttgttaatttccagttggaagaggtatgatgcatagcatttatctcccccttaaatttccttgtttttttgtggaataccttctagggttagtggtccttagagtatgctttggaaagaggtgtagaatttcttaaagcagccaggacttagttgatgtattagcattccctgtttgccagctgttaacgtaagaaacacttgcaatgcattttggaaccatttttgtattaaagtaacttttaaagaaaatacgaagtgctctatgagaaaatgaaaagatagagttcagccaggagatatctagataagaagaaaatattgaaggaattaggttgtgtctgccagtgaataaactattagatcactaccttgtttaagtggaggaagaaaagaagattgctctcatagtggaattgg

SEQ ID NO: 40248 - DNA, 2343 bp, Bovine  19866880827410
  misc_feature (1)..(1): n is a, c, g, or t
ngttggccagagcagaggttctgggagtagctattcccttcacctgcagggaccacaactgagggctttggaggagagcctacaggatccaataaggtgtcctggtcctagtaaaacctgctgaggttcagagtggagctccaccttggtgagaacatgaagtttgagacagaagagcatcatctgaacagaggacaccaacagcaagcttggaagggaggccagaggttccagccaggttgtggtcactgcagaggacttcctgtttctgcccacccatgggggctgaggtcctgcatgtacaggacaggatggggccaggctggacagagtcagagggtacaggtctcactaccaagtgcagccggggctgaggcgcccaggccatggggacactgagacctgattgttgtttgaccttgtctctccttcgggattgtcctctccttcgtgaataaatccacttcctcttagtttactctctccttgactgcatgtttcagaacacattctggtgctcctagagggatgaagcacctccctctcaagatgcagtctccttgtcagtgtcttaatttagtactgagcactgtcaagtctggagaaggaaatggcaacccactccagtactcttgcctggaaaatcccacgggtggagaagcctggtacatggggtcgcaaagagtcagacacgactgttatggggactccttgctaggcaccgcctccccgagtctctcagccgtctgtcctctaaccacagtccccaccttgcagggtgactggcccacccaagtcagcactgggtcatttcaacccctgtttcacacctttggtgggttttaggtcagccgaagcagacctgggaacaggctcccatcctagcctttgtgaggccaggtttcacaccaaccctgccttgtcagtggattcctcagggagaaacaccaaactgtaccccaccccccagcgcccacaccccagctgcccaagctgctccttcggactcgagcgccaccacgtggacacggggcaacggtgccttgcgggaccagaacctttcaacatgtctccccggctctgggccctctttaggctgtgcatccatatccagcgccatcctaaatgaatcgcctcaaaacgcgcccagttctttcgagagactgcaggttgcctgcagcattccgtttgccccctgcccccacagccctgcttgtgaccctctcttttagagtaagtggcttcttgagagtaaaacttcatcttaatgtttcaaaagcaaatcaaatgtaaattatgcatcaataaattctagctaaaaagtaataacaaacaaatgaattcttttgaccggcctgtactcctgtgtacatacatgcatgttcacagacgtgtgtataatgggctgggtgtgacagctggggtgtgtgtgcctgagcaaggctgtggctgcaggggtccccacgaggtcaagttggagcagaacccaagagtgcgcagctcctgttccatctgtggcgctctgcaccccgccttggggcccacatcgttctgggaggagagaggccttttccttgtccactcagcctcagaactcctcatcctgtcttctgcaatgctctcctctcaggggaaaacagaggtggtaaagaacccacctgccaatgcagaagactcaggttcgatccctgggttgagaagatcccctagagaagggattagcaacccattccagtattcttgcctggacaatcccatggacagaggatcctggggggcttaggtccatggggtcacaaagagtcagacacaactgaagcgacttagcacaccccttcccagcctctcaaccgcttcccttctggagcctcccgggtaagcctgtattttgtccccaacagcctgggagccccagcccagggagcagcccgctcgtcaacctgaaccgttatgccaccaagaagagcctggcggagagcttgctggacatggcgctcttcatgtccaacgctgtgcagctgaaagcggtgctagatcggggtccgtcctcctataactacttcgccctcgtcaccctccttagcatctctctgatcctgcaggtggtcatcggaatcctcctcgtggtcatgggtgaggagcccgggcctggagctggcctcggggggtcggtgggaagaaaagtcccgaatgcctccctgtcacaccgtgcgtttgcacagtcttacactaacctgctgttagccctgtgcaccttcaagtgcccaagtaacaaccacacagtgcaggcaggcaccctgacctacctcctagcatcccatctagtagccagtacaatacctg

SEQ ID NO: 40249 - DNA, 1131 bp, Bovine  19866880834496
  misc_feature (1)..(1): n is a, c, g, or t
ntgaagactagtaagttggtgtgttgtcatcatgatttgtggcaactcatcccataaattaagagaatgaattccttgctgattaaccaatgtagtgaagaattttttttcccctatttaggattggcagcctccatttgcatgtgaagtcaaaagcttccgttttactcccagagtccagcgcctgaatgagcttgaggtgagtgatttcttcatgtcaggacttcaggtggagacctttgagaaactcatgaactgaggctcagagttaatgtgaatcgtgactgaatggaaggaagcttctgatttttaaaaaagttgtttataacagttaaagttttttctacttaactgggattatggggaactatctgctttcttcggtgcttattattctgctaaacttttttgttgttgttagtgttggaaaattctctatcctgtagtcttttgggaaatatttttaaaaattattctattaaaacctagtttcagaggggtttttttcccccctctgacagaacttttctaggactcgattgatttattgagatctttctttaaatactcctgatctgtcttaactttccagtttgaaatttgtttaaatagttgttcccttcgcttgctagattttcaaaggatgcttcaatgtggataaaaactgttctagaatacaaaagagagatcttaaagatcgttaaggcttaatgtgttatgctgtttgtttttttctatgatgctcataaaacattgatttttttttattttaatacctatttttctttagtttcttatattaagatacttgatgaagagtcttaatgtcagtgaggtagagagttggtgtccctgaagtgtgcatattatctacagatgaaatgtcaggcatagaatgcttagaaacagaataatttgatttattaaattttctgattagcttaaagttaacttttacaaaaaattgctttgtttagataagaacttttcacataaattaacttttttgacttagtaaagtttgcttcttttttttttaacttataaggtttacttaagcagtgatgaaaagtctgaatttcttttgagagatgagtacctttgttaagtaaaactcattttttcaatcat

SEQ ID NO: 40250 - DNA, 1298 bp, Bovine  19866880911878
  misc_feature (1)..(1): n is a, c, g, or t
naagggggtggaggatgtccatcgcctacccagtcaggtgcccagtgactaggtggtgaggaggtgtccggtctctcagggagaagagtgtcttcctcgtcagggtcccctccccctgggcccctgatcttgccccgtctacctcctctggacgctgcttcagcaattacatcctttctctcttggattctcctcctctctctccttcaccctcactcctaaagctcaaatctcaaggtgtcatccattttccccctcctccccttggtggcaaatttcctgaggaattttgaggtggaatctcagactaagcctcctggttcctcaccacccacacacacgccctgaaacgccctctccctgcatcccgccagcctgtcctcctctgcaaaactgccttctcccggggctccagggacccagagcctcctggatactcaatgctttcaacggtccacgctggctcttatgctgaccctgtgttgactctctcataaaccccccaaaactccagccttctccccagccatgttctcccaggtgagcaagggggtgcccagcggacaacattaccattcacacccttgcagctcagagtctgtgcccttccctaactgtctgccaagcaccctccacgcctgccctgccacacaggcagaggcaggatcccctccaatagttcagtctcagcgaggaaaggaatccaggccagtggggccaagggggctggacctggggggctctagccccgcccctgccccaggctcctcccgtaggcccctccccagtcacctgtccagcagctcccagtcctctccgccccagcggtctcggaactccttggtgttcatgccgccgatcctgtccaggtctgacttgtagatgcctagcagcccgaatccgttcacctcccagtagcctgcagacagacaagccccgggggaactgaacctgggccaggaggtggaccgagggggctccagggttgcacccctagaccctttactgggaggcgcaagactctcatctgaatgagcccttttcctgtttgtggggaaagccctctgagctaagtttcccggtccagagaaggcagcagtcctccagggagggaccaagggctggtgacaggctcccaggaggctatgacaacagcagcccccgagggtgcagccatgcccggctccctttccaggcaggaaacctctcttctctgcatcctgagtgggcacacagtctggcacatagtaagtgcttggtaaatgtctgacgaacaaatgaaggggaaaacccaggaa

SEQ ID NO: 40251 - DNA, 843 bp, Bovine  19866880944570
  misc_feature (1)..(1): n is a, c, g, or t
ngtgcggacagagttaacactccttcctccaacaacatctgctgaagacatgaactccagccacttcagaatgttgcaaactacagacagccagtggctgctgtctcctctccgtacagagcaggcagaccacaggccagcagtgactccgtggtaagggtacagacagtctcctctctgctgcgcggctgctccctgcacccctccacctattccccgctaccctccacccatgttaatattcactgaatccatagtaggcatcaggcactgtgcggggcttttcctgtgttcactctgccagtagagacctcagccctgatcagcctctctgcagggaccaggagctaaagaatgtgccaattcaactactgacacttgtcacctgccctcagctaagtgaactccaactcccggccagagtgccagctgccagggcctgtctctcctgcaccaggtgtcacatttgtgccaggagacagacaccccgatctcaggtgacagacaaacaccagcaatgggcctcacattcgggcctcacattctgccctcacagagctgggctatcaagttcagcatcagcccctacgccaccaacgcccctcccctgcatagcatggactcttcaaaggcctagagatcatctcttcagctcttaggtgaaaatatggcatacgcacagcccatggtcctttattatctttttttttccccccaaaaaactctcatgtgcattatttcactgcatcctcaccacctccggcctgggcagggctgcactgttaagggcttggcgtctgccctgagctaagacacactttgcaagacgggaaggcctgagcc

SEQ ID NO: 40252 - DNA, 1228 bp, Bovine  19866880986136
  misc_feature (1)..(1): n is a, c, g, or t
ncatggacaaagaagcctggtgggctacagtccacagagtcacaaagaagttggacattactgagcacatagttggggttgggggtgctgactttctgcaccatcctggtcttcacccgttggccacagattcaggatcctattcctttttgtcctcacagtatcttggcaccacaaatacattgataaacattttggtaagttatgctaccagggataaagtagatatacaataccaacctattaaaatgaatctcacagtattttactggtaagctgtgggggtgggtggggagtaataataagccttatatgcgtagagtaatccagagatagcttaaataactaaagggaaatgtaaatatcacttaggagataggattaaatatttaggaatatgagttacacgtagagagcaaggagcacatattctggattagatgattgtgacttaacacaatttttacttttgtttttaaagactctcttgagatacctgttgggctcttgtcatttctgctctcatttacactgttttccttctgtaggaatatgcgctttctggttggaacttgaataacatgcctgtgctagagcagtctgttcttgcacatatcaacgtggacatctctggcatgaaggtgccgtggctctatgtggggatgtgcttctcctccttttgctggcacattgaagatcactggagttattccatcaactacctgcactggtacgcacagtttttgttaacaacatgcacacttggtgacctttctaaaggtgtgataaaattaggtgatgtgttggggagaactgactttaaagtgtgtcctacccaaagtaggataaggtactgggtaggggtctcagggtacagcgtctctgacacttccactcttaacgtgtgcagccgagccccaggttttagaccaggtgattcttagtattcagtgtacaggaaacatttctttgatttaacttttgatatgtaaggcaggatatttaaagtttatatagtcaagatctgactaaccttcagtatttgaaattaaatgcctgtgttacatgtgtattagttaaggttttttgttggtttttgtttttatttgacccacagcttttatttacttacccagttccatgttcagtattccgatcttaaccaaatagtatttttctttccattgaaagatactgctcaggtcagcggagaaggcagggcacccca

SEQ ID NO: 40253 - DNA, 1334 bp, Bovine  19866881008032
  misc_feature (1)..(1): n is a, c, g, or t
ntcaaaagaaaagaacctcagcaagccaacacatcaaggtccagcagggaccaaagaggaactcaagggttcatgctccaaacgggacagaatgaggatccttctggaaaaaggagaaagtgagagagcgagctttggagatgagccaggacccaagaggctccaaagactaggagaagggggcttgcgaccaccgagccaagacctgctgtgatcttagactcggtccgagcaactctcgtttcacctgcatgaaatggtttctggaacattctcccacttggggtacttgtgaagacaagtgaggcacagagaactgagattatttttttggcctcctgagcttaaactttgatatttaatgacccatgatagcggtcagtatcctagtaacacagaagacccttggggatctattaactgtttagcattcccaggtcttaggggaatatgtgttccgtctttcaaagagcctgttgtaggcaatttggagagtaagatacaaatatgcccatgagcaggctgagcacagtgctaggtttcctcggagctcaccagcgcacaaaaacacacgcaggcttcgcacaaagaaggcagtctcatactgattctgaagtggcttcttggatcagcttgttagagttgcaagggctacactaaatggcttacagtgggaaggaaggttaaaaagagacctgtggaaggaaagtggacgctgcaccgtggtcacttaatggatttattgagcacctagtatgtacacggtagccgctcttcccagctctgtgcgaagtaccagtgccggagccgggaaggtctggaatcaaatcgagccccagccccatcacttctagctgtgtgaccttgggcaaattccttaacctatcagggcctcaggcaactcgcctcgccaccaccaccccattgttcacttaggaagattattaataattaggtctgtgaatgaattaaagcaacatctcctccctgtaggcaggataagagatggctccctcagcaccagggtccccagctgctgtttactgattgtttactccacccttgcatatttcattcattaatatccaacacacactaaccccgtaaggtaaatgttcctctccccattctcccaataataaaactgaggttaaagagtttacaagatttgctcaagatcccgtaaatggcccaactgggattccaactagactagtcctgtttggcttcaaagttcacagtcgtcctggtagccccgtgagccctgcttcctcagccccggtctgcctcacacattgagggtacagtaggccccggagttcacagagacggat

SEQ ID NO: 40254 - DNA, 1409 bp, Bovine  19866881080544
  misc_feature (1)..(1): n is a, c, g, or t
ntggacagccttctctcttgtatgagcttatcctttagggactgtgggtcagaaggagagaaaaattcatttgttctttaatttgggtaattcaaatagcactgagggaaagaaagaaaggacttccagaagtgctaaatcagtgaaggaacaagacatcacggagaacatctgaaaacctacttctggaggattctctagcttttttcttaatgtgtacagagtaggaaattctggggttttttccctttattttttagaaaaatttttaaacgaaacaaatattttcggctcttggaagagtcagataaaagagttaggaattgtaccaaataagacattacaaactatttggggatacacttcttaagtttttctttaaaaagaaacatcaacagcacttaaaacacatgctccactgagcagccaggatgatcctgaagaagcccaacttggatgccccttccttacacagaatccttcaaagacacgacgacgctcggagctgtgcatcctcagcaggagcgtgacgtgacggccgccctccctccaccctgcgtgcccacccctcacggccacatgctccctcacacctgccctgatgctcttcccccgaggtctgcctggcaagcttcactctccaggtctcagcaaaaatgccagactccagatagtgtcccagtgcttctcaacaaaagtagacctccaacagcaacatacaatcttcacagaatccttctaattctataacaccactttttttccctccgtaaatttaatgtattttggctgcaccacctggcttgtgggatctcagctccctgaccagggaatgaacctgggccatgcactgagagcccaaaatcttaactactaggccaccagggaactcccaggaccacttttctgtaacccatacttggttatttgttaatgtttctagtctttctcacctgttagaatgtaaatgccatgaagacagacctggtctagccttctgctgctgtacactcagagccccgcccaccacaggacttcaacaaacatctgttgaatgaatctgtcgatcagtcaacacttagtgttctaaatccccaaacacagtaacaaagagctactctttgagacctatttcttgagatcgttgctacaagagcttcctggactggatcttatatgacaatgattaggttctttgaaattctccgagttctttcaacaattccagaataaaaaaaaaattctgtaagatagaggaaactaccttaatatattcattttggttgtgatgactctcgtgaactagccacattttccccattttctcttctttcttcttacactgcatcctgtattccttaatctttgacatcaagtgatccttttcaagcatccaggacttctcctta

SEQ ID NO: 40255 - DNA, 2161 bp, Bovine  19866881122909
  misc_feature (1)..(1): n is a, c, g, or t
nactggattaggtcctcggcaccttagtgaggaataacaggaagattaattgcaggcacctgccagtctgctcatcccacataaaccaaccaaccctggatggttgctctgattccagaaactgcttggtcttcagcctctctgaagtgtgcccatctgtctggaagaaggcagtccaggccgtgtttttccccaagcagtagaaaaagccaggctgaacaaagcaagaagtttgtcctaagaaactggaagtttacttaagagatatttcaacaacctatgtctttggtaagtctcccctgaaacagactcctaggaggagacatgcatgcagggtgttgggattgtctttatttttgaagttttattttgatgtggactatttttaaagtcttcattgaatatcttacaatattgcttctgttttattttattttttagccatggggcatgtgggatcttagttccccaaccagggattgaacccatacaccctgagttggcaggtgaagtcccagccactggatcaccagggaagtcccagttatttttgttgttcttgttgttgtttgggaggtggagtgtcctctcaggaacgacatgtgaacggccgtaaggggaggaggtgagtttgcatgctgcagcaccagggcctctgctgagcccacggtggctggacaacagtgcagagttgtctccagtaaaacacggtgtggccttgcatccccagtgaccagccattgcatgctggccgccccagagaggggtagaaccttgtgcgaggcagctccctcaccctccctgacccttcggagggggctcagctgtgaaccaccagcagctaacacctcggcggctggaagcttcgctaacccaccacgaggtggtgagccacgttcaaagttcaaaatctagggaaagtgtcagactgtcatgattttagagagtagtcatgaaggaaaaatgaagagaagcccacttaggagcggagatttgggaagggccatcgtgtaattggcagctttccagagtgctgatgggctagagcctggcccaggtggcctgagtacaggccagcgaggtctggggtgtgatggggaaatttgcatgttccttgtcaattaaggaagtagaatcaatggactgcaatacctgggaacttaccccgtagcccggaatcagagtagtcactcaacagatgtctttttgaattgaatagtgattcactggtttggagtttctgtctgagggatccattggtgctctttttggaaagtgtgggggttttccccagagtgtgcatgcaccagtatgctcactttgatttaactatactgtataggggtctaaaagtcctattcataacacatgtcaagccctaggaagaaaaggtaagaagattagagtttgttagatcttgacaaaggaaaacaaaaaaccacaactgaacaaacaaccttatccatccaatggctccctctgaggttgaccctttacattccccaaaacaggcaccaaccaaatccagcggacacgcgtctcggcagttgtacagctatactggtgcatatggctgagtatctcttctgcacgtggaaggcttccagtaaatgattgttggattgaatttcattgctttggtagtcctggccttggcatctgatggctttctttcagaagtcaggttactttttcttgccaaaatatgaccatgaccatttttcctccttaaaatcatccagtgggagtcgttgagtaattttgaagaaattcagggcagtccattcttacctgcattgtccaatgtcactagccacacatttaaggttgctggataaaaaacaggacaccagttaatttgaatttctgataattaaagactaaatttgtagtgtaattgtgccccatgcaatatttgggttatccttacactacaaaattattggttgcctacctgaaattaataattaactctgcatcctatatttttatttgctttttcattccaatcccaaagaaaggtaatgccaaagaatgctcaaactactgcacagttgcactcatctcacatgctaggaaagtaatgctcaaaattctccaagccaggcttcaatagtatgtgaaccgtgaacttccagatggtcaagctggttttagaaaa

SEQ ID NO: 40256 - DNA, 1033 bp, Bovine  19866881165128
  misc_feature (1)..(1): n is a, c, g, or t
nattttccaaagttgcatttttcaagttctactgcatttcatggtcaggagccatacttgaggagagactgccagtgtggtgtcagacttctcttccccacactgctccccggggtggcaataccttgagagcagctcttagaagcggacgagtatgcgtgctctgcgcagaaggagggtgccgtccacatgtgcgtgaccacttcctcagacttgatggggatctcttcatcacagaagaggttgggctccaggctgctggaggacttcacactagctgtgtcctgaagaagcagccaagggggtgctgagaattaggaacatttaacttgtcccatgacaataatctaagcacagagttttaatacaacacagttagcggtggggtgggatccttaaatatctggtattaaatgggaaagaaaatttccactggggaaaaaacaatgatcaccacagtttcaagccaaaagtaaagctcaagagcaatccacagagataatagatctacaagaaagctatgatttgaagaataacctttctacagtctacaacacataaagactcctgtagccctgagttaagaaactctgaccatttaagaaaaaataaaatggacttaggaggggaataaaggttcagatgtggtaccttaaagacatggctcattcaatcctctctaaaggttttcaaatccagatgcttaccagttgctgcttttatttaccagctagctgcccttacttaaaaagcctgactgacagtgttttaggttataaatcctgacaacttcaagcaggtctcagatgactctcccctgaagttaggctccacaacccacatgtacagctttaacggtcatagtgcaatcaggaatacagaaacctcaggtattttaactaggagaatttaataaagtgaactggctaaatcgtacactgaaggctgaaaaagcaaacagaaacatcaaagtaacaccaaggtaactacaagaaagagctgccatctctagggcttaggtacagagaaaaga

SEQ ID NO: 40257 - DNA, 1259 bp, Bovine  19866881340999
  misc_feature (1)..(1): n is a, c, g, or t
ntgttcttgcctggagaatcccagggacagcggagcctggtgggctgccatctttggggtcgcacggggtcacacagagtcggacacgactgaagtgacagcagcagcagtagtttgacttatcctcatgcatcctccctgtttttatgtttatcaaggcctcggcacagtgtggcgagtttagaaagcatcgtgaatgaagctaagagcattccagcctttctgcccaatgtattgtccctgaaagaagccttacagaaggcccgagaatggacaactaaagtggaagctattcaggtaaagaacctcttgagttgtctaccattcagggaatgctatctcacacctgaatccttgaagcctttaattctgtactgaagtgattgtgtacttgaaattcacttgttcttttatctgatttttatttttaaacatgtattacctatttaaacattacttgtttctgttgacttcttgctgtgagagatgacagaattagccatttaattaatgcctagcagtagggagtttatttcctgctgtatttgactctcttgccatgtacatgagttacttttttaaaatggaagtatagttaatttacagtgttgtgcttattttaaggttacagcaaagtggttcagttttttatgtatatatatataatctttttcagattcttttctattataggttgctacaagatagagtatagttccctgtgctatacagtaggcccttgttaacctattttatatatatagtgtatactttaaaaaaaattatttattgtttgctgtcatgggtctttgttgctttgcggggggctttctctagttgcagcaagcgggggctactctttgttgctgtgcttgggcttctctttgcagtggcttcacttgttgcagagcaaggactctagggtgtgtgcactcagtagttgtagttgtggtgcacgggcatgtggaatcctcccagacaagggattgaacccatgtcccctgcattggcaggcagattcttaacccactacgctaccaggaaagtacaggagtgggtatatgttaatcccaaactcctaatttagcccccgccccactgtcctctaattacttttgaaacaagtagcaggaaaagaaaatgaaactgacatttactgaaccccacaatactcttgggactcatctggatgtttgggagtaggaatgcgagagaagggtgtaaagatacaaccccggacctcaaagggcgtattctag

SEQ ID NO: 40258 - DNA, 1442 bp, Bovine  19866881388100
  misc_feature (1)..(1): n is a, c, g, or t
nggtcaggcttcggtctttgttctgcgtgcttgcctgggcaccaagtccagggacccgaagactgcccggacgcaggttctcagtcctcctctgcacacaactagctagtctcattcacacaactgggaactttctcccttcagctgcagtttcctagaaatgtggccgccccgtgttatgattcagacagggctcagtccctaggggtgccagggcagggcggggctggcagcgctggaccttcgggtcacgccctgtctctgcctctctggttttcacagaaatccacacaattgaatgctcatccacaccccttgctgtgaacggttttcaacagggtgagggctgggagtggggaacagagatcttgctaaacccatgatcgctctgttgccacaacagtctctgtgaaccggattctggcagcagctccaggcaatcactggccagacagccagtgccctcccagtcccatgggcctccaggggctatggggctcaaggaacagaagctttggactctgtgaaagctgagctttctcctccccagaatctgacagttaggggacgcagcttgaagaggaggcgggggtggggtggggaaggagagcagagggtggacaagcttcagtttaatacagtgtccactggtgtccccagaccccaggagtccaggattgcctgtgctgtccccacaggcatttcacagtaatagcagcctacaggagaccatccttgtgagggacagaggaaaagagaggccgagggatggagagacagggcagaggggagccctgttgccgccttttccatcctccacaggagggacctgcagtatttttcctcctcctgtaaggagtcagcaccctcccccgccaccccaatgtgacctacttatctactccctttatagggagggaccctggacagcatcccagtccagggcagggctgtctgagtctcaaaaagacgagttctctaataagggaaatccagacgctgtaagtgggcttccctggtggctcagatggtaacgaatctgcctgcaatgtgggagacgtgggttcgatccctgggtcgggaagatcccctggagaagggaatggcagtccactccagtattcttacctgggaaacaccgtggatagaggagcctggagggctacagtgcatggggtcacaaaagagttggacacgactgagcaatgaatactagacctgtaaggtggtagggaggttggacaaggctggtaagaaggaggatggaggctggtggctcccaaggacagtgctcatctgtggctgctggccatcaggcccgagtcacagcctgactaaggggaagagatatggggcccgaaggagtggccggggcaatcgagggagtgcacagactcaagggaaatcgcacagaacagccagctcctgcaggttctccaaca

SEQ ID NO: 40259 - DNA, 818 bp, Bovine  19866881741937
  misc_feature (1)..(1): n is a, c, g, or t
ntttccttagctatgaatgaaattgaataatgaacaatcctacttgacctagtcatggtaaacttcttactaattagaaagtagcaagagcaaaacagagcttaggactttgtcttggacttgaactctatttcagaaaactcagcttacatttattaagtgtttatgatttacttgttccttggccaggtagatatagtgtggaaatgcaggtgattcagagatgagttggaaatgattctacctttaacatgctcattattactgctgtctaatcttgggtaacttttaatttctctggtcctaaattcttttttacctcctatgtaaaaaatgctaagattcacttagtgacctcagacaagtgaggtaatatatgtgaaagcccttgatactccttaggaaaagagtgtgatataattgaaaagtaaaagcagctttatatctggaataaagtgatggtacaaatttttataagctacagtggacaatcagttctattttatgtagcttccttgtgataattaaaaactgcaaatcctctggttttattttttttcttactcttgctttaaggctgagaaatgtttacatatctgagaattaagaaagaattgtatattgttggtggacaagataaatgctgaacataagctcaactttttttttttcttaatatataagctcaaaaaaaagcataagctcaacatgtattttcttgggaaagattgtttctttgaaagagtggggaaatagtgcttgattcagagatagtactgtgctctggcgctctgattcctgtgattcccctctgcttc

SEQ ID NO: 40260 - DNA, 703 bp, Bovine  19866881820048
  misc_feature (1)..(1): n is a, c, g, or t
nggctggcggagggtcaagggaagaaagggctgcccagtgtgaaaggaggtgccaagcggggatgggaggtggagcagggcagagcctggagaagggcttttaggaccttcagcccccgagggacaccctccgggctccctggcagctgtgaaactagcagggagcacacacagctgccagcagatgtgtggaaatatcccccaccgcagacgccggagatggagcagagatgcccatacagagcacaggggcagccctcgtcgtcgggggtttcttacctgggggtcccacagacgcgtgaggtttgggtacaggtagaactgaattccttgcgctgccccgggcagcgtcaccccctcgaatcaataggaccaccagcatgaggtaagggaaggtggccgtgaagtacaccacctgggccaaggcgatggaaagacacggaagccgtgaggggctggaggagctgcgaccccacgagagaggtcacggagcccgcctgctccccctcccgctcacccctcatcccgcagctgttcagtcctgtctgccctctgcctccagccacaacctcctgcctccctccctgcagctccccctacacaatccccggcaaatatttgttgagtgactgaatgaacttaggcatgcccctgacagggggcttagaactgggccagggtcgtcgggaacgacagttctgtc

SEQ ID NO: 40261 - DNA, 2509 bp, Bovine  19866880368290
  misc_feature (1)..(1): n is a, c, g, or t
natgaggtaccatctcacacaggtcagaataaagaaagtgaaagtgaagtcgctcagtcatgtccaactctttgcgaccccatggactgtagcctaccaggcgcctctgtccacgggattttccaggtaatagtactggagtggattgccatttccttctccaggggatcttcccaaaccagggattgaacctggatctcctgcattgtaggcagacactttactatctgaaccaccaggtcagaatggctgccattaaaaagtatacaaacaataaatgctagagtgtgtgtatcgaaaagggaatcctcttacactcttcagtacagttcagttcagttcagtcactcagtcgtctctgactctttgtgaccccatgaatagcagcacaccaggcctccctgtccatcaccaactcccggagttcactcagactcacttccatcgagtcagtgatgccatccagccatctcatcctctgtcgtccccttctcctcctgcccccaatccctcccagcatcagagtcttttctaatgagtcaactcttcgcatgaggtggccaaagtgctggagtttcagctttactgttagtgggaatttaaactagtacagccactatggagaacattgtggagattccttaaaaaactagaaatacagatgccatatgacccagcaatcccactgctgggcatacacattgaggaatcagaattgaaagaaacacgtgtgtcccaatgaacagttcatctcagcactgtttacaatagctaggacatggaagcaaccaaaatgcccgttggcagacacatggataaggaagttgtagtacctatacacaatggaatattactcagctctaaagaactcctttgagtcagttctaatgaggtggatgaaactggagcctattaatacagagtgaaataagccagaaagagaaaccaatactgtatatcaatgcatatgtatgaaatttagaaagacggtaatgatgactccatatacaaaacagcaaaagagacatagatgtaaagaacagacttttggactatatgggagaaggcaagagcggcacaatatgaaaaatagcattgaaacatgtatattaccatatgtaaaattgatggtcagtgtaaatttgatgcatgaatcagggcactcaaagcgggtgctctgggaaaaccatagggatggggtggggagggaggtaggagaagggttcaggatggtgggacacatgtacacccatggctgattcatgttgatgtgtggcgaaaactaccccaattttgtaaagtaattagcctcaattactttacaaattatttaatttaaaaattaaataaattaatttttttaaaaacctccatgaaaaatacacaatatactgagtaaccagcagtttttccaatttcacattgctacgaaatattttgttttgtattattgcaaatataactttgtggtagtgaatattgtattctaaatctgaaagacatggtataaagcaatttttaatttattttattcagtgtataaatttttgttgtacagcaaggtaaatcagttgcacacacacacacacacacacacacacacatatatatatatatgtaaacattcttttccattattgtttattaacatgatgttgactatagtggaactttgttgattattaagtctatatataatagtttgcatccactaatcccaaattcccaatccatccttcccccattcctctcccaccttggcaaccataaatctgttttctctgtctgtgattatgtttctgttttgtaattaaattcatttgcataatattttaagttccacatataaatgatatcatatggtatttgtctttctttttctgacttaattcagttaatacaataatttctagatcaacccatattgttgcaaatggcatcattaattctataaagtaattttgggaatgatgttgcacaatgtaaggacaatagcaaaagtacaataattaagaacatgtacacacatcattaaaattccatatattagtttaacatgtaatcagaaaacttttactttcagaaatctgtagatgtcaggaaactaaatataaacttaacaaaatcaaacttttgttgcatatacacacagtcattgagcaggttcacgtttctgctttgtgttagctggtgataattctacagggtctttcttttcccaggctggtttcctccagagagaactggcagctgctgcagctgttcctgctgaatgggaatgttattatattcagggtaacagatgttacacctggaggttcatcttttactttcaggaaaatttaactccagaacagaatgtcttatgaaacatcaataatatcctgaaatgaatgttcaacctcaaatttaaactatttcattaaaaaatactttaatttcacaaagttattgtgattaattgaagttggctgtcatttctaaagctttacaatatcactatcagaaa

SEQ ID NO: 40262 - DNA, 1817 bp, Bovine  19866880478059
  misc_feature (1)..(1): n is a, c, g, or t
nattaatagactttattttttagaacaatttaacttcactggaaaattgagcagaagtgacttcttgcttctgattctacatgtaaggagcttggaattttccactttatcctaacaactggtaaaaatctaaacagactgaaaaactgacagctctcctaggatccataagggaggtaaagacacagggtaaaccactgccccaaagactggagagacaatttaggcaaaaacatggcgtcatgacggcttagagcagagcctcacaagaggaaactgctgtgagaactagtgctgggtaggaaaatctgaactataattgactcaatgatggaagctcagtggaaaactctgagttaaaacctcagggagaacccagtcatcgggggccccctatttttgtgagttttatctcaaggagctcgaccaggttctcacagcaaacactggagaaaaacctttttgtacttccaggaaagggatgaaaaaggaaccattttgatatatccagggcactctattctccttaacaaggcctgctctcaagagaaactagttaacaaagcctaaactgctggggtgttatcaaagcctcactcactttgggaaagggaaatatccaacttccagccaactttccccatcctctcccacttaaggacagagattactaagaaatacttgtgaatttcacagtccagaggtgtaggctcactaaaagactgagacctaggcatagaactgtagaatgtttcttcccgccaaacctcaccaccatattactaaagacctatgtacatctttaggtcataaaagttccttttacttagtacatcatgtctagttatcaagaaaaaaaaaattacaaggcctaccaaaaggcaaaacacagaatctgaagaggcaaagcaaacatcagaactagacagggcaaaaaatgctggaattatttgtttcattaaaaaaactatgaaaaaatatgctaagagtcctaatggataaagtagaaaacctgcaagaacacatgggcagtgtcagcagaacaatggaaatcctaagggagaactgaaaaaagaatgctagagataaaactgcaacagaaacgaaaaacgcctttgatgagcttgttattattagactggacatggctgaagaaagaattgctgagctggaggatttctcaatagaagcctccaaaattaaaaccaaatagacataaaagagaataccaaggactatggaacaattacaaaaggagttcagttaagttgctcagtcgtgtctgactctttgtgccctgtggactgcagcatgccaggcttccctgtccatcaccaacttctggagcttactcaaactcctgtccatccagttgatgatgccatccaacaatcccatcctctgtcattcccttctcctccctccatgaatctttcccagcatcagggtcttttccaatgagtcagttcttcgcatcaggtggccaaagtattggagtttcagcttcagtatcagtccttccaatgtatatgcaagactgatttcctttaggatggactggttggatctcctcacagtccaaaggactctcaaaagtcttctccaacaccacaattcaaaagcatcagttctttggtgctcaactttctttatagtccaactcttacatgcatacatgactactagaaaaaccatagctttgaccagatggacctttgatggcaaagtaatgtctctggtttttaatatgctgtctaggtggtcataacttttcctgaaggagcaagtgccttttaatttcaggctgcagtcaccat

SEQ ID NO: 40263 - DNA, 3503 bp, Bovine  19866880689087
  misc_feature (1)..(1): n is a, c, g, or t
naggtagacacaatggctggtattccgtctctttaagaatttttcacagtttgttgtgatatacacagtcaaaggctttggcatagtcattaaagcagaaatagatgtttactggatctcttgctttgtcaatgatccaactgatgttggcaatttgatctttggttcctctgccttttctaaacccagcttgaatatctggaagttcacaattcacatactgttgaagcctggcttggagaattttgagcattactttgctagtgtgtgagatgagtgcagctgttcagcagtttgaacattctatggtattgaatttccttgggattggatgaaaactgactttttccaatcctgtggccactgctgagttttccaaatatgctggtatattgagtgcaacactttaacagcatcatcttttaggatttgaaatagctcatttggaattccatcaccattagccattaaggattcattggttaattgagaatgaatgggaaagaaaataagagagaaaagtggatggaaggaaggaaggaggaacagggagcaaaggaaagggaacaaaaagagaaaatgaagaaaagaaagtctccattgatatttgaaaacaacttggattgtctccacattgaaagaacaagcatctcattaatgcctgcaaaacacatgctccagataacctctttctcttccttggagtaaatcctgcacattgactacttctagttccttgatccacatgaggtgttttatctgttttaattttgtttatttgctgctataaaaataattataaatttcatggttaaaattacacaaattcattattttatagttctatatatgagaattctgaaatgtgccttattggggttaaaatcatggtgtctgcaagactgcattctttgtcttctccagcttctaaatgccactgcatttttttagtccatgaccccactcctcctccttcaaaacaaggattagcaagtcaaagccttttcacactgtagtattgcgatcccctcttttgcctcctttttccatttttaaggatgcctgtgatggctttaggcatactgcacaattcaggataatcttcctgtcaaaaagccagctgattaacaactttaattccacctgcaattgtaatgtcctgttttcaggtaatatagcacattggcatctttggggaaggggcttatcgcacttactttctgtgacatattgtattttagtaacactacccatcaagcttcaacctagaagttctattagttcaaaagacattttgtttctcaaattgtggcttaatttgttaaattttgatatatccctgttttctcaactgtaagaattcacagaaagaagcccccaaatagctaatactgtaacagtaatcataaagatcaatctctcattaaaaattatcatttaatctttcatttttataatgcataaataatcatgttcataatattaattcctactacaaaaggatttaaattgttttcaaggctagctgcatattcctttcttcatgagttcacatatttccaaatatgttcctcacatttagactcagtagtaaatgtatcttgtatccaaagaagtaagaggaaaaaattccacaaacagccctactatttggtgcaggataagcttagtatatactgacagtaaaagatggaatcaggaatgctttcattatgtgtttcctgaatagcttttcattaccatatggcaggttctgaatgtagcagtgggataacatcataaatggtcattgtaaaaagaacttaatgttctcttgacccaaattaaacctttgttggtttgaaatgaggaacactttttaaagtttcaaaaacaagtatggccataatgtacctaacacatattttataggggtgctgagcttgaaaagctggattattccaaatgaattctcatttgaaaagatgaagtaaatgattcaaactaaaaagatttcacactgtgaaggaaactatcaaggaaacaaaaaggcaacatactgtatgagtgaaaatatttgcaaatgatatattctataatgaacttccccctgtgactcagccataaagactctacctgaaatccaggagatgcaggagatatgaattttgtccctgggtcagaaagatcccctggaggatagcatggaaacccaacccagtattcttgactgaagaatctcatggaaagaggagcccagtgggctacagttcatagggtcacaaagagccggacatggataaagtgaatgaccatgagtgcatgcatattctataaggggttgatattcaaaatatatttttaaaaatgtatataactcgacaattcaaaaatgcaatccaaaatacaacctaatttaaaaatgggcaagaggacatgaataaccattttcccaaagaagacaatcagatagtaagttcatttcagtggtcgttcagtcgtgtctgactcgttgccactccatggactgcagcacgacaggcctccctgtccattgccaaatcccgcagtttactcaaactcacatccattgaggtagttatgccgtccaatcatctcattttctgttgtctccttctcctctggccttcaatctttctcagcttcagggtcttttcaagtgagtcagttctttgcatcaagtggccaaagtattggaggttcagcttcagcatgtctttccaatgaatattcagaactaatttcctttaggatggactggttttatctccttgctgtccaagggaatctcaagagtcttctccaacaccacagttcaaaagcatcaattcttcggcactcagctttctttatagtccaactctaacaccaatacatgactactggaaaaactgtagccttgactagatggacttttgtcggcaaagtaatgtctctgctttttaatgtgctgtctagtttggtcataacttttcttccaaggagtaagggtcttttaatttcatggctgcagtcatcatctgcagccccccccaaaaatcatctgcagttattttggagctgcaaaaaataaagtctgtcattgtttcctcatctatttcccatgaagcaatgggaccagattccatgatcttatttttctgaatgttgagctttaagccaactttttcagtctcccctttcactttcatcaagaggcttttcagttcctctttgatttcagccataagggtggtgtcgtctacatatctgaagttgttgatatttctcctggaaatcttgattccagcttgtgcttcctccagctcagtgtttctcatgttgtactctgaatatatgttaaataatgcagggtgacaacatacagccttgaactactcctttcccaatttggaatctgtctgttgtttcatgtccagttctaactgatttgtccatttcttatcagatggtaaacaggaatgcaaaatgatgttcaacatcacaatcattagagaaagcat

SEQ ID NO: 40264 - DNA, 1427 bp, Bovine  19866880790438
  misc_feature (1)..(1): n is a, c, g, or t
ntttagtatttaaagtgtatgggtggcaatttaaccagcaacagagtaattttacattagaattcatctttaaaaatttcagtactaattgactaaaatctaaaaactgccaagggatggctcaagacttgtgaaatttcagagagatagagttcaacagatgtattaactatctgttcttctcatgtctgtaagttccatcccagtactaagatatgtcaccagaaatcaagtaactagacatattttctgaattaatacttttattatttaacagcattcccttaatattcataatgataattgtgtactagttatagaagattcaatatgtacttggcacaggtgaaaattttttacatgaattaatttaatcctcacaaaacactttgctattgtagcagtattttttgcatattttacatgtaaagtgaaaaaaaataatgctgaagacattgtctatagtgttgaccattacaataaaaaatataaatcttcagtatcattaaattctatgggatatatttttccccttagtttagtttgtatgtgcatagtgcatttattttggaatataaatgtgtaacagatacctttaaattttaagtatatattttcacaagtttagaattaaattctgagttcaataagcacagcttaggtacctaatagtacctattttctctgctcacatgattgttacatatcccaaatgcccatatttttcatcaagttcaatcttattttgttttcttacattctgtttgaaatatatggcatgtacattcttaataaataaggtaaaattaatattagcttgataatagtctcaacagcaggaactatgcctttgataattaatgatattgtgacatagttttgcttccacccacagaaatgtatctttaagagcaatttcaggcatatagaaaagaaacaaaattgtttcacatacctagacattggtttattacataaatgtatatccttatgaatactaatgaatatttcaaatcacttgtacaaatccattaatcctcattgttttattttctaagcataaaaatagctaacctgcacacatcagagcaactctcttcaatataaatgtatatgatcacatgaatatacatctttgccctttagggaataggtttgctgaaatagtggataaatccatagtagaaaactaccatagctatttataaagaagggtggggactcacatactttttagaatatattttgattgtgagaagaaaaaaaaaggacaagttcttccttagttttaccacctaggaaaacaccattatcgtattgattaaccctggcccattatgtcaatattatgtagcctagattcctggggactccatgactactgacagatgtttcccggctctttaatttggctggtgggtggtaaa

SEQ ID NO: 40265 - DNA, 1883 bp, Bovine  19866880841243
  misc_feature (1)..(1): n is a, c, g, or t
ncttttgagttgtggtgttggagacgactcttgagagtcctttggactgcaaggagatcaaaccaatctattctaaaggaaatcagccctgaatatgcattggaaaaactgatcctgaagctgaagctccaacactttggccacctgatgagagcaatgtcactcattggaaaagagcttggtgctggaaaagactgaaggaaggaagagaaggggatgacagaaattagatgattggatatcatcaccaaatcaatggacatgagtttgagcaagctccgtgtgttggtagtagaagggaaacctgacatgctgcagtccatcaggtctcaaagagtcggacatgagtgagtgattgaactgatgctaattaattcttttatttatttattagttttctggttttttgttttattttattttatttttaaactttacaatattgtaaaatgtcagtgtttaagtcagtaaatttttaaaattgattttaaattattctcgaattaactatacaaatcactcaaaacagatgaattgtccccattcagaggatagtgttgattttgaaagccatctcagaaaatgacaaaaaagattcaaaatagcactctacatacataagcaactgacccctacaaagcagttagatatgaaggtagtcatctcctatgacagatgcatctggacaggagctctcctgggaaggtcagcagcctcctcttggtgtagcagctgatttcagggcccatgagagtggaactctacagcacaggaggaatggaatacatagatgatgatgtgttagaacccaaatcctggtggagggagagaggataggtctctccaatgagtgagcaggtctgtttcagattacagagggtaacattaggatatttctaaaattgaacgtagaatatacaataaaagaaggagttagcaatgttgatgtgagttttagtaacatttaggattggcaaaatagcagaaaggctatagcctggaaagggaaaacaataaacattggttaaaaggaaggaaatcactttctggcttaatgaaatgtcaataaatttacaaatatgtaattttaaaacatagcatatccaactatgggttataaggaaataaggatgtggcaaattctaaagtaactttagaaagtctctgctttgagttagttagggattattttgttagtaatggaataaaaaagagtgttgacagtataaataactgtgacatttatttaaaaaaaaaaatgtttcttgaacaggcagaagtatcagagattcctctataaattttgtatatttgaaaaatatcacattcaataaaaagtttctgtaagtacactttcacaaacaaattctgtgaaatactggtcttgttctacagtaatgtgtataaactccaagtaaaacctgattaccagttgagtatctttgtttatgataatataactatgtgcaactttgattagcaaagaagaaaagtcaagttcttaacttctggaatgagttttcttcaccaggtaaaatgctttaaatgaaaacaataaaatatgtattaatatgctatgaaaattagaatataaaatgtatattatagtagtaaaaacttctagctttctattttttatgtcacatggaacgattacgtatttttatgtgcaaacgactagtcattcttcctgcccctaccccaaaccatatgccttttttgttttttcttttacttataattatacttctggccttgataagaacattcaaacattaatgaactcaaagtaacactgaatgctatgggatgcccaaataaaaaatatcttaattttcttgtttaggtctcagcaacttccgagtcagaaattggcacactat

SEQ ID NO: 40266 - DNA, 829 bp, Bovine  19866881327445
  misc_feature (1)..(1): n is a, c, g, or t
ntatatgaagttctgagaaacaaagactaatgagtactgatgaggaggaaatgatcaacaaaatgcaattctgctgatagatcacatgaaatgaagacataatattgacctttggatttagcaacattaagggcattggtgacattttcttaatgttatggagagatgaatgtgaactaagcagagaatgagagaagaattgaagacaatataaatagcaattcttgagggattttactctaaaggagaatagtgaaatgaggctgtatctcctagggggacatttatctttctatctgttaaaatatttagcttgtgtgtgtgtgtatgaaaatacagctattaatataataaataaagggcaatcagccagagaagagactttataagagtcaaaaatgggaatgccaaagacttctcttctaatgtgagacattttaatatggttttggaataactaggttacagtctaaacaagcctgtgtaatggagagtattagataaggctgcactctgtaaagttgtgtgtttggggaacctgcatgctaatgactccgagaaaattcacttgaaaaacaccagctggccaatcaaacacatccctacagggtggcactattttggtgaattcattacagcctaactgtcaaaactggattcatgctagtgaagcttaccaggaatccaagtttatttatttaaattaggcacatcctcttttgactaattctagagaaaggaacatcttttgtctttcagtttcttcctttttattagttatctcccttctctttggatatttggcaagctcctggaaaagacttcaatg

SEQ ID NO: 40267 - DNA, 1865 bp, Bovine  19866880402229
  misc_feature (1)..(1): n is a, c, g, or t
natatgagcagcagtatgacttatctggggcaaacccagattctgttaaccattgagccttggtgatcttttatttatacataaaaaccttttaacaatgaaataattcaccttgattttttttttcttttttttaatactagttcggtagaaaaacaaaagaactggcatggtgcacagtggtgaagagtgtttgcatggatgcagaactgaagtatgtatgaaaaagtctgttcctcggtgagaattagcaggaagcatgtgttgaaagtttctcacctaaacaggtcataattacagactttaggatttatttcttttaattagaacatgaagctcacttagtggtccttctgaaaactttccttctaactgcacattttatatcgaatagtaagttaaatttctcaggtagaaagaagagttttttgttgtaactgtaattgtagctcgtgctgaatacatcaatgctgctgttcctaagtagttgactagtcagcttttaagttttcttcctttgttttctaagaatagtcttaagacagtgttatgtttttagaaaaatgtacttgtttggaatgtctcggatctaccatgaccatcagtgggaatagaggtgagaaattacagctttaactgaacgtcatctagagttctgtaatattccattgcacgacacaccccatgtgtttcacagtttctaagaaattcaacgttgtgtgcagttttatcaacctccctgcatccctggagcacaaggaattatttttgttattgaggggacaaaacaggggtgaagtgactcacagttaattgccggattaaatcgggcatctaagcctctctgctttgggtagattctcagactcagctgctatcgtcaaaaggaagaaatacattgccgcatccgaaaagaacatggtgtgcagtatgtgatgggtcttgttaactatcccttgttttctaatcaaaatagcctccgggctggaggaaaattttgaactcctgtagtaaattagcacatctcttattatgtttcgtcattatttatagcattgtgaatgaattaacagtggcaagttgtggtaagttgacgaattctaatttttttttcttttaattttaagatggttgagttttacataggctaagttttgatctctgtgggcttgtaaagatgcatcggagaatgcgttcattactgacgttacaggagcacccaagcaaccatcacactgttcagcgtcctttttcattgttcttgctttcacggagccctgtgcggcggccgagcatctcagggctttgaataatgccctttgccaaccgttagtcctaattgctgtaactaatttgctgtgtgacctaaagacagtaacatccttaactttggttttctcatctgtaaaatagaattaatgacactctacaggccggggatttcagggaggcatcatcatcacaatactgattagagtattaaaaaccaaatatttggtgaaagccggatatactcatagatgccagtcaaaaccatgaaaaacacatttgccacagacagatacaaaatatttcatagacttaagtgatatgtttagacctgaaggaaatgaaaggaattgaagttgttgagctacaggaaataaagatctggggccgatttaaacagttgaaaatgatttgaagaagtgttttgtctccatagtaatgaattcttttttagcttcttttgaggctatccaaagaagaagtgagattcaattacagcagaattacataagttagacagcaacggtagtgataccaattctttgtaagacccaaacttgagtacctcagtttcaacgaaaaggtcaatgaatttg

SEQ ID NO: 40268 - DNA, 1978 bp, Bovine  19866880452615
  misc_feature (1)..(1): n is a, c, g, or t
nctcaccctgcacttgtcctccagctgtctgtctccacactcttcttctctcatcaacccttgccatcttctctccaccctgaggcactctagggtgtgaacaaagggcctttctcttttccagaaagtacaactactgcttcaagtgtacgataaaatttacacatggtttgagaatagtataagatgatttcaatgccaagatggaaaattcagacgataagccaaataccctacccctgtaaaccatgaactaagcctcttcatagggaccagctgctggctgctccctcatgagaccccaggctacagcactggccaggggccagacccaactccctcgactcgggagtcacttaccttaggccaagtttttctcaacttgtcttaatgtcccaaactagccttctacattattatgcatagaagccttgctcttcattctctgggatgtcttggttataaaatggaatttggccttttcttttggataactaaattcccccttgaaatgctgttctcaggcaaagaggccaacttcctctaaaagtacgttcttgagcaataggtataaattgcaggtggctttcagatggaattttatatgtccttttcctttttagacattgctactcatggattatctcactgtagaaaacaaataagcccatatcttcgacttactgatttgcttattgtctgtcttcccttaacaatagcttccataagggtgtgattttggggggtgtgtgtcactggcgtacctacatcagtgcctaatgagcactcagtatatatttgttgagggaataaatcttatgtagccctcagcttaagcctacaagataggtattattaatttcattttccagaagaggaaaagagcctgacagaacataggaagtcaatccaggatcccatagataggaagttgtagaatgcttttgatgagcatcagagccaatattatttctgctacgtttacttattatcattttgttccccagtagcatttggcagctttaacctgtttcatttttaaggattttgtctgaatttatccagacatttaaaggagaatagttcctaggacaatgacaatggtagtgattgagacccaagggaaaggggaaatgcaacagaatggagtcaggaccccgtaatccaaggatctcattcatcttgaaattcctccttactaggctcaattctcacctttgctaaaagcaaaacaaacacgctagcacctggtaaactttggttgatttttcagcatggattcgttccacatttgaacatccattgttctctgtccttgatgcaaagtctagtcttcaagagcttattgccttttggtgccacagaacagagcaaatttgggtgatggacagtggaacaaatctacaaatttgaaaccttggggtacattgtgccaagcctatacacccacaggccaccatgaattaaacagagaagtagaataaagagtaaagaagaaaagaaaggcttggagaaagttctctgcagtctccaaaccattttttttgtgtctttttagctgcactactagcatgatacctcctcacagtaggtatgtagtcagtatctgatggttgactaactggatgaactctcctcatatggaccagtgtccttgcttttcaacctgattcaccctgtgtaagatcactcttaaggatttctgcgaccttctgcaggactgtagagttggcagcattatggtttcacatctaaagatgtcaagtctcctgacttcctgtctgaggttcactggagtagttgtagagaagagctaaaatacacaaaaattggagaggctgcctaacataaaagtcctttctgtacacatgtctatgtcagcctactttctttgggaaacatttcatatgcttggtctctagacaagtgactgagtagtcatctttgttagatgcctccatcttcatggccctttagg

SEQ ID NO: 40269 - DNA, 1309 bp, Bovine  19866880454763
  misc_feature (1)..(1): n is a, c, g, or t
nggaataggctccggtatggcacagcagcatcagagacccagtctgctgctgctgctaagttgcttcagtcgtgtccgactctgtgggaccccatagacggcagcccaccaggctcccccgtccctaggattctccaggcaagaacactggagtgggttgccatttccttcttcaaagcttgaaagtgagaagtgaaagggaagtcgctcagtcgtgcctgactcttcacgaccccatggactgcagcctaccaggctcctccatccatgggattttccaggcaagagtgctggagtggggtgccattgccttctccagagtcccagcctaggagggcctttctaagcaggtgctgggagccaggctgcagaccacccaaagctccaggcctagcagatgacttctgggagacttagacagcctatttgagaccaccaccagctgggaacctctgctgctggatatgcatgctgtttctatttactggatgtcttcttggtttaaaaaaaaaagttattttcttgtttcaggtcaggacagttgagattactgcatttgccctcagcagtcccataaggaggagaagtgaatgtcctttgcctggaggataggggatgagatgttgctagatccttggcaatttagggtgtcaggggaacaggcctatagtctgaaatcttcaggggagataaatttttgtgtggaggtcagaaaagaggcatgagatagtttttttgtttttttttttttgtttttttttttaccaaaaaagatcaatatgactgtgacacagagaatgtaatttgggggatttgccaaaactcagttctcagttatcaccaacgtactgagtgaccaatttgccgattttcagttcgtcaaaagttcaattaactttctccaaatattacagctaaccatttcccataaatggttgtgacagccttaaaggatgtgtctcaccatttagtttgttttggttgaggcaacttgaaattcaccagcaatgctcatcccccaaatcataaatccaaagaagctaaagtacagaagctttggctggtccctggaaatgaagtaaaattacttcagtgagattagactaactggaaactaatagaaaatggtgtttatataggattctaaattgttttaacttttttcctcatctcctcctatgtgttaccaatggaatttatcattcttttcagtaaccccctcatctgaatccccttataatgggcttgttcccttaagaggctgaaatgctaaaaacaccagttactaaattcccttgctgccctgcca

SEQ ID NO: 40270 - DNA, 1576 bp, Bovine  19866880479571
  misc_feature (1)..(1): n is a, c, g, or t
ntgacaaggacaccagggctgcatttccttgttgtctcctaacacttgtagaatgagtcattgggtgccgtgcggttatcctcacacactgctcatctctgtgatggtgctcatgttgaggtcagtgttactgctggaagctcatcatcagtcatctcccccatctgctcaccgactctaacaccactgactttgatgttctgtcctcagccctgggcctttgcaattgtactttcccacccttgtccttgaggggctaattcccttaggttcagtgtctgcttgaacatcacaaccctaaaaagactttccctgaccatcttatcaacctcttcctccaatccattcccctccatctccacacattctattaccctaaccctgtctaatttcccttaggcacttttaattatcttaaaaccatatgaatgcttatttagtcattttgatacatctgtctctgtctgcaactaaaatgtaggatcagtagaaacatgatttttttctctcttctttactgatttctggtgccaagacagtgcttgatacatggtggagggggcagacaacaaatattggttaactgaacgaatgagtgggtgatgagaagaaaatgtatagttaactggcttgttctccaccattccatcaggcagagagagagatgtgactgaaaccaggtctttggatttcaaattccatgctatttcctgtacacaaggttgcctctattacaacacttacatttggcttcaatgttgattaaagggggaaataaactaatctacacaggaatcctaaggccattgtcaccactcttatgatttggaaacactctgatgaattattatcaggtgttttatttttaaccctcctaaagctaaacgcagtactttccctaagagaatgagttcgtagaagagtgggagcaaagaagcctcaatgagtttgagatgtttccaattaactccccaaaatgactgatacaaaaggacgcccagaggttgcatattgatttcaagtaaacaaattacaatgctaattacactatgctgttcaaatggtcaccttacaaagagtgatagaaactttcctgaatccctatgtcctctgacggaaaaatctctccctttgagatctgtggtacttgctttataccatttgtaagatccccaccataagatctacacatataaaagattacacatattctaaaaactttattatgtacttaaatacatattaagcatttatataaatgcttaccaagtatttttcagatatagaagtgatatattgtcatcaaataaaatttgcaaaataaaactcctaaatgagaaaattgtccatattttacagatgaactgtggaatcattgagccaagttcaatgcagaaaaattctgctcaaattgtatttgatatttcttttcatgtttataattcatgaagcttacaaattgtgaataactgtcatttttataacattcagttttcaattatataagcatgatacatatttctatttgattatttttaaaattatttatgtattgtttatgtctctgctgggtctt

SEQ ID NO: 40271 - DNA, 1361 bp, Bovine  19866880483961
  misc_feature (1)..(1): n is a, c, g, or t
nccccggggctcccagcaacgccgcccagcccactcagcgactagaaagcgcccattgagggcttgcagctgccagggccgcttgcccaaatactacataaagcctcaacttcagctccagtgaagaagtcactactgtgttcttcctgagccccagtcacggctatcaaacattcaaagcaaactggcgatggttaaacactgcatgtgtttacaccccgaatcttgaatcacaatggggaggcttgagctgccaaggcccggctttatcctggacactgaagtctgttctctgacccaccggacaggagtagcattgagtaaataccagatcgctttgcttttcatcgatgtttgctctcagggacttcagtggggttcgtctccaggcggggttgaagggcacatacttgcagagtcaagatgctgtctcacgtgagtgggcgttcagaagctttaaggctttggaagccatctctaaagagaaaacacaaacagtataaaataaaatatatccaagcagatgaaaggataactgggatcctttaaaaaaataaaaataaaaaactgctatgaaaaaaaggaggaaaaagaaggatggcagtgtggttagtggggtgagctgagggctggatgtttagcgcctcataacactgttctctacccttgagaatttaacactattcattttaaaaaatactataattagaaagaccctttgcctcgcccctttatctaggataaaatacaaaacctagattttcttttaaatgtcccagtctgttctgtgtttttaactctttcaggttttttatcctttacattgcatgtcaggattttgtttttttctgacaatagaaaagtacatcattattgtgataaattgagaaatccaggaaagaaacataaagaagaaagtgtaagtactgtatctttgaattagagtttgtatttttgtacacttccttgccacctgtttacacagagagagaaagaaagaaagaggaaaaagtaattttaaacatacttaaatagaatccaattttgtttagctttatactatgtgttgttttccttttttttaacttctcatgaccattccccataccactagatattcctaaaagaatgactcataatggctttggaatattttcaccctatgtttttcaatgccagaaaaagttcaaaacagagttttacttgtataccataccatatttttaaaaaatggaacaagctttttatagctggagagtataaggaaatttattttgcactagatatataccactttctccagaataatttaagaatcgcagctggattcagcatagtatttgggcaagtacaaatatagt

SEQ ID NO: 40272 - DNA, 704 bp, Bovine  19866880710236
  misc_feature (1)..(1): n is a, c, g, or t
ntcttatttaccagtgtaaaaaatcagagactgtaggggccaagactcagctggtctttgtgaaggagtttatagttttcagctgaaatctctaagtgcgaactctcattctcagctgctggctccctaagagctccctgtggcctctgaccccatttccatggagacagaggtgggaagggtaaaaataagttaaagagaaaactttttttttcttgaaggcagtattttcaaatccccactcctccaatcctaatgagtgttcaagttaaaactggccacacatcagtaactgaaattttatttattcttcagggttaaatggctgaaaataaggtatttgcttgcaaaggtatgtttgcatgaaaaaaaaaaaaagaaaacacccattctgttgggtactgtttaagctgaaaattggagctcaaatgaaggtaaaatggttgctgccatttaaagacagaaagagaatcctactggtttccagagtctggtttggggctgagagctgtgactatgcacagatttctgcagtgggggtgggagtgtaggttggtgtttccccacatgtcagaaagctgggatattcatcaggagaattaaatataggatggtttgcctcatgtgtatcagttaatccattgttttgctataagcttttgttccgaccatctaactgaggctaataaaagtagataggatgc

SEQ ID NO: 40273 - DNA, 2513 bp, Bovine  19866880718724
  misc_feature (1)..(1): n is a, c, g, or t
nacttgagagatgaagtactttatgtgatgatcccaaacattgactttactagtgaagatttattagtctaggtttataatcaaagatagcgaagatgatctcagaagttttcatattcccatcccaatgtctgtcttttaattccatagccagataatatttaattgcatcaggtcctttcaagtagctgtgccagagaccagtgcttacctatttcagtatctatttgattcttccttttagtagagataccctaatttctacctatgtttgccagatttagcaaataaaaatatagactatcaagataaacttgactttcagaaaagaagtaaatgcaattttactgtaatatgtctcaaatatcatactcttatactaaaaaaagaaaaaaggtttatttggaaactggaaatctgatttaattggccactttgttttcatgtgtccttacaaactgcttgtgtttctccccagctaagattgcatttctgaggctcacattatgatgtgatcacgtgaccaagttctagccaatgaggtggaagctgcttgtgttgcgtgttcctagaaagtctccttaaaagaaacgtgcattatcttcccctctaccccaatctctgtactgatgtctgagaaggatatgatggaataagagcagtcttgggccatgaaaaacaagaccataccatagctctggtagagcaagcaggagcctccattccccagcaatatcatgctcctgaataccagcccggagctgcctttctgaagattttccttgagagagggagtgaggaactggcggagaaggggaaagaaagggaaagagaatgggagaaacttcttatataaatcactgttatttggggctttgtcttgtattcagttgaatccaatactaatataaaccttatacccctaaaaatttgtgggcacagcaaaacaaaactttgtgaaacagaacactgtgtagagcagagtattccaaagactctgtgaatgctcagtcacagagattttcattgtctatctcacaaacacagattcacttacttttctaaagcttctgattcctgtcttatctcctggatagtgctcagaagttaactcttgcaaatcaaggggaataaaaggccatgcctagtgaagcagagcataaaggtgaattgtggtcaacaacatcatctgaagaggttgcttgagcatttcaacggatttcattgataatttttgaacatgctgtcaggtggcaagaagaataattgattaagtggatttcatattatgttttgaaaatctttggctttgagaaatataaaaatgaattcctaataacaattataccttgtataaagaggaagaaaccaatatatcatttcttgaagttatcccagatcagaacacttatatataaaattctagttcaaatgagcaatgttgattttttattcagtgcttgagatttgccaatttcaacattcctctttgtgccatgaaaaatgttgccactggcagacactccacactacagagaaaggaaaaaatagtgttaaatggtagaactatgagagcaggagtctacattttaattaatgtatcactcagaatccttggttggggagcttagattccacaagccatgtggtgtggccaaagggaaaaaaagtatagtttaagtccagtgtttccaaattaattttttatctgtataatctatcagttgatatatgagtaataaacaatgattaaatagttttttaaaaatctatcaattattgacagcgggagtattgaagaccacttttattatacaattctctatttctcccttcagatctggtagtacttgcttgttatatttagattcttccatgttgaatacataaatatttacagattgttatattctattggtaaattaattcttaatcattacataatgatttttgtcttgtgttactgtgttgacttaatatctattttgttggatataggtataactacccctgctctctctttttttttttttttaactttacaataatgtattggttttgccatatatcaacatgaatccaccacaggtatacacatgctccccatcctgaaccctcctcccacttccctccccgtaccatccctctgggtcttcccagtgcaccagccccaagcatccagtatcgttcattgaacctggactggcgactcgtttcatacatgatattatacatgtttcaatgccattctcccaaatcatcccaccctctccctctcccacagagtccaaaagactgatctatacatcagtgtctcttttgctgtctcgtatacagggttattgttaccatctttggtttttcatatgcatataataactttttcaatcccttctccttgagcctatatgcatccttaaaacagaagtaactctcgcaggcagtatatagctggatcttgattattcacttaaccattaaatacctttgattgcagaatttaattcatttaa

SEQ ID NO: 40274 - DNA, 2168 bp, Bovine  19866880732670
  misc_feature (1)..(1): n is a, c, g, or t
nttttactggtccctgctcttgaggataggatccctctgctctaaaccactccaggattcaggtacccgataggtagactcccccccaatatcttagcgtctgctgaaatcactcaaattacccagtcctaagctcagctgcttagcctgcttgcccattccttcttgcaaccacccacaataaagttttgtgtccaatcttttcctcactcttctgcctcctaaccagacttggtgttccccaagtagctctgtgtatcgacatttgccctttcctcttgagaactgtgagtaacaaactcttatctttttggtggcagttgtctcctgagctgttggtctcaccatccttgcataacaacaaagtcccaggtacatttttaaacaacccaaagcaagggaaatctgtattcagaagtctccagattctggctccatcagcttggtcacttgtatctcatgcatagcctcagtttcctcccttataaaagtaaaatagcagttttatctcacagagccacggggaagatttatacacatgaaaagtccatcactgttaatgcttaactaatgtttgtccctgcatttgttcactcaccagagcattctttaccatccacctgtaacctataaatgctattcaattatcacttagtttgtgctagtcaattatgagtaaattctaatgtctttccacatgtctatagctgctgctgctgctgctaagtagcttcagtcgtgtccgactctgtgcgaccccatagacggcagcccaccaggctcccccgtccctgggattctccaggcaagaacactggagtgggttgccatttccatctccaatgcatgaaagtgaaaagtgaaagggaagtctctcagtcgtgtcccactcttagcgaccccatggaccacagcccaccaggctcctctgtccatgggattttccaggctatagctgctaagcaccatcataaaaatctcactcttttcactgtgtgtgatctcactgggtctccttcccttgggtgctttgcttgatttctgctgcagttgcttgaaagcaacgcaggtttggaaaaggccggtctccccatttctgctggactctatcaatcttatcaagcaattctgtctgcaaaaggagagtcaaaaacccttctgccaggcagctaaagaaatcacatttttggcagataattagtaaaataaacatctgaaagctgcagatcatttgtattgcactctaagcattgtggatgttttatcacctacactcttctcattagagaacaggggctgataaatgctaaagtagaaagagagttcctgaaatcagagagccaatgtcctcactggactgatatctccatgaggatcaatagaaagaaggaaaatgatcagagaaactgagtgtggcagagcttccccttggggccaagtttgagacagatggcaaacgaggcaaccttaagggagagagacagtcctgcatttttacttgtatcctgaggaacaagatcaaggagaacatggagaacttgccaagaattgtgcaaaaggagctggtcccaaccacagggaccagctgggagtccctgggagtcacactgggagatggtggccatgcggtgccaagacccgctcatggcctcagaagtcctgcccatgagtgaggatcctctgtctacatcatggccaattccactgcattcatgtagtggtcatttgaaatactgttttcaaagaattctaaactccgaacagctatatgaaaggggttgttattgatgacagaattattgtgcttccatttcctgcttgaagagtatgcacaaatattttaaagtgcagaggtatggaaacagaggaggttccattcctggttttgctacttgccttctgtgtgaacttgagcaagccgcctgatttcttgatccccagcttcttcctgcaaaataaataaaatatagggcctaccccactgggttgttgtaagagttagagaagatttgcatataagtctctcagcacggggcctgatgcatagtaagtgaaagtgaagtgaaagtcgctcagttgtgtatgactctttgctagttacagtccaatggaattctccaggccagaatactggtgtgggtagcctttcccttctccagggaatcttc

SEQ ID NO: 40275 - DNA, 868 bp, Bovine  19866880737014
  misc_feature (1)..(1): n is a, c, g, or t
nttcgaaacaagcctctaatgtcagaccgcattttaaacccaataaaaaataaatcagagaaaagtaaaactctttgaaagtcatttccctctggcttagtgcttgctttagtcctggttgcaaaccaagcccggagcatttaaaacaagatttatgaatcaggctcttcaggataaatgttttgcaatgcaccagtggttaaaaattaactctgacaggtgtagaagggcaagggggagaaagaaaggcatttattttccctctgagtttgagggtgcaatattagacttcaattttctgaatatatccatgaaatctgaaatatgtcaatacacttataatgggtttcattcaaaggcaccctgtgttaaatagcccctgttttaccttagttgctctatagaaatctgctttagcaacctaaggatcaagtagggtaaacataacacaaagtgattcaagaaaacctgctgctccactttaaccatttttgactttcagtaacaaagagaacagcaaactgtcaaccaagttctaagaacataccgggtgcatactctttgaaaccttagtttctctccctataggagagaagttacttcacaggtgtgctggttgcattaaatgggttggtgtgtaagagttctctgacagtagggaactttatcaaagaatttttaaaaattttatttggaggattattatgctatgcccagttctacgctaggaagagccgaaaagaaggctttgtccttgagaaatgtagccgagcagatgaaacgaacagaacactactgaacagctaaatataagaggacgagggacttcaggacataaatgtactgaatgggtcaaaaccctgcacat

SEQ ID NO: 40276 - DNA, 2300 bp, Bovine  19866880754137
  misc_feature (1)..(1): n is a, c, g, or t
ncccagttctaactggcaacaactagaaaaggtatctgtttgccccataatagtcttgcttgtcctccacccccccaaatatcattcaggcattcatttctattcacgataatgaagttactgcaaatgaatgatttatgactgttccctggaggtgcgccagtactgttcttcccagccccatgggacgagcacgtgtcagggtaatgatgagactccaggaaaatatcacgttcctaccaggccaaggaagtcagttctctaacctggggtgtcccgccaatcatctacactggagccattcctgaatacaaaggtgtgggtgaggagatactgtcctggggtgggtgggctatttttcaccagtgagaggcactgaagcaacaagttaattccaaaggttccatatgatttccagaatcacgtgagagatatcacacaaatggggacatgcctccaactcgggtttaaaaattaactggatgcaatttgagggggagaggctgcttgagttctgggatagtcatcttcaacagagctgatagaacaaatccacccttgaaattggcacactaaattcttagcagaaagatgtaggtagggtccatgacatagcaagcagtcttgagcgtgcgtgatgaaaaacagttgcagagcaagcttttcttgggtggaattaggctgaaactgagaaagacatttagccactttacatcagaagcagaagcatcaaactccaccaccgattctagtatactctgtgcagtacaaacgcttgaaaactctcgtggaatgaaatcgtttgtgcgtctctgtcaagcttggtctggcttttcacttccatgtttccccctcttttatggagcagggtggggcgctgagaggactaggacccccccctttccttgcaagctgggcgcagctctccctgtctctgagatggacctccacaagaatcaggaggaagtgaaagatggaagctcgatgctttgacccagggtcctgtcctgttcttgctggtcctcttcctctccacccttgtgatcagtctagagggggtggtctataagcagctctagtgccctgggcacgctgggcccatccccgtcccacagagtacttctaacctgtcactgcgtcatttcctactgagcccaaaggcagcttctgaacaccaacacagagctccctaaccattatcaagtgatctgagcagtcacacagatgaaactttgtggccaacacccaggactacatacctgggccatacctgttaacattctccgatgcagtggacctacaatccaggatatccctgttttataccctccttgctgggatctggaacactggaatggaccagagttgccttatggactgtttctgctacagccttcacctgtggatcccatattttgggtctgtccatagaagccctgcccgatacctgcgtcatgaatgcccatcccatcctttaggtgggttttaagttgaggccttcccctctctgtccacccagttcagatacaactaagcctggctatgtaacacccttaaaaaaatccgtgtgcacacgcgcacacacgcacacacacaagcacaacataatgtaccaacgtatgactgataactgggttcccattgcttgctcatacagagatgagtttggtaatttgcatgagttacttgtaataagcaatacattcatgatgttttaattaaattcaagatataaactcacactacaagcgatattactggtcctgaaacctcgaacttcacttctagggcactcatcaccatttctaaatgaccagttcacttttaaccaaggtggtttagactttccacagtagaagaaaaatacatcagtttagataaaatccactgctagttccatctgcatttcccactttgttaaaaggctaactgaatgccaagctgctttcacggaagtgtatggcttgctctaacttgttgcagtcgacccctattctcctactgcttgcattactaaaaatatttattttgacaagacatttcttagcctacgtgtttccaaaaaacacattccaaaatactttaaattacatagtaattataaactccctaccttataagtattagaaagaaaaacagaaatgtcaacaagtaaaacgaacgccataatttatgcagcaaccagaagcattgagttgaaggggtcaggggagcactcccaacaaccctcacctaaaaccaagatcatgtaaaatccacaaattttaaaagccagataatactgattatatatgtagcac

SEQ ID NO: 40277 - DNA, 1580 bp, Bovine  19866880757274
  misc_feature (1)..(1): n is a, c, g, or t
nttcattgaattcatcccattgatacgagctgttgtgctccccaagtaaggaattaaaagcttacagataggacattgctttaaagctgagatatccttggcttcttcttataacatccaaagttaaaataggaatgaatatgtaaaaggagcaaaggtggctctttggccagcagctgctcctattgtcataaagatctgtcactttaatgtaaaaaagaaaattcctttagaatactggcagactttcaaccctggtcaaatggatttgaaagcactgtcagctgacctctgggagagtggctgctggcaggcccattcataggtgtggtgcagcctccagtgtaccatgactgtgggctttgggagaagaagggggaagaaagttgggaggaggattaaaaataatagcatttattttctgagtactccatgtgtatcaggcagtgaatgttttgtttttgttttttttttaatttttgtctcagtaatcattttaggacaaataccattattaactgcattttatagatggtatattttctattgctgctgtggcaaattccacatacctagtggcttaacactacacaaatttataatcttatagttctgataagtctgacagtgttttcactgggctgaaatcaaggtggcagaagggctgtagtcctttctggaatctatagggaaaaatctttcttttttttccttcagttctgccttctaaaagccactcacatttcttgattcatgcctgcctttctccattttcatagccaacagaggctgggttgaatttttaacacatcttgtcactctgaccctttctgtcttcctcttcctatgtgattacattgcgcctgtatggacaatccaggataatcttcccatctcaaggtcagctaagtagcaagcatactaccatctgcaaacttaatattccttcaccatgtaacctaacataggcacagcttccaggccattagtctgccttcgcagaaacaccaaggagtagagaggtttagaaacgaatgtagggtcacacaactagtttgtagaaggaccaaatctacctttgagcttaaacctgacctggagacaggaacagaggcctggggaaaataagaagagagggagaaagttgaagggaaatttttcttcaataaaggaactgggcttttgcaataaatgtactgttgtttacaagtcagttgaacaagaagactgtatcaatggacagcttgccttcattaatcatctttgttattccaccacttaacctgcaaattgattctgtaaatcatagttcactaaattggatcgaactcagaatcctggcctttctagtgttataaaacacactagggcatcaagacccatcctacaatgaccacacacaactcttaaggagccagtataaaggtgttattgtgtgtatacacacatcaccaaaacacacaccacagttacagggcagagccaattctgactccatgttggatgtgtctctttgactttaacctttgcttttcattgcttttgttattataatcatacatactgcctgcctcagagaa

SEQ ID NO: 40278 - DNA, 2475 bp, Bovine  19866880841307
  misc_feature (1)..(1): n is a, c, g, or t
ntgaccaaataataataaaaattatatatatatacatatacatatatatatatatccctttttgcagaagtaagttacaactagtaaagaactgaaatatagtttttctgatggggagaaggtcctaatggtatttcagagatagaagccatcattttcatagcattaaagtggaatttcaggcaaattactattgcctggcatgaaaaatggatgaaatcctggatgacagatgagagcagaagcttgagagggactgtaaaccatcaagagcttgatagcagctaaagataattaattctgttagaaactaataaataaagataacaatatgttgcattatgcttagcatgtctggtacctcaaaaccgagaatcagagaaaaaatgaagtatgagtcagcagtcctaggtggaaaagtcaccccaaaaggcgactctgaattgcttttttcatgaaatcaagtgctgcattagacctaatcactggccttcagctcacaactatgcggtcatcgctggcggggaaaggtggattatcagctttcagttggttaagagtcaggtggcaccgacacagtgaagtgggtcaatatttggacagtcgattttctccctctccctcagtcttcaaatgttaaagggctggaagagggctgaagactactgaaggtgaaggacagcacaaaagaccaagagcaccagcgtgagtcccttttattaactcgtctcaaggagaccagatttttgttattaaaatcatgatttcaggattggctaggcaaactaaaatgtacctagtgcaccttctttccttttcaaacataaaaacagatgatcagtaagagtgaaaatcctggtaaatgaatatggtacttatttcttaaatatggattctattggagctattgcactcagtactttaagggttcctttgagatctcatctttgtataaaaattcaactaagtctttttttcccaaaaatgtgctgtattcctttaaattataatctcttttaatgaaaaaaatgttgccatatcatataaacaagtgtagatattaaaattatttgaaaaactcctaaaccctataaaattctcatggccactttctttgtgccaggctctaggtccataatctggtgtaaaggaactgacagcccagtgaaggagaatagacacctgaacaaatggttaacaaataactcaaataaaatgtgttcagatataagtacataaataatgtgaaaagaattggaagtaaaatgtcttgaaagaatagaaatcaatacgatttgggagatttagtgcccacatttttataaaaataaagtgaagtcgctcagtcatgtctgactctttgcgaccccatggattgtagcccaccaggttcctctgtccatgggattttccaggcaagagtactggagtgggttgccatttccttctccaggagatcttcccgacccagggattgaatccgggtctccccagattgtaggtaggcgctttaccatctgagccaccagggaatttttatagaatggcgttaataaatcaccttcattgcatttatccaggtcgagagaacaaaagagatggtgaaaaacaggagagataaaaactgggggaaattttcattcaaagactgtcatttctagattggattgtgaaaaagaaaatatttcatggtagaaaaaaaaaatatatatatatatatataaacagcagagtgcctaatatgggtctgcaggaatgatgctggctgctggagatacagagccaatacgcttggtcctgagtctctcagtcttgaggaagaaaaaacaggcaaattgcaactgtaacattgtataaatattataatacctaaagcacagatggctgtgttttggttgttttgtttctttttcttgaatctgcattggctagccagagaaatctccttggagaataccaagaaaaatacaaccataattaggagcagaagcccaaattctggaaataggaagcagaagagaatatacattctttcgcctgctctgtgttggtacagatctggcaggtgtgaatttgcatataagtaaccacttcaggtagacacaggtcagcacctgcattcacaaacacaggtggttgggcagtatttgtgaaaatttagctactaaattacagtctcttgttcctaccctgtgttaatctgtctgattctctatgctccttatagagaactggcaatttaaaaccattcaaggggcaaagaaacccaaatacagttaattccctgctctagtagttctccaactctaatcatgagcttgttttaatacaaattcctgggaccatctcatatatattgaattaaatccacagggtgtggggcttgcaggatctgtttgtatggctcccccctccacccagggtttatgctagatgtttataaacttcacttgattatacaaacacgaacaaaat

SEQ ID NO: 40279 - DNA, 1708 bp, Bovine  19866880854822
  misc_feature (1)..(1): n is a, c, g, or t
nctgatgcctattcttgatatgccccacccccatcctgcccagacacacagagctcaaggctcctgggcaattcagacaggacggcgcagcacatggaatctacccagcagacccttaccagcctggtttccaaagcctgtctgttaaaactaaggtgagggtgagtcatggggcccatagtcaccacccaacctgttcgggagcattgctccgtcattttaacagctagacctgcaggcaacgtgtagcctgttatgataggctgagcagtgctcagtttatcagggatctgattggcagagcagcctcagcgctttataatagttcttagaagtgtttacagaacactgtgttttgcacctcagtgtaaagcacaccatgtgaagctgtgccccagcccacgtgcaggtgggggccagtgggaaacttcagatttcccaagaagggacacttctgtctgtttacttcaagcactatagaggaggcattacatttaaatggaagcaagagagatgtagatgagatttgaaaagcttaggttcctacaagaagaatggtttgttattctgtctccttgaaggggttttaaacaatgacaaggaagatttatcttttaccagttttggaatatctttattctgtgccccttggaaaataccaaacaaatatgtcaaactaaatggtgccttatggttttagggctagggctctgttcttttctgttgatttggcatccttatggaatttagggaagaaaattgtttttccaactcttaatgaacacctaccctcacttcccacacacaggtgctcttccttcaggtctttttgcttctaattctctttaattttcttggtcttcccaaactagctctgcattatacattcagagagtccttttgtggacaaagaattaaaaaaaacacagtatgctttcaaaaaacagtttaacactttctgcctttaagcttaatatgctcaaatacaaagaaacatctaagaacccactcgttgctatattttatcttggattgctggacttgtcaattaaagaaagtattttcacgttcagacatattcagggaatattgaaggaaaataaaatgcgagtgtaaataaggactcactaggaaggagatgtaagtgggtggagggtaaaatccatttagtatagaaataaagttatgttcacagcaagtccaaactgagacaggtaacacattgccctaacgatctagcagttaagcttttaaatgcctgacgtctcatattctcaattaaatttcagattagttgtgattccatgattggttcagcttggccagaagcagggagaaagggaaatggtatctctgctccaattttccctctctttctgagtttcaatgctgaatagtgggttgttatttagtcactaagttgtgtccgactcttttgcgacatcatggactgtaacccaccaggtcctctgtccatggaatttcctaggcaaggatactggagtgggttgccatttccttctcttggggatcttcccaactcagggatcaaacctgcatctcctgcattggcaggaggattctttacagctgagccactacagtgggtgaatgagggcaaatgctttcgccagtagaagaaaatttggaaaccctcttttgccaccaatatccagtttttaaattacctttactccaggcaagattt

SEQ ID NO: 40280 - DNA, 1668 bp, Bovine  19866880888529
  misc_feature (1)..(1): n is a, c, g, or t
natatttttatgatcccctaaaattatcctgagtcctaggctctctatctactgtgcttaatgggagacattggccttgacttcccacatatattttcttctctattttgagataactcagccctacctctttattccttccatccctttctaagaatgaggatctcctatatgatagtaatcctacatttgatttctatccactgaaactgcatatatttgcagagagtagcaacgaaatcacattcaaatgaatacctttttcatttaccatgatggcagccactaatatgtctgtcaagcagtaacaatagttaaaatgtgttgggtcctagtttctttcctatgtgagagaactagttcacattttgcggagatgaggaaacaaaagtattcagaagtgaaatcacgtgctcagggccacaccactaggaagccacaccatagccagcatttgcacctgtcaggctccagggccttaaccactaggttagatgtctgaggacacaattgtatgagatatatcatgaaggctattttctatccaatttctcaccctttgcaaaactgcagcctgccaggagcccacagtacacaggctgggaacctatacttagggcaaaagttcttactctttttatagcattaagctgccattgggagtcatttactacctgcaatgttcctatttcagggaacctattatgaaaatgcaggagccgtgcttcccccgtgtgtcccggagctctctctggtagctgtacacgagccaacctaatgagaagctgtgacccgcctcctcccagtccttagtacctgttaaaataatttaaaatatttaagtcccctggacccttgtccttagactggagcactgaaattacagccagtatccccctgggttgtgtcttcaccaacaacgtagattcacaggaaaggaatttaggtgaaaaaaagaaaaaaaggatgtcttaaattctaggcccacaatgccagaaaaatccttgtttgccaagtagaaatttatgtaatcatgagactaaagacacttcttatttcccaaatgttactgccaccagcataataattctccctaagtaggtgccaaaagactttccctgagtcttcccaagtgcttaaagttgatagaaaattatcctcttgaaattatacaagtcaactacagaactacagctgtgccacatgagaaaagaagacaggaaggaaacaattcaactgagatatacattatgggggaagaaaagacataacatcctgacccatatacactgttttctgttccagaaatattatttgcttaacaagaactgtagtagagaatcaaaagcaatgataaaaaattctgatggttttctgtccagagggacaaagctcgagagtttgtcatatttttcattcatacagcttggggccaacaaacatgctgtaactggataatataaggaacaataaatggaagaaaatatatgaaagctgactcacagtggccctccactgtggtctctggataactagcaacgtgctgacagatgaaagatcatatgaccttctctacaacatggccacctttcttaaaaagacccccaaagttatgtgctttttaaaagaagtttaaattccatgggagtctatccctaagtcactgaa

SEQ ID NO: 40281 - DNA, 1209 bp, Bovine  19866880893022
  misc_feature (1)..(1): n is a, c, g, or t
ntaagagaatttgtttttgcttatgaagcctctccccaccctattgaatgtcctgggttctgagcatggtctcccttatatccttccactatctaaaaagcatggaaaatgttgccttgtgggtatcttgctggtgagttgaatggccccacagcgaacagtgaaaacacaggctgaatgaggccagacctacattttgttgcttggaaggtgggtggagggagcaggagccacccagttctttttcccctttggcgactcagttcctcctgaaccctgaggaataatgaggagagaaaaatgaacatttttgtggctcaactgacattaacatgggaaaaagcacatcactggaattagaatgtcctgttaaattagtcactttttcttctaaaattaaaatgcctctgcaagcaggaaagagaacaagccctcgatgacctcataactcattatttctaaggaatatacttaattcccagcagagataaatctaaaatcgattttccatttctgtcgaccattgactggcggcctggtgagtccttgtgaaggagtccttgtgaaggagaatatgtattctttgtgggacttgcaggggctggtgaggagaggagggctgctgttgtttgtaaccttgagggcagctgctgagcatctgttttccttcgcaagccatcctgagcctctcagaaacctaagaagagggacttgggccggctttttcatcataaaacctacccaactgtacacacagccacttttgcaactgggatccccttcctaggccattaggaaagaatgtggcaggcaccacctgctgataaagagcaagaggaaaaggcattggagccttcattgacaggaggatggttgttagcaagagggtctgctctgatgctttctggaacattctttgctgcccgttctgccggaactctcagcagagctgtagctgagctctgaactctctgagagtccctcctaatgccagtgttatgcctattccttatatcagtgttcctttctgtattagaacagaaaaaattctctagataaggtttaagtatcttgtatatgtctgggtgtctgggtgaacattagaccccactgtgagtgacatcatactcattaccacccccaactcctgccaacaaagtcaagagactaagaatattaatcaccacagaattcgcaggacagattcag

SEQ ID NO: 40282 - DNA, 1161 bp, Bovine  19866880900037
  misc_feature (1)..(1): n is a, c, g, or t
ngagggcttttttttcttttcatatgagttgaaagaatgtcccctgtgtggcttgaatagcaagaaaaaggaaaaatattcctctttcagtaggtacttccttctactttaagctggcaagaaatgtttcaataacaggttgtacagaatgtaacttcaaaagacctggaattggcacgctggggtactcttgccacaaactgcatccaaaaatgatttaacttcccccagccagtgatgtgtacaaatggcacacacggctgctaaccacacatgcacgcaatgtatgaattcccacattcctgatttctcattccagccagcgaatatttttttcagagctaaaaagacatgaatcaagttgtaaaaggatatgtgtggaaaatgccaaagaaaaaatgaaaatcagatgctttgaaaggtgaaaggctctgctgagatgctctgtgtcctttcccattctctcatcagaggtgaccaggggagtggccattacatccagtggacttagggggtggagggtgtgggaggaggcaagtcatccatcattctttaaaacaattgtggcatagctcgatactttgaaggaaaggtatttcaaactagttcttatggacataacatctatgcagcataaagtattttttctgtatcattgctgctctgctttcagctggtatgattcttgaaaaagaaaaaaagccattcccagcacagtgaatcctccattagcatgaccaggcgtaggaataaggaaaaaaatacatatatttttttcagtctagtgcattcatagactcacaaaaagatttactggggacatggagaggttggaaggtaatattttgaatcccattttttgtcttgataaatccctgatgtgaattcctgtgctctgagccagtttctcatcaacagaattaacacagtctctgctgttcctgtcactagtacaatattgatcacaatgcagagcaaactcagctgccttctccgcaaacggctacacacgggacagtgtagatatactgacaagataactgctggccttgggcgtattctgtccgtggtgatctgggatatttcatgtatgccactgcttaagagcccttttattggatgagatttagaaggtctgttaaccagtggaatatcaaagcc

SEQ ID NO: 40283 - DNA, 1809 bp, Bovine  19866880958731
  misc_feature (1)..(1): n is a, c, g, or t
ntaaagtcagagttcatattcctggtggtctcaccattgagcaaggaggtgaaattgcaggaaagtaatagcatagtagcagaatgagagtgagggaagaaggcagtcacaagctgttgacataaacatgttctagagggaaggacttatacaatcagtgaatacataggggactctcactggtagcctggagtctggacccttctgtgtctgtcctccaggaatcatgtggccttgttagaaaattgtccgtctctggacctttcattctacctttacaagttgtattatcagctttcacccatataaaacaattgtggattcagggagtgtaattttccaaagtacaaacaaatttgattatgtttatgattaaagcagggcctagtgggtttaagagccagcccttgggaaaccaacacatcaactctcaggatgaagaacagagtgaaaagcaatgtccaaatgacttacccaatgcttgcttcaaggaagttttcagatgacttttccaactggccaccaacgcctagtggtcctcagtgtgatagccatccacttccaatccagcaagatcagtgggacctggaagatcgaattggcacccttaatctcttactcagcaccaagtatttgcctagatgggtgactaatggagcggttggctttcttttatgttcagttacatgtactaggcagtgtgtgctcgaagtgttaaaggatgatgactgacctttcatctctcactttattgataccattttaatgttatctaagggatgacaactcaacaaatccccataatgaagaactcctgtccagagggaagccagtggaaaggggagtttcctctcacagcctcttctcccgtgtttgcctttggctttattacagtagcaaaccaatcaccttaagaactgatctgtggcttgaaatttttcaagccagatgtggaattgaatgtgcagattaacaatgggaaagcatatttgaaaatctttcaagcccatttgaacttgcataggtttctcatgctctctgttagcccaaagtttatgaaagagtctgcgttcttggaccgtggtgcctggaggctggtggtcaggcaggtatttccacacggagacagtgagacaactggagccctggaaaacgcacccagcagcctctccctcctcttcccacacttctgggcagagagtcggcctcaggaaagtatagtgtgagtgggggcagcaggaagaggtaggcagaggagcagtgacagcagaaaaagcaacaaggtcaacactaatagcagagtagcaggagggaggggatgagctggtaagagaggccagtctgacaaccctgcattatgttgtcaaaggctaaaccaagcagtcttacttccttttcaacctgtgggaaagggtgattatgactgagcctggtttcccacatcattctctagtgatcagacctctccaaatgttaagcagctgagagacgacattgtaggcaagaccagctgctgagtccagatggaaagggcctggtaaaggtaaaatgatgtgttgcccatgcgacactacatatatttaaaaatttaactttctttataccatgacatgcattatgaaagttttccacccaacttcttgtgttaacagagagtcgttcctgtacatgacatcccaagcgtgaatagcagaagtgcacactcgtgtaccaaatgcctactgcatgaagggaccagctgttggtcctggccatctgccagcccagatggattttctgtaggaaatgaacaccttgtataacacacaa

SEQ ID NO: 40284 - DNA, 1285 bp, Bovine  19866881009562
  misc_feature (1)..(1): n is a, c, g, or t
nagggttcattgttccccatggacttttactgatgtgcaatcgtgtttaaaagaacttgtcccaaagcatgtctgggaaacaataagtaagttattttaagtaaaatttggttgatgattccaattctgatttctttgactgctcatgtgggtggaaggtcaggaaaatgcccttctggttttgcatggtaggagtaataacacgaatactagtgaagcactcaggaattgtattattgtggcattggggtagtatagctgtagcatggaatttgaaataaaaaggtctgaatgaacctcagtttgctcatctataaaatggggacaatgagctccaccctagtgaccgccctggattgaaacgagtggctctactggtaaagagcctgtctggcagtgcaggagatataagagacccgggttcaacccctgggtcaggaagatcccctggagaagggcatagcaacccactccactattcttgcccggagaatcccatggacagaggagcctggcaggctacagtccataaggttgcaaagaattagacacagctaaagtgacctggcacatgaactttaaaactctatataaatattggttgctggttttaatattttttttcttagtaccttgtcacttcctagctttagctgtcactgaaacatttttcaatagcatgggtcaacctaaaaaaaataaaacactggagaaacatgggaatttgggtaaaaggtgcttaccattgcaattacctccattacagagacaattatttggaccaagatattatatttgctaaggtctgggaaggaggaagtttgatctaaatgcaaaggtcccagtgacaaatgaaaggcacctggacactatggagcattgttctgctcttctggaaggcagaacactgccagaatgaagatggagccattccaagtgggtgatgaaatttactttattgacattatcaataaggatgtatttatgggaaacaaacatgaaatatagctcacacttatgggacttggcaggtaagcaaagggaagtggggtgtctgatcacgaggcctaaacctttgggcttatttggcattggtttcattcctggttagctaagtaatttttaggtaattatctgccttcatggatcctcaactttctcatgcatgagatggacataaaactcccattacatcttataagagtagagaacatcatatttttcactgaaagtaagaatatacactgaatatacagttcatcactatgaggtcatgaacatggtt

SEQ ID NO: 40285 - DNA, 1758 bp, Bovine  19866881015585
  misc_feature (1)..(1): n is a, c, g, or t
ngagtactggaactgtggtgttggagaagactgttgatagtcccttgaattgcaaggaaatccaaccagtccatcctaaaagaggtcagtcctgggtgttcattggaaggactgatgttgaagctgaaactccaatactttggccacctgatgtgaagaactgactcattggaaaagaccctgatgctgggaaagattgaaggcaggaggagaaggggacaacagaggataagatggttggatagcatcaccaactcaatggacatgagtttgcgtaaactctgggagctggtgatggacagggaggcctggtgtgctgcagtccatcaggtcacaaagagtcggacatgactgagcgactgaactgaactgaattttactatcataggttttaaaaaagtgtccctgataaagttgaagtcttctttgttctccctggccccattttcctttctatttcctagaatcaaccattgtcatgacctgatgcaaatccagtctgtttatacatgcatatttctaaaagaaacatgtttttatggtatttatcttatgaaattattatattgtacaaactctaaataatattatatctatatcactaagtaagaacattttggtcaaaaaaatgacaaaaactgattttctgatgtagctctagaacaaagtaatcacccttcctagttgcccaatattgacttttccctagttgtcttagcttaatttttaatagtacccactgtcactctccaagtgccccactttgagtgataaataatggtatcctgttctaaagacagttccaaaaaggaagaaataagcgtgtcagcagcggtagggtgaggattgagggtccaacttcctaatgtttttaagaactacctttaagaacatactgatataaatgactgagttctgatatgtttgctttaaagtgaaagtgaaagtgaagtcgctcagttgtgtctgactctttgcgaccccatggactgtagcctaccaggctcctccctccatgggattctccaggctagagtactgctttaaagccagacagtaacaaataaatcaccctctacgtttttcttggctctttggtggaaccgtgagcatgcagacagcaggcgaatagagttgtgatgtgacagtgattggcagctaacctccctccccctctttcataggccatcaggatgagtttgtctgaattttcctcctgaaggttgtccttgatgttatttactgtaactagaatttatctcaataataacaggagaaaataaaggtgctcacatagtataatgggtcctgggtcctgcaatcccacaggaatgaccttggaagtatgatttgcttttgggggccaggataaaaccaggagtgggctgatccatgagtctgtaatgtgggagttgtgagaacttttgctgtaatgtgggccacttattcctgtgtgttgccaacaacttaattctatacaaactctatcttccttctcatattggggaaagagatacactggcatcacttcataaatatgaccttactcattatcacaatacactttcccaaaacctggaaaggacaaaaacacgtcttggaaactcatgactattgatgtaatatcatcatgttctcttggaaacatgaagacataatactgacacttcagactattttgggctaaggaatgtaaatagtgcttcaaacagaaacatccccaactttctgatatccaaaataacaactttgcaccag

SEQ ID NO: 40286 - DNA, 919 bp, Bovine  19866881022738
  misc_feature (1)..(1): n is a, c, g, or t
naaatgttaaaacttctccagatctcacagctaatgagtaatgaggctgctaattggacccagatagtctggttctagggctcttatacaacacaccacgacttggagactggcctccctaggccagatccctttagggagaggtgggaggggatgggaggggggtgtcaagttatcagacttgtagaaataggtccgcatcctttaactagcatttcaaaatgaaaaactgaaacattatttgggccaaatcagtcccacattcttgtatgaaattaaacaaaaatcagggtgcttaagttgccaagataattgcctcagggttttattatcctctgctacaagacagctacatagaagggaatattttgctggatacccacttcctctgtgaatctgaaggatcagattttcacttactgtccttgttcctccctgggcaagctagttaccttttatccagtgaagtgaagtgaatgaaagtcactcagtcatgtcctactctttgcaaccccatggactatacagtctgtggaattcaccaggccagaatactgaagtgggtattctttcccttctcccgggatcctcccaacccagagatcgaacccaggtttcctgcattgcaggcagattctttaccaactgagctatcagagaaacctggagtagtaacactgtgaaaatgtaggctatacatactcattatacatagcagaaatcagaatttctactatataaaccatgtggtgtctctggaaacacagttgagtctaagtaatgcagtaactttacaagtcaaagctgagtttcagtgctgaaagtgaaaagtgttagtcacttagtcatatccaactctttgcaaccccatggactgtagcccactagcctcctctgcccatggaattctctaggcaag

SEQ ID NO: 40287 - DNA, 873 bp, Bovine  19866881032026
  misc_feature (1)..(1): n is a, c, g, or t
ntatttacctcagaaaaaagaaaattggacccagaaggaagagaggtttccaaaagcaatcgtgggcaaaataattggcaaacatagggtaaacctaaacccatgttaacaatataaaaaatgacaataattatgaacaatgtgagattcataaaaacaaagttgaaataaaaatctgagaaaatgacatataagagaagagggagaaatcagagttaaagtttctaaagtccttgtaatatttggaaatgtggtaaaattattgattcactttgaactttgttcagaaggcaagcattttaaaaatcaaagcataaaccataacatcataaacattaaagggtataatttcccagcctgatgaaaggaaagaaagaattaaggacaataattcagtcagatacttgttttgagaagagggaaaataataaagaaaaatatgtgatatagaaagcataagacatagtgatagaaatgaaaactgtcagggagagaataagtttaagtgaattaacctcatcagttaaaaaacaaggactaccagattgggttaaaaacacggaattcaactacttgatgtttacaagttatactttatcttattccagttgtattagtctgttttggctgccataacaaaatagcagactgggtggcttaaacagaaaaaatatcttttctcataatttttgaggctgaaactccgaggttaaaaagctgtcagggtccatttctggtaagatctttcttcctggcttgtagatggctgccttcttgctatgtcctcacatgaccttttattggtgcctgcttgcagagagacagagagagagaaaggaagctctagtgtctcttctcatgagggacaataaa

SEQ ID NO: 40288 - DNA, 1525 bp, Bovine  19866881074883
  misc_feature (1)..(1): n is a, c, g, or t
nttactgctttctgtcccagttctctaatatgaggctaataacaggaccttgcctcatatatttgttgtgaaaattaacaattaattttagtcatttataaactttaagttaactaggcaagttttataaagcaagtggcacagagcaaccattcaaatgttagaggaaataacatatctgcaaataaaaatacaaccgccaaaagagggcatatgataaatatggaagggtgactacagcaacctgagagagaggatctctgtgaattagcgcggaggacttcctactggaggatgtagtgttttactggagttttgacacataggtgggagaggagatccttgaatgtatcttggtgagctgctgctgctgctgctaagtcgcttcagtcatgtccgactctgtgcgaccccatagacggcagcccaccaggctcccccgtccctgggattctccaggcaagaacactggagtgggttgccacttccttctccaatgcgtgaaagtgaaaagtgaaagtgaagtcgctcagttgtgtccgaccagggtacaaatgtcccatattcaagagaggagaagatacaataaacaggccattctggcctggaacaggaggttcatgcaggggagacatgggaggaaaagggggaagtggtttaaaacttgtttagtagaagcttagattttggccaaaaaggctttgattgccttggtgtaagtggtgcttttggaagcattacaggacagaggctggcttgccagccttaaggatgaagacccactgccctgaggcttgaattcagtacagcaggggtcaagggtgagggtctgaagaggggttgttgtttagttggaaagtcatgtctgactcctttgtaacctcatggactgtagcctgccaggctcctctgtccatgggattctccaggcaagaatactggagtgggtggccatttccttctcccggagatcttcctgacccagggattgaacccaaatctcctgcattagcaggcagattcatgaccactgaaccaccagtgaagcctgaagtggggtaaggaggccgaaaaaataactcttctgtggattcagccagacatgagaggcctctgctaaacttgtgctaactggcccccagggccttctgctgctcagggaaggacaaaagccagtgtcttgcctgggttgctagaaagaagcagtcttcataaaatggtgctcaaactttcttttttgtattaggcaagaatatcatcagaatggtgatgcttattcattatgaaacaaaagtttaatacctacttgtgctgaagactttcagaagaaatactgatacaaaaccagtcctctaaaattttaaggatctcacaaataggttgtgggagaggaggtgtttggagagaggcatttgttcagaaggccaaatacacggtctctatggcctctcgttgtttgattaagtaccaagtgagttacatgacaaagatgctcttgaaggtcaagaggttcccacaggctgca

SEQ ID NO: 40289 - DNA, 1294 bp, Bovine  19866881107640
  misc_feature (1)..(1): n is a, c, g, or t
naagaatactggttgtagaaagagctgggctgggaatcaggagcctggagcctgaatctgtagccttgcctgatttttccacagaaaaaggtgtgtgaacccagctgaacacctttcacttctagagacctcagtttctttatctgctgaataaagcagaaacatttccttttattctgaattatttctaatttcctcattcacacaggcaccaagaagactaaagaaaatgagacagaggatcttttaaaaggataatgaagtctgatcaattcctattattatttaattggctcttatagacagtttgtccctgtgatggaataaaagtgatcagatatgtctggcaaaggacttttactccaaaaggaataaggagccagtcctgggttctgaaacacaggatcccagagcacaattctctagtttcttggtagctccaatagaggtctttagtcaaaagttttgtggctatttgctatttatccctcctccaccctatatctccccaatgtttcaaaattatctattttatagcattgaaaaacaaaattacatagctaaataaaaacttatctgctgtttaggctatccaatgacgatgatgcctatatgaaaagaaacaaatcctcaaagtcacaggacgctatctgtacagtcaagctttcttaagtccatagttgggctggaatgaaaccaatcttgacatggtaactgaaggataatttgccatctagaaagttatattcctgaagaatattttattgattgactaaaatttgtagtagtgtcaaattaggaagtgttttaagctggaaaattttgttttctagtgcaagagttaaagtgagtaattttagctatgcctgagggaatggactacatttggaccactcatgtaaatgaatggatataaaccgatccatatataccatatatatgaggatcttactgcttattcttatcctgttaaggagaatatgcagtattctgatttactccatgtcttatgccactgaaatctttgatggtcatatatgaaatgtcttcacattgaagaaattctacatttttattttgtgtcaataataaactacattatcatggacataatcccttgctagcattcacacttataatcacactcatgcatatcgtggatcttttttgacagcttgcaaggatccctattctcctttgcatgtagccttcgcagttacaaaactgaaatttctttggccacttcctcggatgattgtagagctcagctttcaaaggtgtttttttttttttt

SEQ ID NO: 40290 - DNA, 1660 bp, Bovine  19866881121600
  misc_feature (1)..(1): n is a, c, g, or t
ntgagctgtgaggatgggaataatgtataagtggtatctcaataaatggtagataatattatgataactactctagaactcatttcccaggttaatggagtgtccgaggatgaaccaaatcacgtgaaaggtatgtatagacttctggtcatcctgattttgaaaataacaatacagagctttaatgtgtatattcttctgtgagctcaaaacaccccacaagtagtaggagttttatatcaattatttcatttgatcctcataacagtcctgtgatggatgatagatattattttcttcccttcacaaatggctttgataaggattagtgcgattaaatggtttaccctcagactcatgtgcctgccttctaaaacaaattcagagattatgccccttgaccactctaaaatgtatgtattcatctctgaaatgctcagtgaaaatactcacactcttctctttcataatcacttattaggaaattgtattcccaggatggaaagaaagtttattcagatcatacagaaattcagcaagcggagtgggattttttttcaaaggagactttattagtgtgcggcgaggacagcccaaggagctcacgagaaggcctgggctctgctactttggcaagttacttgaccttgttagttccccaagttcagaattgagaataagagtcttagcttcatggtgttgctgtggcgattaaaagagattatagacgactgcctggcaaagaaatgctctggagacattgatttcctctccctcacgtgttagatcgacaaatgtctacctgatgaaatctggtaactgaagcccagaattcagaagccttctcctgcccccaaaccaggtacagtgagtactcgttacgggtggccgagtatctcgacagttctcggccttggctgtcctgaagcagagccattcctggaaggggactctgaaaatactttggcttctgtaagcagcttgattccctgcctttgctgtgtaagggtgattgccaggaagggtgctaatgagatccaaatgttagagtggcttgtctgctccggatgactcggatgctgctaactgatagatgagcacttaagttcaagcttaatgcgaacacgttctcgcctaagaacaagactgggaccattagctcacagcatgcaggctctgagcctctgtgaaatgattgcagggctcacttggtattcccctcagggcagcgatgagtcctgagtctcattacccactgttgaagcctcgttcctctggccctacttgaagtctacctgcctgcgcacgggagcaattatcaaaggaaggaggggaaaatccattgattcaaaggaggcaagtcttccctgctagcattcagttcttggcagacaagctaatttttgctctctctgtgtgcttgtgtgtgtgtggctatgtgtgcaaactcaccaggtaaccgtaaaagaatattgctttcacgatcacctccttctgtgtgaccctgatgtagagcatgctgtgaggatacacttatgtgaggattattagcaaaggccaggttgtctgtgactgtcaactcagactcatttactactaggtctgtgggtttggctgtagcttccggcttataaaatttgagttcttgctgcgctccacc

SEQ ID NO: 40291 - DNA, 1330 bp, Bovine  19866881248221
  misc_feature (1)..(1): n is a, c, g, or t
nctcatggtgacaagctcaatgttaagttggttagtgtttccaatgaacccaattctgttcatactagtcatttatactggtaatttaactagatttctaaaaaataagattttggcatttcagaactttgtctcatgtgaggcattgtgctataaactgcccctttcttaaatgaccctaaactcaaatttcagggtctgctttccaactgacttggataccatgcatagcagaagcacagttgttagaaccagcagaatttttctcccaaaaaggaacatcagtaggacttcccaaacacgttactagttcataaccagctatatgacaaagcagttggttccgcagtgacagctcacatcaacacatttgactgaacacactgaaaacgtgggtttccaagttcagtgagccacggagaccagctaccccaaaggagtaacttttaaacaacagaaaaaagccaaagaattatgaacttctcactccacttgcaaacaattttcacctttgttaagacaaaacaaaacaacttcaaagaaaaaaaccccatacacatatacaagaattgtactagacattgtctcgttatgtacttgaactcaacgactgtggatctgttttggctgaaaggtgtactggaaacagtccatgcacatatacatatatacatatatcaagggccgtgaagttgtcagaagttgcaaaaacaagctttctgccttttcctcatggttgtgatttttttctcgtgggtgatttcagatcgcagcgctcccacttctacagccccatcatagcctctctgcagcttagcttctggcttttaccttcaggatgctataccgggtggggaaaatccacacatggatgtaagcatgtatcaggaatgcctctgctgtctctatttatactcacaagccactcagtgctgtaagatgaatggttggactccaagaaccctgctggtcaaacatctacaaagacagatgtgatgggatgctatacactatcaataaggcgtcgggcagaggcatagcatcctacgtaaggtgtgactcactgtgataggaaatcatgaattctgcctttgctgttcaaagaaaaatctactgcatttatgctcatgagatgtagaaatgaggcaagtgcctattaccatgccatcttgcaaagtgttgaagcaaaaaaggtgaacagaactgtggcttttccacgaaatactccatctcagatagtttagaaattaaatgaaagttaataatacacatggatgtgctatcaaaaaagcaataaacctagctgataaaactactgtttactaatggg

SEQ ID NO: 40292 - DNA, 1150 bp, Bovine  19866881275196
  misc_feature (1)..(1): n is a, c, g, or t
nggatactccctggcatatttgaagtgttataaatctaaattaatctgtctattggttgagcatatcctggatcggggactgtaatttgccaactgataactgggccatttttaagggaacctggtgccaattgggcccaggctttccataatcattaaccactgagactttgggcaggggtaaatgcagtctggtagctgtcatttccagaagcggaaaggacaagccattggtgcctgaaaccccaaagtaagtctggggttattgctgagggcttacaaagactgttacctttggtccacctgactttgcccagctttcattattcttttgaaattatgtccacaagataaaaagaaataagggcaaataacacctgtttagcctctgattctacttagaaaagctgtcattgcatcatgtctaggtctctgcagatatatgactgtgatcacgttttctaaatccttattcaaacatttgctatttattggaacttattgtatgctaggcactggggaggctacaacacaaagataagttccctgctctgaaaggactaaaagaccgacagaaagagtgacattcagaaaacaatggcattagaatactgtgctggctataaggaactatatttttaatgtaatgatttcatatgctttagagaaagctccctagagttgaggggaatttatttagttactatttttgtaattactcataaaagttacctgcaactttcttttgaaaaatgcttggacattctaaatgagtccaacaacattttttataaccttttattcccgccaatgtgaattttccttctttctttctttcatttttgcttgtagaggagcagtgaggggcaggaggagtgggcagacaatgcttcgattacagagcccattccattggggagttatgcaaccaaggggaaaaatgcattttccactcatgaggccctttgatcattttggctcttacataaccccctaacagctggagctgtaaacttgaaaattggcaagaacatcgttcatattgcgaaagaaaactcgagccacatttgaggagaaacagctagatattttcaaagcgattccagtatttgtgttctttaacatttagtgagtgctggtgatgttgggg

SEQ ID NO: 40293 - DNA, 764 bp, Bovine  19866881331370
  misc_feature (1)..(1): n is a, c, g, or t
ngtttcagtgtatacgccccctatgagttcagtgtcccactccttgcaaccaagtacttcagaaaaaaagagtaaacccccccccccagaggcactcagttaccaagcctgcaaagcccatgacttcgtggtttttaaagatgttatctgcattttaaagcaaaatggcttgcagaccaaagttccaagcatcactcttgggaattttgcaaagcataaataccattccagccaacctaagaacactgctgaatgtatatattataatctctccattaaaagtgatagaagaccacagacaccaatgctgaaaagctgcttcaccccgatggccagcacgtttctctgggccctccatttctgagttaaaagaagcagtgcagggtggatgaagtcaggctgggatcctaaaagaatgctatgaaagtagtgaagctgagaatcaaaatgaagatatacgcaatcattatgagcaagcttaagcatgttctccaacccccactatcattataaaatcactgacccatttcccccaaggagtatttcacagaacatggcttcaaattaatgcttggtccattagggtcagggagaagtagctaacaagtgacatttgtttaatccattgctgaaggagatggtgaggctgaatcagaggcagacccggataaagatgctattcgcatatagcttggtcaagaatgaatacctccaaagactccggaaaagccctgaattcaccgtctgttcctgtccaacactag

SEQ ID NO: 40294 - DNA, 1243 bp, Bovine  19866881353271
  misc_feature (1)..(1): n is a, c, g, or t
ntctgctaccttgcctctctttctctctcttccttcttgaactcctctctctggaaccttaagggatttcttaatttccctttcagtcaggtgaaattttttcttacatcacatcttccttctttctttttctagggctcataagtaaagctctggaatccaaatctagcaggcttgcctcttgttaagtaaaggcaagctttacaattagaagggtcttttctttttcaaaggcttggctttgaaggtatcgtcacactgtagactcagaacgtcagcttttcaactcagagctaaatgctaacttctgaggcgtttgagtatgtgcccaccttctcttttcctgtggcaatcaactgtaaaggtccaaggaatttacagaaacaggagttgccagggattaatgtttgaagggaagaggaagaaagactggtttaatatttaaagctctactgagcttacaggagaactcactgtggcccatcagctatatgccaggcacagtgttaagtgttgctgttccttccttcctttcatcctcacagctcccaaggacactaaaggacactgaagacactaaagcttatagaacttactgatagcactgaaaatcacatagctaaagaccagtggagccagtattggagcccatgggctctgccttgacagcttgcagggtgactgacttgtgtcagagagagaacagagaggtgaggacatggaaatccacatcacgtccaagagcacactccataaatctcatcacaccctgatttctatatttttcactcaagttttcatgcccccctgaaacacatcaggcaaatccaaatactgctcattggaagagaagatggctcacaatttggcaggaggagataggaagaggaaggcataggacgtccacagaattcccactcctgggaaacagacttgctggtgagttcattaatttttcacccacatcattttgaagatgattttaatgagccatttattggaagtttgttaagggcctatattttgggtgctatatttttattggcttcctttttataaaaaggcaaaaccaaagtacacagcgttcagatgactttcttaaaatgggaggccatctgagtcacagaagtaaagttaaattctctaagcttccggtcccataatatctttctttaaatacacgtttgtcctgcagctccactttctcaagatcacaggatgattctgtaggaagaagaaaatc

SEQ ID NO: 40295 - DNA, 1057 bp, Bovine  19866881363578
  misc_feature (1)..(1): n is a, c, g, or t
ncagaaattgttttagcagctttacttgaatttacatgcggtgcataaaagttgattagttattacatggctagaaatttgtgttcgtggggtggagagttgttataaaaataggacatgatatatgagaacctgtttagtgaatgtctctgaacatgattattagaatcaccgtggaatcaaacacctattgcattcttattcgtgtaattggtaatgtatatccaaataatcattaggggaaagtagagggtaaggttaatgtaagtatatttcttcatggaaaatggagagagtaataaaatgaccacagaactcggcagagaggaaaccagtgtttttataacctgatgtctgcctcttggtttcttctccaggagtactggctgaagccgaaactcaatcctgtagttagtatagatgcatagggaacctcttgctgcccgggtcatgtcatctcttcatgagaaaaaaagaagccactgaatgtttttctcaaatggaaaccaccttgatccaaacccactcgtgggttttttttttttttttcttcatatatacgtaatttcatttattgatttttggctgtactgggtcttcattttctctagttgtggccaaagagggctactccctagttgcagtgcttgggcttctcgttgtggtagcttctcatgttgcagagcacgggctctagggcacttgggctttaataattgtggttccccaggctctagactgcggccttgctagttgaggcacatggacttagttgctccgaggcgtgtgggatcttcccaaatcagggaccgaacccatgtctcctgcattggcagccgggttctttacaactgagccaccagggaaaccccgaaacccactcattgttgatgggagatggtctccacttcagctccgagcacagctgttccttaaagtgtttcacagggacaagccttttgctgttttgctgttaacagccttgtcaagtcattttttcactagtaaatctcaagcgttattccccctgtaaatctttgcccacagacagagaaag

SEQ ID NO: 40296 - DNA, 733 bp, Bovine  19866881536604
  misc_feature (1)..(1): n is a, c, g, or t
nattttttaaatgaatactaaaaattctgactcagtatggtacccacaagccaagatgacagaaggtgactagtaagaccctacagacaagtgaatgaaatttcttttcacgaaagaacattcaaaatgtggtccatgtgcactatttagaaacatcttcattaatcaagaagtgaaactatattctttaatatagttatatatccatgcagtcatttaatctccagaaatttcagttaactacagacatgaatttccaacaacctctaatgggtgtaacttaagatagaacagatgactctaccagcagattaatcaacctcttccaaactgcaaattaaagaagaaacaaatcaaacactgcgttttcctcgcagatgttgagcaaaatatattccgtcttactcctataattacagcattaggagagatttaccaacatcaaagtaaataaaaaacataccaaatgaaagctgatgaaaaactaacaagagactgaataataatttttttaaaatctcacagccatagaatctcttattgatttcaattatatattcattactttccaattgagaggcctggagttagaattaaatgcacctcttgtggggacctcagccatgttccaaccacacaatatccgactaaattcatctccagcatctgcagttggtttttttttttttttttttaaatcaaatgttttcatttgtttgttggccaaccttca

SEQ ID NO: 40297 - DNA, 853 bp, Bovine  19866881595880
  misc_feature (1)..(1): n is a, c, g, or t
natttctataatttttatgaggtgttcagtattctcagaactacaaaaaaaaaaagagagagagagagaggtctgttagaaaccttgttccctaaacaacaaactcattttcatttctgcacatttgggtgactctgtctgatggaagtatgcaaatgcatttgtgaactagtatctttagaagcctaatgacccatcaccttaggactaccctcatgatccccaaatccaggtttctcttctatcacttaccttgctgctgggaatctgaaaagcagagggctgaagagttcagaaagtactcttgcattcagaagatttttgctggacgtttgagagagcttgaagaaatgttttagcaaatactgcagtgtgagccagtactgatgaggtatgctgggcgacctaatgagtttcttcaacagctggatgtattcttcagaactctgcacttctgtgagtgaaaacaaaaaaaagcaaggaaaagactaagagactgttggtagctatcagtgactaaacacctagatttctgttctagctacagaggagtcgtttagaacgaaggcacgagaatcagcagagaattatgtttgctcttctcattagaaaaggcattatgagaaagtcgaaatctcacgtcaaatggaaacgcaagaaactcttggtgtgcagaacccaggaggtactgggtgtgctgccttctgtgggccagcttcgagtgtgattggctaactcaggggagcagcagataagtatcgcaggttttaactttgaaggttacgaaccacaatttcctgtccccggagcactttaactgagcattagctcctgaagcggagagtcttcttcc

SEQ ID NO: 40298 - DNA, 799 bp, Bovine  19866881755479
  misc_feature (1)..(1): n is a, c, g, or t
ncgaacgagcaagtaagtgaaacggtagcatgttagatgactgaaaaggctatggagggaaataaagcagggatgggcaatggggagcactgggggatatgttgagtattaaagttcaaagaaaggaagataggaaagacgtggctgaggagaaaatatttgagcaaatatctaaagagtgggaggactagctgtggatatttgtaggaagagtgttccaggcagtgggaatggcaaatgtgagggcctgaaaatgcagtaggcacagcatttgtcaaagcatgagatcgccctcatcctatcaaagtaaatgtcgcacagaaagtaattctatgctaacaaaggtagccaacaacatgtgaatcctatactcacagtacagttttttctggtcagcatcaatttaatggtatgaagtgccttgggacttggtccatgtgttacattcatcttatgttgctttctatttgtttttatcttatactagtaatacataaataccaaattattgaaaagatagaaacaaataggactttgcacagtgaaatgtgacagttcccttattccacttgcgctgttctagtccccacccacctcctgatctcctcatctcagaagaaacaaccattaatggcttgatacacgctcatcagtcctttctctgtgtatttacatatacagaatatgtagatgaaagtagtttctctcatgaatgaggtaatttacattttttttgacaatttgcttttcttgcttagcaatgtggaagatttaccctgaattagtacagaaatctctc

SEQ ID NO: 40299 - DNA, 873 bp, Bovine  19866881811292
  misc_feature (1)..(1): n is a, c, g, or t
ntatatgtactcaagaattttgcacataatttcagaggaaatatggaatccctgaagccatcctttggtctcattttaggatgtcccagcatagacctatacctcactgtccaaaaagaatgtatcatttttgagggctaaaatcatgtcttctcatttttctgctccccatagcacctacaatggtatcttgtacttggaaatgcactccataaatatctgatgagtagctgatgccaaatttcaactctccattggatgttggaactaagcaataataatttggatttaattctcctattcgtagaggaaaaaatgagttttgctttcatgtactacagaatacttgatgttagtactacttttgcccagagcatgagttgtcaattccaaatgggactctcactttccaaagctctgtggccagttccaaggaaggacattcaggccccaaagccaagtcgcactcactaagaagggagtgtgttctcagccagcccctgaaccaaaggttccttacatctttgctgacaaccagatgtcatggtggccctgggcaatggctttcattaggtcaagtttactgcacgtcaatttagagcaagcctaactctggctaaatgggctagacattgaaccaaaaattcaataagaactctgacaataattaactcgtactgattacctttgtaaacgtagacgtactgtaaatacatgttcctttatccaaaaaaaatcaacaaaagggacgtttgtcaaggtgcaaatgcagccatgtgacgggacctgcacttcacgtccctcccgcccactctcccatcccttcaggctttggttgttcctctctgctctcctcctttaatggtccaagca

SEQ ID NO: 40300 - DNA, 949 bp, Bovine  19866881887062
  misc_feature (1)..(1): n is a, c, g, or t
ngtaagcaattatttcacataatacttagcactgaatcaccctgaggccgcctaccaatatggcattttaggcttcagggttagaggagatggcagagctcaagaactaaaaaattatgcaaattcagggcccctgaagggctagccactcagtgtaaacatggaataaaaaccattccacctaccttctgaatgagatgagcagagagcttttgtcttggttttcaatccgggaagaagcaaaaaatgatccctcctgagcactgaccaccatagccctgcccttgtgtgggtttgaggtttaaatttgtaccacctgcgtgatctgggaaacctgaaacagagaaattgacacaaaatggagagcgccctgggcacctggctgaagccaaaggaaaccctctgctgaggtgaaccgaggcccttctgaattccaacagatttaagttgctcaaaaatattgaaagacatataggaaaacaaccagcatgaaagtgagatatgtgatattaatagacagttatagttttaaatggttacagaagaaatggaaaagcactgataaagacctaagcatccaatcttagaagctggggagaatgtaagatagaagaaggaagacatgaaataaaccatagaaatcaacagaaagcaagtataatatcagaaagttttttttaggactaactaacgagaccaaactcagcaagaatgatcagcaaaaaaagagagaaggtacaaaaaatattagaagtgcaagggttaaaatactgaggggtgaagattaaaagtatataaacattgtaccatgaatttgtttatgccaagaaatttgaaaacttggtaaaagtgtatcattatcttaaaagccaaattaagacagattatagaaaaaaaatagaaagcctgaacagttctaaaatcattctagaaattagatcaatactta

SEQ ID NO: 40301 - DNA, 1504 bp, Bovine  19866880183265
  misc_feature (1)..(1): n is a, c, g, or t
ntactccttggaaggaaagttatgaccacctagatagtatactcaaaagcagagacattactttgccaacaaaggtccatctagtcaaggctatggtttttcctgtggtcatgtatggatgtgagagttggactgtgaagaaggctgagcactgaagaattgatgcttttgaactgtggtgttggagaagactcttgagagtcccttggactgcaaggagatccaaccagtccattctgaaggagatcagccctgggatttctttggaaggaatgatgctacagctgaaactccagtactttggccacctcatgcgaagagttgactcattggaaaagactctgatgctgggagggcttgggggcaggaggagaaggggatgacagaggatgagatggctggatggcatcactgactcgatggatgtgagtctgagtgaactccgggagttggtgatggacagggaggcctggcgtgctgcgatccatggggtcgaaaagagtcagacacgactgagcgactgatctgatctgatctgatctgaacagtaatcttttgttgttcgactacatggcttttgggtttttgtttttttttccaacaaaagttcctatgtattctgactcctccttttcccctttgggacagttcctcagaactacctgagaggctgccttctcaggctatcatcctcagtaaggtccccaaataaaatgtaactagcaaattgcaggttttctttttttctttttcttttttttagtcaacaaaagtaacacacatgaaacccttagagggataattaagtgctcgattacttggactatgtgttcagagaacagaaagttccagtgtgctgaaaatgaaaattaccttcatacaacactattcatattaattcacctccaccttaggtacaaagagctgcattgaagatgggtcatagatgcattctctggctagaaaataataccaacctgtttcctagaaatgaatgaaaaggatttgtgaaaataaaccatcactcttgagaaagggaaaggcaagactctgtagcagtttgaaaatgtgacattgaaatttcccagtcagccccaaatcatcatctccctcccaggagtggttcttggaaatccattgtatactcattttcctccatggagtattcacttgagcatcagcatcatattctgtatgtaagttacattgaacctctagccctgagcgaatcctgtgctctgatttgaggcaggacgtagatgggttccaggctagacatttgcagctagacttctgttcatatttctagaggcagaggatagatgggccccaggttagacactgatgtccagcttcctgtttatacttcaagatagaaataacaacagcaacagggtgagtagctgaactttgtctcctgtggccactttaaggtaatagtaacagcaggagcagagacaggctaagccctgctggtgtaaaggatcaggagatcacaacttcc

SEQ ID NO: 40302 - DNA, 730 bp, Bovine  19866880344244
  misc_feature (1)..(1): n is a, c, g, or t
nacaaagaagagacacagaaaattgcagtatatacaagatttgactacttacaatacattacaataaatagggcattttataagcaattcagcattggattagaatctttccagggatggctaattctagttagcaggaatattacaaatccattgttattaggatgacagaaggctttcattgttgctattgagtactttaagcttaatgtttttaaatctgagttttctgtgattttacattgtaatcaatgttttttaaggaaagtaatttaaatctaacagtgtttactctgaccttagttgaatttttataacaaaggtgaaacttttccccatacctcatttttctttttgcaaaagtatgaatcatttagaagcttggtgctatattcctcttcaccaactcttcagtttagatggggaatgtggaaaagtcagccaagggcatattacccaggcttgggtaaccagcatatgccatgcctcaggccaaggtgacttggatcagcaggtcgacaatactagcctatgagagccagacccaaagtttgtactgaaactgtttgttaaacagaatttctattttccactggattttacctgaaagcatataaggcttggaacttcccagggctcctatgagggggaagcctgcctgagaacagaacagcacagagatgaatgatggacagaaccaagagatgcacgtaacagctccctccccagt

SEQ ID NO: 40303 - DNA, 3066 bp, Bovine  19866880368159
  misc_feature (1)..(1): n is a, c, g, or t
ncacatgaaaatcggccttaatagcatcatcttcaagtcagggacattggttatgtatagactcatacaagtgtggatacacccaaactgttgtacttttcaaactgtagttttgtaatgtcacataggaagctaaacaatctttaaaagtcttaaggtagccacccaaaaacaagagtttggtcatctttcacttggcctttacaactacaaactgacacataatgtaattcaacatccatttaagcaacctgtaatttgattagctgacttcatggatagtacactggatgaatggttcctttaaattcttatacttattttctgagtataaaaatatcagttctgtagcttctttccataaactctacttaatttactcaatcccttccaactgtttttgccatattaaatgttacattacttacactttgatgattttctttccttcctacttaaatatggacaccacttgttatttcgcttttctttcattcattcattcattcattcattcattaaaaaatactgagccccgctaatgccaggcactatatcaagctcttcagaaagagcagtagataaaatacacaaaagaccccatccacaggaagttaacatctggctaggcactttcagtgtctacacagttcaaaagcagaggcttccataaacaaataacattttctgaaactatgcattggttgttttgcgcttttaacaaacataagctcccaggtctaatttatttttttaagtaatgaatttcagtagttagatcttttcttcaatccaaaggtaattgctttctctcttaatactttggcctttctccagtaagcttttgtataaacggcttcaactggttccacgagtagcgtgggtactttaaaatcataataaagatgccttcatgaccaggtggcttgtatttgatctacattttgtaatgttatcctttattatcttgacaccagcatgtttaccacatttcatcattagggactgctttatcttcaatcactggtagttcgtttttttcctttttctattagccccagataaagtgtcagtattttagttcagcaagaatcatataatagacaggaatctgcatttataaccattttagcagaatttttttcagataaagaaatggttttggaaatctcctgtcagtcctaagaaataaagccccactactcattttaatgaaacattctattttcctatgcagttcttacagtaatgatgataaggaggctctgtgggcgtttttttccagcgcctagaatatggggataactcaacagtgattggagaaatgaatcatcagttttataacttctctgaatttaaacatatgttttcagatcctagatttctttcagacaaccttggtatattgccactcatacacgaaggaaccagtttaggtttccctcaatcttttcaaactatctcttcatagtcaccccttagacccttccatcgcttaataggtcagttgccaaggatccagatgaaattttaccactctttgccagtatctttcttttctagttctaaaacaagtatccgaattcttaaagttagaaatgcctctttttaaaggcatcacagccatgaaatatgcatcttagaagactaccatggctagaatccaagtttacttttatgtgaaaaaaatgtatttcttttgtaatattttcagtcattcttgctgccttcttatctcatattaaatcttaattccaccttaacaccatgctacaaatccattgcacgtttctgagtgtttaatgtctactatgtgctctgtgctatacatgctaagaggagatataccaaagtctgacactgacatgttaaaaataatttttacatgaatatagcaaggcttacgtagcataagtagagttgataattccaagtggtcactctgaagaagtctgtagtgctgtgatgtcacacattaggaacccctcttttgtaattgcctctggagcctgtgacacaagctaatgtgtattctcagtggttgtaagtcgtcgtctttcaagggtttattttaatgaagagtcattcagaacaaactcccatggcatagtatggggtgattcaattggataatctcacatttgatcaaacattagaaatgtaatgtttgcaaaatatttcttgtagtcttcaagctggatcatgttttaaagaagtgttgaaagcgttgaaagataacagcctctttggaataagtatagaagctttaaaagtgactattttaagacatgttctcattgttttatcattgttttcagaatcacttctgcttgtggttaagtggctcataaagttaaggaacatgaacacttgatagaatgacgtgagaagttgaataacaaatacagtgttaattgctaagtgcccaatgggtacgagaggcagtgtttacagatggccaagaaacatatgaaaaggtactcagcaccactaaccatcagagaaatgcacatcaaaatcacaagatatcagctcacacctgttaggatgatcaaaattatcaaaagacaagaaattatcaaaagacaagaaatcacaagtgctggtgaggatatggagaagaggaaaccctgtgcactgttggtgaaaatgtaaatttggtgactattatggaaaacagtatggagataccccataaaatcaaaaacagaactactgcatgatccagcaatttcacttctgtatgtatatcaggagaaagtgaaaacactaattgacatatatatatatatatatatatatgtgtgtgtgtgtgtgtatatatataatacactgaagtgaagtgaatttgctcagtcgtgtccgactctgcgaccctgtggactgtagcttaccaggctcctcagtctatggaattttccaggcaagagtactagagtgggttgccatttccttctccaggagatcttcccaacccagggatcgaacccaggtgtcccacattgcaggcagatgatttaccgtctgagccaccagggaagccaatataatacaccgctgctgcta

SEQ ID NO: 40304 - DNA, 1271 bp, Bovine  19866880457784
  misc_feature (1)..(1): n is a, c, g, or t
ncaattctcagctaatgggatgtccttgagaggatgttgctggaaaacagataaactgggttgtaactccttgctttccaactgggctgtcttctacaagtcaccaaaacacgctaattcctcagtgttcccatctgtaaaatagggacactgattcctgtcctcccgactacacaggggagtgggaagacacccctaggacaagaaccacctggtaattgacccttgggaatgttattcacccgccagcatgggggaatccggggacctgtgcgcagggaaacctctcgtttagttcgatccctctccgcagtcactttcgccccactgcccagttcacggagccgtttcggggctccaggaaagaatagcggggggcgggagggcggtggcgggcgcgggagcagaaggggcgcagggcagggcagagaggctgagagcgtcaggcttgcagggatcggactccagctctctggcagacgtctggatgcccaacccagggcactgggggcggtggaatgcctaccttgccatacttcttcagcttcttccggtacctcttcttgggcttctcgcttggcacctgctcctccagcggctcgtagcgctctgggaggacggcgaggtgcaccctccgtgcgccccgggaccccgggcgccgggcgctcgcctcgctctccgccgcctccgccccgttctccagatgctccaggatagcggctgcctcctcgtccccctccgtccgccctcgccccccgggtcaggggcccacaacgagggaggctgctcgccgccttgcttcggagcctggctcccaccgtcatgatgccgcgggccctccggctgaggtcggggacaccaacctttgctcccagcccgcacctccagccgcgccgcccacccctgcccagcgagaccaggcccagcccagccgggccaacccggacggggcgggaggacttggcatcgcagcgccccctggccgtggggcctgggatggcggtggctccaccgagcctggccttcggctgatcgggtcccagctgccaggatcccagccactgggtgagggctatctctaaaggttaatggacaattaacatgcaaagcaagttcaaccgcacttaacgaaagaagtgaacctcaactagtgagacttcctttgcccacgtgcagactggcagagatgatgataatggtgatgatgatggaaaagatgatagtaataaagatcgtgcgcgggcttccctggtggctcagacggtagagtc

SEQ ID NO: 40305 - DNA, 1112 bp, Bovine  19866880548321
  misc_feature (1)..(1): n is a, c, g, or t
ngagagaactagctgggtcaaatattgagaggacgagaagcactgaggactggaaatgatgactggatttaaccttatggaggccctggtgaccttagcgagagggcaaactgaagtgaaacagtgacagattttactttcttgggctccaaaatcactgcagatggtgactgcagccatggaattaaaagattctccttgaaagaaaaactatgacaaacctggacagtgcattaaaatgcagagacatcactttgccaacaaagctctgtctagtcaaagccatggtttttccagtagtcatgtacagatatgagagttggaccataaagaaggctgagcaccaaagaattgatgcttttgaactgtggtgctggagaagactcttgagagccccttggactacaagatcaaaccagtcaatcctaaaggaaatcaacccagaattagaaggactgatgctgaagctcaagctccaatactttggccacctgatgcaaaaagcagactcattggaaaagacactgatgctgggaaagattaaaaggagaggggcagcacaggctgagatggttagacagcatcactgaactcaacggacatgaatttgagccaactctctgagcgatggagaaggataggggaacctggcacgctgcagtccatggggtcgcaaagaggtagacacgacttgctgactgaacaacatgaattgggttcaagagaacagagagaagaaattggagatggcaagtacagataatcctttcaaggagtttcattgcaaagcaaaaggaatatggagacaggaaagggtatttttaggctggggaaggtaacagcacatttttaagctgatggaaagatccagtagagaaagaagatgtgatgatacacggagagagctgctgaagtgtcaccatcaaggcggccagagttgaggagttttagtgcacacgtggagggggtgccctctgctatgagaagaatgttcatccacctaaacagacatttctctaaagacatacagatggccaacaggcacatgaaaagatgctcaatattgccaattattacataaatgcaaatcaaaactacaatagataccacct

SEQ ID NO: 40306 - DNA, 825 bp, Bovine  19866880624882
  misc_feature (1)..(1): n is a, c, g, or t
naggaaaaaataatgatagcctttagttagtcttaaactgcaagtgaaattaacacttaagctttgtggtcccttctcatcttccttattttatccaacattcattgtatattattacatagggaagcaagaaaacacttagatgatctgatcagtcattgacattgtattgatgttttttccacaggcaagttaaccgatatccatggaaatgcccttcagtataacaaggaagtgaagcacatgaactcggccggagtcctggccacactgaggaattatgactattatgcaagtcgagtcccccagtctgttaaaaatgcccttgttccttgaagggaaatctcctcaactcagccaggagaaggacttggttctcaaaaataatacattttaaaattaactgaatggaatttgagctccacttttacttcattgttgatcaccagtttacatttgattacttaggagtagaaaatagaatttttaaatgtcttgataaatcaatcacccagaccaattttgacatctggaaaatttgcaaagtcactccgtgtcacatttcttttcctccttttatttggagcagtgaaagaaaagttcatttccaatttcgctgtcctgatccattgctgaatcaacattcctattttgtaaacagatttctctagggcatagaaccagttgttacctgaatctcattcttgtctttcagtgtaatgtaaaaagtttccctactcccatcctgaatacattaaaatgtcattgtatatgttgaagaaacagattttggagaaatgtttctttataattatttactttgag

SEQ ID NO: 40307 - DNA, 730 bp, Bovine  19866880698266
  misc_feature (1)..(1): n is a, c, g, or t
naagggcctgacgtgtctaccagacactacagtaacaggggcctgatgactgggatggacagtgagtataaagttcaagtgaattttagacttgaattcccagctcaggtctcacatttccacgcttaacactacaaagggctatttaacagatcaagttaatcaaaacaaaactgataatacactatggacaccaggaattaggagggaatactgcaaatggcaaggaagtataaattgagaggaaatgatgaagtggcttattgtgatccattcatagaagcagaagcaatagcgcaaactcagcaaaaatggttattctggacttttcttcatctccaacaccactcgtggccttctccagtggcagatgattaagactcactcttctaggccaggtcctgaactgcagtcaacaagagaggttcctatcttattcagactgctcaccaagcatctaacaaggtgctttcatactcactcactatgtgctgcatgaatgagtcaatacataaaaacttaagtctaagaggcatcttgaaaggcactcagcattgctttgttttgttttggacaccagtggcaggtatttgatcctatttttctgtccatggtgtaccatcatcatcagtccttgcaagtctcctctcttattttacgtctactttattattatttctttcctctgctccttcagcctgaatcccatttttctctctaccgtaagcac

SEQ ID NO: 40308 - DNA, 2025 bp, Bovine  19866880776689
  misc_feature (1)..(1): n is a, c, g, or t
ncatgcattggagaaggaaatggcaacccactcccagtgttcttgcctggagaatcccagggacgggggagcctggtgggctgccgtctctgggatcgcacagagtcagacgtgactgaagtgacttagcagcagcagcaggctttattattagttcctttaatagaggaggaaacatgcacataaagattaaacaacttgcccaaggatgcatagctagtgagtagaaaaatttcatttcagttggtattgaaagcagggaaaattctattattattcaggaattctaagtctgataatccatgggattagtttcttgaagagctaatgaaattgctacctgtaattactttgaatacagtacatctcaagcccagatttaggttcacgttgccactgctgcagaaaaatgaaggaattcagtgtctactggattgagtggacaacttgaagaaagaaataaataaaatctgaatttgtattttcagctaaagatgagggactagaatttatagccattatattattgagcttgcataatatcttgtacagctgagacagttcttaattaagcttaactatgacttcagcccgacgagggcatggcagcccactccagtattcttgcctgaagaatcccagtggacagaggatcctggcaggctacagtccatgggatcagagttggacacagttgagtgactaagcacacacagcacagcatgacttcagcccatgctggataaacatttttttctaggcttcctgtttgagagttaatatattgatcagcatggagtgagatcagttatctcaaattactcttcagaaagttcctttaaggaaagattctgctgctgagtggtgctatggcactcctaaggaaaaatgggggtttgagggaaggaatatttgtttaggtgggtgttttataattagcatcataatataaaaaatgtgctttatattccattataatttctaatttaagactcctctaaatgcattctgagaaagttggatggctcctaaaaagggtcatgcttaatgttgaaagttaggagatctcatttttaaaaaggattttggagaatatattaccttttccaattctaggagtgggataagaaagaatagtatttttgtaagagccctctctcccctcctctcctctctaagtacagacactgccatacctatattttcctagaacctccttctctgttggtagcattggccagaagcaatttagtcctgcttttcaaaccatgacgttttacagtagcggttggccaactgcatcctataggccaaatgcagcttttggatatgtttttgtatggccctgcgctaagaaattttctttaaaaatgaatacccaacagggacagtggagtctgcaaaacctgaaatatttattgtctagctttttatagaaaactttgctgacctctgtgtctcaccattcttgttgaggatatacagaacagtcaagaatgctgcccctaaatattgataagttacctgatcgagagtttctccttagggaactgattatactgccctctcttttgttggtagcttagctaaaagttgaacatgtctgataagaatctcctaattattcatttttcctttatgacctcttaattagaaagtagctcttatgtatcagctattgtattgcttggtaacaagtcatcccaacacccagtggttcaaactcacaagcatatgttgtttcttatgagtcacggggttatctggggatctgttgagttaatctgacctcagctgggagtggctctgctcagtgtgtttctcgtcttccttctggttcaacctggacacgcccttctcatggggatggcagaaatgtgagagagcaagttgaaacacagcagagcctcttgatgactaatatgggactggcttataccaccattttgaactcattttattggccaaagcaaatcatatgactggatgcccaaagagtgtaaaactatattctgccctcagtag

SEQ ID NO: 40309 - DNA, 1058 bp, Bovine  19866880798915
  misc_feature (1)..(1): n is a, c, g, or t
nctagtttgtctctatgactctctctcttcaggctctgagtccctccagagcagggaacaggtttcatttgcctttgtatctcgattacctacagctgagctgaaataaacagtaaaggaaataaagaaaaccttcttctgaaactgtgaaagcagcaccgttggtccccaaaggaaaggtacttgataccgcgtgctcattcagtcagtcacgtccaactcttttccaccccatggactgtagcccaccaggctcgtctgtccacggaatttccaggcaagaatactggagtgggttgccatttcctactcggggtgattatcccaacccagggatcaaacctgtgtctcctgcatctcctgcactggcaaggcagattctttaccatcacgctacctgggaagcccaaaggaaaggtagtcatgatttaaagtttcaaaataaacctgacactacacaccttacaggtagttctttaagattttggcccatttctcagcttctaacttgtttacagcctgaactaaactcatagaagccaaaacaatattaactagtacttcctcagaagaaagaggcagcctacaatcaaaggcactgtacaggtaactccttgatgttggcaccttccctctcaaatagttaaccacataaagctaggcgataggaagaaaacaaaattcctcattatcccctccttccaccttccacctacaaacaccacattgtaccttattattttcaagcaagacgattccagtattttctactgctgtcatcatctaccaaaaggactgattcatcatgtctcttatcccacttgctttagtaaccaaagataattttctttccactttagtcaaaagatgggacttattacacagtaaccatcatcatcctcatcatcataactcagtgttttacaaagtctaggtggtagatatcagtatcagaattacttgggctctaccctagagaaactgagtaagaatatggactgagagaaagcaggggttagggaagagaattgaaaggtgccccagcggtcgtaactcac

SEQ ID NO: 40310 - DNA, 2092 bp, Bovine  19866880841472
  misc_feature (1)..(1): n is a, c, g, or t
ntcatggacctgacatttccaggttcctatgcgatattgctctttacagcgtcggaccttgcttctatcaccagtcacatccatagctgggtactgtttttgctttggctccatcccttcattctttctggagttatttctccactgatctccagtagtatattgggcacctactgacctggggagttcctctttcagtatcctatcattttgccttttcatactgttcatggggttctcaaggcaagaatactgaagtaatttgccattcccttctccagtggaccatgggagtggtagggtgggttaaagaaattcaaatgtaaaactcaagagaagatagcttcagtgtattagcattgcctgtattggcatgttcaatacaacatataaattatgtgtgaattctagagtaaccgtcttcctgccacttgccacacttcctgtatttgaatacaactcttaagaaaactcccaggggaaaattcctgcttaaactcatcttgtattcccttcccttaaactcaacacttggcaccatccacttcagtgaatgacactttctaggaggtcagcaggtatttctgttcactcatcctaggaagttcatctgccagttgcagtagcctcaccaacatgacattttagtagataatttgtcattgacatggaaaacatcagtctaacagacaaaaatctccccagggcttcaaattcctattacctttttggtaacctaagggggctaactcactacttctcactcctctttgtagagaagttatccaaaatccttagtagatattcaaagccttccatgactgttcccttcctacagttccagcctttccttctatctctctccctaatgtcaaaggtgtagctaagctgggcaactgagcatttcctgaacatgcccactgctttctcatcctgtgcttttgtgtatgcagcgttctcccccatcagggatgccagcttctcacattccacctgttgaaattcaacctatccctcaaaatccaattcaaattcgagtttatctattaatacaaagtcctacctggctctacatccccaaatcttccctactgtaatgaatttctctttccccttggcaatatcaatatacagaattatcagattttgcctaatttaattaccagaaagtatttctctcattcaaaaaatacaatttaagggactttaactttttctctatgtttatcttcgttcctagaaagtcatcttgtctagaatacttagcagatttatgtgataaacttctggttggtaggacccaacctccagattgcatgaatatttaatgagaagggttgaacaaataattagtataaactaattgcttttcttttagatcaactgactcaagctttgaaaaatggtgatgatgctatacttttttattatcgtcctatttgggatcaggataacaccacaccctggtgggtagacttgaagaatccttaaacaagataatatctagactgcttaatattgggaaaagagaataattctgggtcaaagaatgagaaatcagaaggaagtctggcttaaggggaaaactttctcttttagagccagaaacgagtagggcttggtctaggagacacggaaatgcctatagcaatgtcagaggtgggaggtgaatcccccaagaccacagagatgttagctgcgtgtgtcaggcagacagcctatctgagcccgaaccctccagacattctgtatctgtgcaatgtggttatttcctttccattatctcagattttgatacattcttactacctgcagcaatctgctctaccatgtaaaattcaggggaaaccagtctcacccttaaaatgagaagaacagagggacggctacagtcagagggattgtcccaatggtaactcagcctagaggtgaccccataggggatatgggagctataggaggtaacaaagagcacactgacaatttgatactaaagagaatgtgatagcagatactttgcagttaatcacttcctaattgacaagtgttctgagctttttttattggctgctctcaaatggttaataacagt

SEQ ID NO: 40311 - DNA, 1479 bp, Bovine  19866880888326
  misc_feature (1)..(1): n is a, c, g, or t
nttgttacccataggagagcaatcaggatccagtttattttatgaaaggaactacccatgtttctctttagctgggataactcttgggtgctttacaaaccctcccatcttgtagtttccttgttgtgggttaaatgagagattggagacagctttgtagcctattgaaacaaagtatgccctcaacaaacagttactgattgattggtcaagtctatcagacactggatacatttaaagcacatgataaaaaatgtacagttttctgaatttgttataagttctgctgaatctgtcacatttgataaattggtcataaatgactattatctgtgaacatttgtatgaattcaccatgttttttatttagctctgtaaaaagaatattataatgctaactgccagtaactattagttgaagaatacctcctttgagcagttcagtgcttggcatgtggtagagcagcacttagtaagtgtttgttgagtcaaagaacaaattattaacaacttctaatcaaggcctttgattcttcagcaattaaatctctttattctcattttttactttatggagaaatgctgaccaatatgatttaagtcacatacataattttatgtttttcagtatccacgtttgaaaaagtaaaaagaaacagctgaaattaattttaataatgtattttatttaagccatgtcaatatattatggttttgatatataatcaatataaaatctattaaagtgataccttacactttttccctaagtatttaaaaatcagcatgcattttatattcaagcacatctcaatccagatgataaattttctaaatttatctaaatatgtatttagatttaagaatatctatagttgcaaagatagattcatttacccaagttttacccaacataatttaaaatgttccaataactgattcaaatatcagttttcaaatgatttgaagtgatatcaaatgaaaaagttagttcctcagtcacaggagcaaccagtcaagagctcagtagctgcctgtagttagtacctgctgtatacaacaatgtagttctagagaattctgctccatagagctgctggaagacagtgctcattcagcacatttcagtgtgggtttagcacctcatatatattttaaatttttcttctgtctttgcattgttccaatttttttctgaaacctgtattatcctaacaccttagaggttagaaatctctacattaaacatgccccatttagttaataatcctaaggaaaattactaaaagccttaagatattcctttggttatttcttcatagtcactagcacaagaagctatacatgtgacacacaaaaatttgcttatgagcagtctcactattaaggactatggctaaagagttttcattcaatcacagtactgcctcatgccattttaagggaggggggagctcacattgtagtatacactcaatt

SEQ ID NO: 40312 - DNA, 1106 bp, Bovine  19866880943763
  misc_feature (1)..(1): n is a, c, g, or t
nctgtaaattctgccttggcttgctgtgggtgtctgtcctcttacatcccagagtttcctgtgcaacctctcctcagagcatatcccacactgtaccacactatggactgattccctcccctccacactgagagcaaccagagatcacggaccttctaatctttctattccagtatgtggcataatttctggaatggagcaggtacaataaatatcagctgaatgtactgattcactaatagttactatctacttataaataatttaatcctattctacaaaatgcctcccaccaactgtcaaagctctgggctattcttgactctcaatttatacctttatatttgctgacccaaaggatcatttgcttttatggttcaataaccactggcatagtgacttctttactctctctctccctaagatagatctcgactggtcctgagacttcccgattgatgtataaaaacacttgacccactacaaggcaaaacatatcacaagatgactttttcctgggttcccacctatatttcattttaaatgctgtatgtccctttgtttcagttactgtgtattctgtgcacctggaataaccatgttgcctttggaagggctcttgcatttgggggatgctgttctcaaggacctgactgaacggggcctctcagagctaagcaagatactatgcctattctttcgaaacaatctcttcgtgtttagaaataagattagttcataacttagcactgtgaattttgaattctaatagataagattgttagtgtttttatatttttttcataccacctagaatatattagctgtaacttagcttaaaaaataattcacattaatgtgaaaaggtgaaaaacttacttcaggtggttttctacctaaaagaatgtaagtagccatgacttcatcatatttctgatttattaaggcatcatttatctcatctcgtacaaaacccatggtgatcatgatatctagaaataaaaaacaaaatgcaaaatttcgaaaaacaagttttagtaaacaaaccaacaaaaatgggcaagtttggccacattagatatgaaaactaagttctaaaattttaa

SEQ ID NO: 40313 - DNA, 3070 bp, Bovine  19866880947921
  misc_feature (1)..(1): n is a, c, g, or t
ntaaatgagatatacaaagagtacaaaatgctcctaacctcaccacaagacaggaaatacaaaggatttatatccccaacaatacatctatcagccttcactccttgaagcaaagctgttttagagcatcacagctctgcagagcttcaacaggctaattaaaaactttctcatacttcacagtgagagagacaggaaaatatcaacaataactgttggagcaaagccccaagatctccccaaagcattttctctcctcaccagaaggcaaaggtccacagacaagactcttagggtacaaggtctccagtcagaggcagaaaaactcattaatgaggtgaggaatttacaaccgcaaatcactcattctccaacccaagcccaggacgctgatgagacaacagatccccaggagcattttagaacaaatctccagttacgtaagtcaggcccagtggttcatcacatctctccatgttcatgccacaacccagattctacaatttttggtagcttatccagttacagtactattaacttgatattttatatctcgttactttctgagtatagaaactacatatgctgattattaaacatgatttttctatcacagatgccattccttttgtctcttattttgagcaagcaatcctgttccaaaatcagtgctaccacccacttggctaaatgttttgcctaaagatattattgaaatgaaatgaaatgtattgctgttgtttagtcactcagtggtgtccaattcttttccaagtcctgactgtagcctgccaggctcctttgtccatggggtttcccaggcaagaatactggaatgggttgcaattttcttctccaggggatcttcctgacccagggatcgaattcatgtctcctgcattagcaggtggattcttgactactaagccaccagggaagcccagtgaaatgtatacttcagtcaaaatgtggtatcacttgaggactcccctaaaaaaaatctgaaatagtcaccaacagacacttctttattccctgcacgcaccctgaacttttgcttgtgctatcttctatatccagtcccaggacagcagcatcaacatcacctggacaactttttacaaatgcataacctctgcacactctggacttactggagctgacactcaagaggtggagcccagcaacctgtgtttgaccaagctctccaataattctgatgcacaataaagcttgagaaccacagacctagatttaagagtacctcctctgaaagtcattcatcttaaagggcttcttctacttcaggactggtttcaatattctttctgtttcttccttccctgccacttacagccacagacacttctgagagcaatttacatataccacccaggattacagtctgtgtaagattcttcttcagccccgctccccctctagacggtcagctgtgtctcatcaatatttccagagcctggcacaagcatgcatcagtcaacgttgactgttacatcaaagtactgaatcagacagtctatagacaatacatcttatgagaaaatgggactggccagattgctggacctcataaggttaccaacaatgtgtctaaactccttccaggatactgaccttaggggctttctcggctttcagtttacgaaccactttctccttgtgcagcaacttcatcatacagagatttactttccacaatatttgatgatgatttagaagaaatattctgtcctactgcagcaggaggatttctaggcttatattcctggccagttttctccttatattcagccttcaaagccaaaagctgttttacagctgcatctatatcttcctttgtggctttcttggcttttaattcacgaaccacgtccccttgggcagcgactctgttgtaaaggaccaaggaatcctcagacgtggcacaagtactcaaagaaggagccgatcttgtcttgagaggcgtagatgcctacagatgcagaaaaccaaaaataaaattattaatttgtattaaatatctttacacaaaattttataaaactattttataatattttaagctaaacacaaaattttaaaatgctaatctctttaaactgtttagggaattccctggtggtctaatggttaggactctgtgcttccactacaggggacctgaatgcaatctctgatcacagtacttagatcctgcaagcaacatgatgcggtcaaaaaactttttttcttaaagttcaaatgaacaatctcattccttaaaaaaacaaacaaaaaaaattatcctaataaaaaataacaggaataaacaaaggtagaggtacacagatattcacaaagtgttttttatcatagtaaaaacctgaacctaaatctttaccattaggagactaaagaaatgagaaagtgaaagtgaaagtcactcagtcacgtctgactctttgcgaccccgtggactacacagtccatgaattctccaggccagaatactggagtgggtagccactcccttctccaggggatcttcccaacccagggatcaaacccaagtctctcgcattgtaggcggattctttaccagctgagccacaagggaagcctgagaatactggagtgggtagcccatcccttctccagcagatcttcccaacccaggaatcaaaccagggtctcctgcattgcaggcggattctttaccaactgaggtatcagggaagcccaagaaattataactcacctaccaaatctgagaataaaccactgctagtaccaacatcggagaaggcaatggcaccccactccagtactcttgcctggaaaatcccatggacggaaaggcctggtgggctgcagtccatggggtcactaagagtcggacacgactgagcgacgtcactttcacttttcactttcatgcattggagaaggaaatgggcaacccactccagtgttcttgcctggagaatcccagggacaggggagcctggtgggctgccgtctatggggtcgcacagagtcggacacgactgaagcgacttagcagtagcag

SEQ ID NO: 40314 - DNA, 956 bp, Bovine  19866881022996
  misc_feature (1)..(1): n is a, c, g, or t
ntgaaatatgcggaacaagcaaatccatgtagacagcagattagtggttgtcaagggagagggagcaggggaggaagttggaactgactccgtgacaggtatggggtttcttgctgtggtgatgtaaatgttctggagtgagttagaggtgatgattatattactaaagcctactgaactgcatgatatgtgagttgcaccttagtttcgaaagagaaactgacaaatacttgcagctcaagtgttgtatagtagatcatacctatgtcattattttctggtcatactccctaaaggtgtttgggctcctcctgtggctcagcggtaaagaatctgtctgcaatgcaggagacacagaagacttgggttcaatctctgggccagaaaagtcttctggaagaggaaatggcaaccccactccagtattcttgcctggagaatcccatggacaaagaagcctggcgaggttgcagggagtccatggggttgcaaagagtcggacatgactgagcatatgactcacactaaagtgttcaagactttggcaggttaaattttaaaaaaaagtagaatgaaagggagcctggcaaataggttattgtgtgaccagttgtgagtgaggagacatcttgcatatttattgggagaaaggaactttggagagacatggcaacaagcacttactgtagagcagagcagctgtgtttgggcaaggacaaccccaagcaaggagattctcttcccttcccagacaaccatatcctgctataacttcatccttcactccaagcagagcacatgctgctcagatgaaaagcagatctccctgcagcagccaaagaaaacaaacacaaaaaaagcaattgaaaactgagagaggaagcaggaatctgcaacctagctgataacatccttagaatcaaactctccaagatgaatggtcatggccattacag

SEQ ID NO: 40315 - DNA, 1434 bp, Bovine  19866881121145
  misc_feature (1)..(1): n is a, c, g, or t
natttgtaatgtgaaataacaaatcctgtggaagaatattatgttttaaactagaacacatatagggtggacttcttttaaaaatcaactaccattctaaactatctttctgataatttacccaagtttttagttattatactggaaagaaaaactttgctttaggtttcttttccatgaagaaaaaaaaaatctaaagcttgaatataagggatacttgtttaaatgccagatttgaccaaatatgttaagttcactaaggacagcatgactctgcctgaagcagattatttcaggatatgaagcttggttccagtgctctggacctggacagtggtcagaagacccagtcatacaaataaaagctctggatgtcggaagtccggagccctattcagagcagaaatggaacccatttgaactaagggtcttgcaggctccataaggaagccactgactacttcaactattagtgtgtctagattggtacatccttttacctaaacctcaacgaacaataatggaggtggtatgaaatgagatgagactttcagtaccttctcaatgatacccaggtctccttcggcgataacacgcctgactatcgttcctgccttttgagcaatagaatatgctgaagccaccaaccgcatcaacacagtgggactggatgccatgatgggccctaaagggaaatcaagaagaaatgttctgttactttcaaaaccagctgctggtttcatttacctgaattcaattcaacatgtagatattgagctcttccttgggacggtttcaattaactgtgtagattctctaataaacatctactgaaagagacctggggaaaggctccatttcagcatcagctctcccaataaattcagcagtattctttttctcagcaggtgggaaaaagaggtatagaggtaactggtttaggcctatgagcatgtgaaatgtttgatgtatgatgtgtgtaatgtgcaaatgctgtccattaaaaggtggttcaggggctaaaaatatactatgtgccctgctgctgctgctgctgctgcttctgctaagtcgcttcagtcatgtccgactctgtgcaaccccatagacggcagcccaccaggctcttctgtccctgggattctccaggcaagaatactggagtgggttgccatttacttctccactaatgagagctaatattttgttgggctgcgggtgagatactgtaacctaatgtctataaaacaggtaatgccaagagagggatgaatagcataagggacgtttgcgtacatgggaagtgtatgtatgtgtgtgtttagtcatagccaactctttgcgaccccctggactgttgcccatcaggcttctctgttcatgaaattttccacgcaagaatactggagtgggttgccatttcctaccaggaat

SEQ ID NO: 40316 - DNA, 1867 bp, Bovine  19866881225719
  misc_feature (1)..(1): n is a, c, g, or t
naattttattttttataaagtaaaaaatcttttttttgggcggcactagatcttcactgtggcaaagggctttctctagttgtagcacacagacttagttgccccatagcatgtggatcttagttcccagaaccagagattgaacccatgtcctctgcatcacaaggtggactcataaccactagactaccagagaagtcccaggagtttagattttatattgtggataaggaagacttggtaatgattttgaatgaggaagtaattattattttcacagacccaacaaatatgaccaaactgcatgatactgcgagctgcacgattttaccctgggcagctctctagaaagtgcttggaaagttagggaaactgaggcagaaacatccatgccatgcttcgtccccagagggagatcagcccgccttacctgaaacctgggtcagaattaccatcaggcccgtgactgtgtgggcagcaccatcctgggtgactcttgtgcaaacagtgcccaggaaagtgctgattttgggggggggtggggccaagggtgacagagggggtgggagaaacaggagctgacatgctctgggcatcagccgcctgatggaagagacttgttttctcccaggaataacccagatttggtgtgacctgaagtggatataatttgaaggggctctttaagaaaagaaaataacaaaaccaagattaagtgcagggtctcaaaagggtccagagcttgaggctcaagcctttccagagacattcccagtaaacccgcctatttctcccctgttctgtttttctgtgctgatgaattgagggtgcagaagttcagagtcattagatatttgttaaatacagaatgaaatgagactcaggattaataatgctgaagactgatcagaaattagtccatgaagcaaaaattcttgcacaggactcctgtaaaactggcccattctttgctgagacactttcttttagggaatacaatttttcttgatttgtctccactaaagatattagttttagtataagatcttgaaccagaggaagaagaagaaaagatactcccattcctggctcaagaatttttgctttcctgtaacttgccaactaagaatttttggctcacctctaacatgtcaaactgaaccgagctgatgtaagccaaattatatttgcttaggcaatttgagtgggtggagccttgcttttttcagtttaaaaaacgttaagtgaccttgtactccaaagtccatttgttgtttttttcctgcattgtgataggcttacagaaatagtacataaggaagagtattcttatttgaatagaagagtcctttggaaatgcatattaaaaaaaatctttactataaaatgatgctaatagggttgatttattctcctttaaattaaaaagcccaagagttaagggcctgatgcactcacctgtctacctggcaccatctataacccttccagttagcgggactctgttaaatattaatgtaaaatgataatgcacttaaatatttcatagaccaactaataataaacatacagtaaacctaagcatagtgcaaaaatccaggccattatttattgcaaaatcatagagcaataggaggatgcattgcgcaacatttactctttgggacccaaagcactttgtactttttctatgtaattcagaatattaagcagattttttaaaaagcagtttcctttgggccggtgtggtatgcttgaattctgggaatgtggagcaatgaagtttaaaaaataataaaactgggacttccctggtggtccagtggttaggaatccgccttgcaatgcaggggacacgggttggatc

SEQ ID NO: 40317 - DNA, 1090 bp, Bovine  19866881257362
  misc_feature (1)..(1): n is a, c, g, or t
ntattaaaaaatgattgaaaagtcaaattacttgtcaatgaggaggttgttgcttttcattactaatacttataacttcattttgctcgtgtttatttctctctacatcatataagttgattggagataagcttaggaattttgtttaaatagagagcaagtacgattccaaggtatggtataaaatatgagtgaggggtaattttagcaaatgaagtagtaatgacatagtaattataactaacatagtaatctaaactggcaaaacttctttttattgttactgtttatttatttacttttttaatttgtttttggctgtcctgggtcttccttgctgtgcaggcttttctctagttgtggtgagcaagggctactctccagttgcagtgcgcaggcttctcagtgcagtggcttctcttgtcgcggagcacggcctctagagcacgagggcttcagtagttgtggctcccctgctctcaaacacaggctcaatagtcgtgtctcgtgtacttgaaagtgccttttttttcagtaggctgtactggaaatgaggtgggaaagcccagttgaaacatggacatctgaaatatttggcttagagctgatgctgtcctgctgtgctgtcgttgtaaaatcactgctttaggagcagcatctggcacatgagtcatagcactaaagtaacaaacctagggaggcagtctcatgatctaattgtagatgtctccaataggcaatatttgccatttcttagctgttttgagtataacctgtttcattcactgttggcaaaaagaatatttgcataatagaatacagacacattttgagaatgatgtggttgttcttttttgtcttcaaaatgatatggtgtttatttgggaactcagtgttctttgtaattgttttttctagcctaccaaaaagtcaggttgaaagtaaatgcttaattgaatgtattggtttttctttactgaggcaagatctttttaaagcaatgatacaagttttgttttgaaatgttgaaatatgcattgtgcatgtgtgtgtgtgtgtgtgtgtgtgtatctatcagatacaaagatcc

SEQ ID NO: 40318 - DNA, 1202 bp, Bovine  19866881342817
  misc_feature (1)..(1): n is a, c, g, or t
ncttgctccatttagaatattctattaactttaaaaatgccatgacagtatccttcatttttattaaaggacacctaccaagattgggacattttgctttcagcaaggttcccagtttcttcactaagtgcatgtccttggctcgttcactcttcttatcgctaaaacaaaaaaatacaacaagttcttaaagaaagtgaagctgtcttccttctaattctgatacatccaaatttctttttcttttctacgcttcctatttaactttaaagggatcagtccagagagaaataaaacaatagctacaaaacaaagctatatttaaaatgaacaaccaacaagaacctactgtatagcatagggaactctgttcagtgttgtgtggcagtctggatgggagtggaatttggggaagaatggatacatgtgtatgtatggctgagtccctttgctgtctacctgaaactatcacaacagtgttaatcggccatactacagtacaaaattaaaagtttaatatatatatatatataaaaaaaggactgggaaaagtcagtagagggacattaataagctggcatgcgatacaacttacctcaatgctaagtggaaaggaacactgactgttttcacacttccagacactggatcaaccaggcagatctggtaagtctggggctgccaactctgactagtaatgttatttaagcccattattttatagccaggatacagaagcctgaggaaatcacaaaccaatatggtaagccacggagtttatatgctgcaacaaaagatccacatgatgcaatgaagatccagggtgccacaacaaagccccaaggcagccaaataaatatttttaaaaaagtaaaatagaacctaactgccagggttctaccttgttaaagtgtgctagaaaatcacataaccaggctgatgtcgcagtggcaaacaaagcactcacatgacttcgtatcatcaccaggggaatcggaaagaatctttcctttccagcctccacagtgtaagaagggatggggacaagtggggcaccaaagctgactttaattcagtagtgtatcacggcctcctcagtcagattcctttgttattaaacacttaatccataattacatagcagccactcatggggaaaaaccacaataaaggacattttaattctcaacccaacttgcaat

SEQ ID NO: 40319 - DNA, 911 bp, Bovine  19866881642731
  misc_feature (1)..(1): n is a, c, g, or t
ntgaagggagaagtactaggctgtccgactctttgtgctcccatggattgtagcccgccaggttcctctgtccatggaattctccaggcaagaatagtggagtgggtagccagttcccttctccaggggatcttcccaacccagggatagaacccacgtctcccacattgcaggtggattctttatcatcttagaacttgataggattacaaattctcgggccacatccctggacctactgagatcagaaactcaggtggcggagcccagcagtatgtactttgacaagtccttcagtaattctgatgctcaaggtagagcagccagagccagggccttcccaccaaagcacaccatgtgccatgaatgagtccaggatgtgccaaggagcccactgtgtttacccccgtgtgccatgcaagtgtgattttccatgtgtgctgttatgtgagagaagttaggagcaccgagctggacagctgtcctcctgtttccctattaaactctttcccagctcagagccacttgggcagtagcttcatccttaggtttatgccttctcattggaataggtttttgaagtttatcgggaatattaccttctctttaaagtggtttgcatctgtctttgtgtttcggatatttttgatttatagtaggtaaagccatgacatcagtctgtttattcaattggagatgtgcatgtgtcatttttcactgcttttttgttttctagggagtcccgattagacttgaagttgggccacgtgatatgaagaactgtcagtttgtagctgtcagacgagacactggagaaaagctgacaattgctgaaaatgaggctgagacgaagcttcatgctattttggaagacattcacattaacctcttcacccggtcagttccttaga

SEQ ID NO: 40320 - DNA, 886 bp, Bovine  19866881734267
  misc_feature (1)..(1): n is a, c, g, or t
ntcttgaccactagcgccacctgggaatccctgacgtgtgtatatgatctcgtctaatggtggcgcaagggtaaagaatcacctgccagtgcaggaaacgcaagagatgtggatttgattcctgggtcgggaaaattccctggaataagaaaatagcatcccactccagtattcttgcctgggaaatcctttggacagaggagcctggtggggctacagtccgtggggtcacaaaagaagcagaaagactgagcatgcctgcaatctccataaatgcctgcgaagtcagttctctcttttgcagtgaggaaaataaagctcagagagtttaaatgatttgctcagttcagttttatggagctgggattaaaaccaagttctccttggcccttctcactgccctgtcccgtctcctattttgtaatccactgcagcatttagctcagggatggattgtccaacttgggtgtaattgcagcttctttgcttaaatatgatggagggcagttcttcctctaaagacatctcccagacagtatacccaaacctgtctcctcaaagatcaagtctgcatgatatggcctgatatcatatgtatccactaataattcctttgtagtatccgttactgaattctcttcagcatattggacttgagacatcacagcatagaaggagaaaaggcaactggggaaattctggagacaaacatttgctggaaaacagagtgaaatgcagtagatcagagtgaatgactactgtagagccctgattattgacattgaatgtggggggtgtcttttagttagctgtcttatctaacagttgttcattagaattcataattgccttgtcataaaagagggcttgcattgggaactgctgg

SEQ ID NO: 40321 - DNA, 1207 bp, Bovine  19866881900306
  misc_feature (1)..(1): n is a, c, g, or t
ngttactgaatgatcgttaagttactctaaggttagaaagagaaataattttaaaaactgaaagattgaagtcagaggtttttgtgactgtgtttgtaaatttttttcctttgttttatctgtaatgaaatttgtaaccaacattatagctcttgccttgcctcattttaatattgacaagaccttaatttaagatgtttgatttgagaattttagtctgtgatctggaaaatggccaagaccaatacttttcatgctgtgttagagaaagctctaaggttctgcagagatgcttcctcatttctgattttatctatttcatatgttaaaatactgtataaaattttgtttgggaataagaaagtcctgcaacctaaaaaaaaagtttgagaagcattgggtagtacatatgctaataggaaactagaaaaaaaagacaacttatatagcattgttatttacttctttgtgtttcaaaattgccaagcacttacatctcttggtttagaaagtgtagttcagttcagttcagtcgctcagttgtgtccaactctttgcgaccccatgaaccgcagcacgccaggcctccctgtccatcaccaactccgggagtttacccagactcatgtccactgagttggtgatgccatccagccatctcatcctctgtcgtccgcttctcctcctaccttcaatctttcccaacatcagggtcttttcaaatgagtcagctcttcacatcaggtggccaaaatattggagcttcagcttcaacatcagtcagaaagtgtagctgactagtttatgcccatgaattaggaagtgaaatactgagaattcacgctgactgtgctgacagtcccttatttgtactggattctgtcggcaccactgtcacgtgtgcgtgtctgtgacagcacagtgacagtgacaatgaaaactgcacatgatggacttattaactaaagttgaaggccttgaaaaattactctgggccggggctctctagtcatcacagtggttgatgcaccacaaaacatgtgccactcttcagagtgatatttaccacgcccctgtggtggccagctataatgaaaggttggttaaattactacattttcccatctgctgccttgtgaaagactaatcgtttgatgaatttgtgcgattaacatcaaaagaaataaaattttaaattacatatttg

SEQ ID NO: 40322 - DNA, 1177 bp, Bovine  19866881911173
  misc_feature (1)..(1): n is a, c, g, or t
ngcggccggttgtaggccgcgctgcggcgctcgcgcagctgctccccgtggaaggtgctgcggctggagctgccgcaggggaagcaggtgcggtcgggcgtcgaggcgctaatactgtgagcagatggcgacgcagcgggcacgcgctggcttgtgccaggcctgtaagcttcagagctgtctttaatggttggcagtgtgactttaataggatggccggaagcggacatggacttctggtggcggggtcgtgctgagggcacagcggaggccacggcggagcctgcagaggacatgctgctcgcggacatctctgtcaggctgctgtcttttccgttttgcaacgctgtgtatcgatctgtggttctttcacagacatacgtattccttcttgccatgctacctccaggatacacattgttacttggaatagttgaagacttttttctttctggccctacaagaggacttgcagtcatttcactttttgatccaactgttgtgctgccaagtttatgagccacatctttgtcccaaccctctttctgttcactttccacgctgttagcctgaggccttttggtatatgatacagcaggaggaatggatggaccagcatgatcactaaagcgtcgctgcttctggtttgccgagatgctccgctggaccttcaggtgagcaggggacttcagggtgctgttttttaagtcactgctgggccgggacctctgacacaagtttccactggataacgattcacccccgtcaaattcaggtggttttctacctagaagaatataagtagccatgacttcatcatatttctgatttattaaggcatcgtttatctcatctcgtacaaaacccatggtgatcatgatatctattctttttgtgtcattgaaatctggttcaggctcagcatgtggctttagttcttcttcttcatgaccaacattcatccaccgatctttcattatttgttctaagctgccctcttaattggattcagcactaataatttcttcaaaaggttttcacagtctgtggacatatagaagggaatacggtacttccctcgtaagacccgctcccgcagttcctttaaattctggccgtcaaaaggcaaggagccactgactaacgtgtagagaatgacgccgaggctccacacatc

SEQ ID NO: 40323 - DNA, 3343 bp, Bovine  19866880345931
  misc_feature (1)..(1): n is a, c, g, or t
nctgttggttctaaaataaaacacagatctaaaacaagaaacatgtcctatctaaatataatagtcatggttgcgagatgccacaacaagagaaaacacatttttcttttctctctatgatgtttgtggattgagaagaaatacagaacttttggtttgacagtcaatatgaaattctgagcgtgaagaataaaaatatattcatattatcaaattatttaagtgtctcaagataacaccttccttgtccagaattttctgctgagatgttggaaaatatttggtggttgttgctgctctctttatcctgaagtcaaagcatctggaatcaagtcctggctgtcactatttctttcattagaggcaaattgctatctcaggttagaggcaattactgatctcaattgacccacagtttccccagctatacagccaaaatggccatttgtttaaatagattatgagaggataaataattatgagataataaatgtctagaaagaactactagggaaccacaaactgaaaccacctgccttggccaagcacgagaataaccactcgcatgagttgcctcacaacagtaagtctcaataaggaacatggtactgacaccgaaaacaaaccaggagtattcaggagggggcacagggagggaggagatgccagtatacaatatgttctaccaacctcccagaatcctttgcactggaatccatcttggctgagagatgcgtgcaccactagaaaggaccctgagtgagaccaaatatgagccaagcaagatgacgggccaggtccagaaactaaccccattaccataaaacctgacactctgagccatgtggcaggagcagttctcctgggttcccttaccctgctgctggtgtgctccctcccaatacagtgttttgctttgtcagtacatgtgtctcctccaacaattcatttccaagtgttggacaaaagccgactctcaagccctgggatgggtccccctttcttcaacagaactaccatttctgcaggatcaaattacaagatctaaaggagggggcatttgatcacatttatcctcatctatcccagtaaattagaagaagacattacagaaatttctcatatgatttttatacactataggtgtcaaatagtcagagtattattaagaagatatgaaagagtcacggattttgaaacatcatttatactcaaggttcttaattatcagtttgaggtagcaggctctatttcctgcagtcagttggtattagtgaatgagagctgactgtgaacatcttttttctattacccattcagtaaagtcctatcaggagcttgaaatcagccatagtcagaatttttacaacacagcaatctgtaagctttgaaaataaatttcttggtggttatacctcaaacatacctctgcatatattaaaaatgatgggaagatgttacttctgaatgtcaaatgagagaaaagagatcctattgtgtgtccatgacaataaggccttccttgggattttatgtgatttggaaaagccttattccctcggaaaaaattgatataattgaagagaaggaagctgagaaatctagttataatgaataatgtgaaataaagtgcatcagctagaaaattgcagatactttcgagtgacagtgattagaatatttgactgtagtggaggggacaattaatgttcactctatttatagtaatactgtgtgtgcatatgatgtaaatcagggacagcaggagtaaagccttgattcccaggctgacttttaaataaatttgtggaaggtctgaaaacatgtaataccatcagagaattttaggagaaacattaaatggtctaatctgctcaattatgaagaaaataatttcagtgaatgcaatattccaagctgacaactagttggcagactactgtgataatttggttttgaagccacatcaagtcatttgtaaattcagataaaaatacatgaagaagggatgagagaaaggaaaaataaaaatttgaatgaaaagtgcctaaattagttatgtctacagaaatcaaacagagcaccacctttgcccccacctcagaaatacccagtatctttaaaacaatcatttttagtagaagatcttaatgtttttctgtcaagtaaataatatgttgatgaaggaaatggttccaaagaagaagctgttagcttgagaaaaagtactcactagtgatgaaagtacaagcatgttggctcctctggtttcctctttaaaaagtaacaatgatatcactcatttagaggccagtaagaaccaggcagaattttggtttttcaaactcaaccgtttccttcttccttagctcactagtttttcagttcacttttattttctcaaatgctagatttcaaacattatattttgttgccatggatctcatgcttcacttgccatttattgattgatcactgtcatttgtcacttttgtgtaaatgtttttctagaatctgcagaacaatctttcctatttatgatacattctgttttctagggaaacttcatttctcatagaatcgtgatattttgatattttattccctatttaacatgaagcataagattataaaaataagaaccaaaatatcattgcagatcctctaattctaccttgctttataaatgtagaaaaaaagatgttagctgacatgctggagtcatgcagctcattagtaaaaattctagattcttttttcattcacagttaatcaaagaacttagtttattttcagttttttgttgtttgtgtatgtatgcaatctctatttcttttcatgcagatttcaaattggagagtttagttttcaatccccaaaaagaaatctttgttgaaagtcaacatgtagtcagaatataaggtaatcaaaacttttcattttaaattgactctatttctaactataacctgaaatttcaaaacatcgtcaagcagtgatctttgccactcacatctgagctccaaatggccctgcagatgtgaaattgtctgctgccaggggaagaacagctggattcagttaatgagtcaagtcagcatgagctcaagcactagagacaagaaagcttcatttccgtagcacagaattctaggaatggaaacagagagccagattgtggcagcagtggtcccaccagtcacacagctgtgagcataattatgcttctctcctaccggcaaatggaagtattgtttacccttgtacacaggaaacctagccatcagcagaccaatttttaatcctgtccctaggaaagagagcaccaaaccgtttcggtcag

SEQ ID NO: 40324 - DNA, 766 bp, Bovine  19866880479712
  misc_feature (1)..(1): n is a, c, g, or t
nttcttcatgtagtaagctagttaagtcagtgttctgcttgtggtccatctcaaaatatagtggcatagagtattgtcattgtatcacatttagcataaaagttgtagtttcgtggccagctctcttactttccagctctgtgaacctagacaagttacttaacttctttgtatacctcatttatgcattcacagtgccaacggatctggttgctgtaagactttaatagtactgtatataaagcacttagctcagtgtttgacatgtagaagatgcttatgaatagtcagctgctatcattattatcataataattattctcataatcgtcagtaaaggcagtaagaaagtcatgttttatacatgcaaagcccaaagtggcaagatcatgtaagaatgtaacatcagattgcttgtgtaaacttaaatcccccacccccagcacataaagtttagtaatggcatttcccttcagcctgtatcccctagttcagatcaaacactatgaggcttattggtaggaagccacatccactgtcttatccaattcacccctcttatttcctctcatattaattttacttcaccgtcatcaccctgggtctactgtccacttaactagtaaacagatattaaaaaaaaaaaaaaaaaaactaattaggtggccatctcactgatggccaagaccagcttcattatctcaattaggcttgatttatcaattaactgtacaaccgatagttccggaatcactatacatcgcaa

SEQ ID NO: 40325 - DNA, 1045 bp, Bovine  19866880517062
  misc_feature (1)..(1): n is a, c, g, or t
ngctgagcaccgaagaattgatgcctttaaactgtggtgttggagaagactcttgagagtcccttggactgcaaggagatccaatcagtccgttctgaaggagatcagccctgggatttctttggaaggaatgatgctgaagctgaaactctagtactttggccacctcatgcgaagagttgactcattggaaaagactctgatgctgggagggactaggggcaggaggagaaggggacgacagaggatgagatggctggatggtatcactgactcaatggacgtgagtctgagtgaacttcgggagttcgtgatggacagggaggcctggtgtgctgcgattcatggggttgcaaagagtcagacatgactgagtgactgaactgaactgaactgaatagatgccagtgatatgctctaaaaacatttgcatacatcagttagttaataaacttctatggaattaaatattaatttttccaaaatagatgatttttatagttatattccacttaggagacagaactttcacctgattttcaggattttaaaagagctatcatttgttaaaaaaaaaaaaacaaaaaaacaaccacgattctttctgtttttaccctcctaaaacagggggaaagtctgagttaactgtttttctctgacactgagtatagatagtgtaaagtttgagtaacctttggctcaagtccttgcccagaggattgtaactatgtaactaagattctgtgagcatttaagagaaggctctgcttggccagtttaacaggagggttggtggctgcagattattttgttaactattttaaacaccaattaactgtgtaaagttgataggcctgttgtctcaccagtgtactgagtatatgcctatgtcccgaccttatattcaacatgcaactagattttggtcagtggttgctccaaatataaattttcctgagaccttggcaaagatatttgtagttattcctacatgctttgtaccggaatctaataccaaggttatcaacatcaggttagcaggccc

SEQ ID NO: 40326 - DNA, 1674 bp, Bovine  19866880629012
  misc_feature (1)..(1): n is a, c, g, or t
nacaagaaatgctattccaaggagcagctgatttataactacagtgaatagctgtgctgtggctcatcctcaaccaaagcatgcgtattcatagatttgacagtgacaaatgcctttgcagaggctttgaaaagacacacagagtagatgatcttctccacacctataagccatggtctctgtaatactattttctcttccaggaaccttgacttggcagtgtagcaaaggcgggggtatggagtaggaggcatgagtatatatgagcatttttcttcaggaatgccatttgatttgatttaatttttgtgacatttttctccatcaagtaataatcagtagaaaatttggtcatgtaaaagttcataatcatcagggtgaaatgaagaaatgagttcccagtttaattcatagaaaaatatgtttcaggtggatgtgaatgcaaactaagttgcattactcatatttttaaaaaaatttttttgcaacatctcattacgggttatctaagtcatccagtgttttaatcttctgaggcatatgatgggaagacaagctgccttttctatccaaatatgctgttgaaataaagcagcactaggtggctgtcttatgggtgggatattaatagaaagctatttcaattttctaaatagaacttaaaaaaaaaaaaacagagtaaaaatcagaggaaaatccacttgctgcagagtagataatgatatgattttcctgtatgaaagagaaccatgccaatgtagaaaatatatattgttaaaattttgagcgtctcccagttggttttataaaatactcataagaaaatgcaataggaagaaaaaaattggtgctattctccagtctgttcaactctaaagtttcatcagtgagtgacagactctattcagagatctttgtttcttggtaaagataatgcatagcacagagtctatctaaatcagttgatgttaccctattggttgctgtacttagggtataagagtgcgaatttgttagaattaaggttctatcttatcacagtgtagcaatgcataggcatttaaataaagatactattgggaatgtataaaaatatgaacattaacagtacacaaataccttttatctctcaggtttctcttatagaagtttaggttgatactacttgaaatacaattagaagttttagcacttttgatattaaggccagggtgttacataaaagtatgttcctaaacacatttggtatctcataaattctgcaaacaaggaaaatagaaaagtttcataaagtataagtttaactgtcattgctaatgaagttatgttccttgaagtttctgctttaaagttttcttgggaagagaaagaaaaataacaatagggactgtggctcattgtatatggtgattcttccaatattaattgagtttctcagatgtactcacctggacaggaaacagaataggccatgcagtcagagacagaaaaacagagaagcattgaaaataagcattcacagtcaacagtattgattagtcaatgagaaaaaaagaaaatgaaaataatcattcaaattgttaagcatctagttttaccttagtcatgtgttagagtcatgcatgtaatttgtcccatctgaagctcttagtcattctgctagatgcatatcat

SEQ ID NO: 40327 - DNA, 1901 bp, Bovine  19866880705991
  misc_feature (1)..(1): n is a, c, g, or t
nggctcccaactatactctctagcctcattcctaccaatactctccttgatcacagaccaacctgatcttaaaatttctcaaactcaagaaattattttgcaatttacagtatttgaccctcctgttctcctttttaaaatattcttcccatagttagccaaataacttactccctcacctcactcaagacaagtgacaccccctcaaggatgcctttcctgaggacggaggagcctggtgggctaaaatccatggggtcgctaagagtcggacacgactgagtgacttcactttcacttttcactttcctgcactggagaaggaaatggcaacccactccagtgttcttgcctggagaatcccagggatgggggagcctggtgggctgccgtctatggggttgcacagagtcggacacactgaggcaacttagcagcagcaagtagcagctaacatagcaacctcctgtcactctgtgtccctttaactttattcttactactgaatagtacatattactttttagctgattacagtttttgtcccttcaagaatataagcatcataaagggaggcctttgaatatgtattgtgctgctatgattttaggacctacaacagtaccaggcatatagtaggctctcaataaaacttgcctaataaatgaatgataaatagtaacttctcaatatatttaaacactataattgaacaagattttaagattgttaagattttaacttgactcaacatcagctaaaacacagaacattgcaatcaagtttctaatcataattaagtgactacaacaaagttctcacatctcttaatgatctttaaaaactgaaacaaaacaagacggactttccatttctattgtgtaacatgtccataaatcatacaagtacttatgtgaaaattaaatggaaaataaaattaatactttctgaaaattcattactgacttactacaatctttctgtttctgtttcaccatcaaacttctctcctttagggagcctcatggatattttaagacttccaccaggtaatagtactctcttaagagaacaggaatttattcctcagagcaattaatcatggcctcctggaaatgttttatagacccagtcttcccacagctatttatctccttccctataaactgctttattacacagttaactgtttgtaacctgacctattaaatgtcgtatttactttgtaacaacaagaaaaacccactcataaaacatcatgtttgatccaaaactccaatctcataaaatgctatggaaacaaaacataagctgttggttgacagagatccttattttggctacaggttttaagagcttctcagatccaaatgacttttggagccttttactgaaggttgataacttaaatacacacagtgagaatcctaggatccatggttagctagaatcttctagaaagttgtctttttttattggtcccaggagaatttactgggaaaatggagggcccttagcacccagaatgaacctctgcagttcccctaactgggttgcttttctcttttaacctggcctagccatcctttccacctttctcttcccactgtcctccaatcatccttaagaaccttgcttaaagaggcaggtgggagacaaaagccaactcaagcctgcctaaattgattttataataaagttttgcttacatcttttaaaatcaaattttgctggggttagagttcctggaaaagttaactaagttaacttttcctatatatctgtccttttacctcccactagcaaggacatcatcaccaaactgagataaaaagacaccaaaattaaaaaacaaacaaacaaacctcaccaaactgtcacagggctcagttacagtagca

SEQ ID NO: 40328 - DNA, 906 bp, Bovine  19866880841478
  misc_feature (1)..(1): n is a, c, g, or t
naattctaaaatgctgtatttttagatataaggaaagttttagaatatagaaagcacaggtattctgacttaatttctcatgcaaaatattttcctaatcctacttgtatttttactgcactttttggatcaattttaatttgcatgactgttgaaataaattagatgagaaaagaaaatcggcatacatttcctataaaagtcagaaaatttgcatcagtttgaaattcttgcatgtctatcctaggagaaaagtatcattagtaatctcatttagcaagtgaagaaataggtttggaaaagatgaagcctttgctgaagttcatgtaactttaagtggcaggaccagggcgctaaccagtgcagccttaatctatcaactgctctgtgttttttccattaaccaggtgaagtgatggcaatttgcaagtaacatcttgcctatgctttcctcaatacacatttacacccacagaccactgccctgtctcttaggcactgtgtgtgtgagtgagcacgtgcatgtgttttcatatattcagtacaagaattgtaatatttagttcttattcaaaccagtttgtttgataaaagttctagggtgaaaatgttaaaaactgacagcatctttaggtcaaaggataattacagtgagagattagtcacattctaccaggttaagatgccaatctggactgagaagttgctcacaatttttctctgattctctcattaggataatggttcagaagcattgctgttgttatgactgatgattattatctatacatttctccacatctctcagttttgccttggatcaagttaaaataacacaaactgtgcatttgaaccatatagttttgacacagatagtaaaaacaatggtgttgcactgttgtctta

SEQ ID NO: 40329 - DNA, 1234 bp, Bovine  19866880904555
  misc_feature (1)..(1): n is a, c, g, or t
ntatgatcatctcaataaatgcagaaaaaaactgctgacaaaattcaacacccatttgcaataaaacctctccagaaagtgggcatagagggaatcaacctcaaacataataatggcaatatacgacatacccacagcaaacattactctcaatgctgaaaacctgaaagcatttcttgtaaggtgagttttgaaaacagtttaatgtctacaaatagaaacttgatttgggcagtttttccatgtcactacaggtgtaaggtagaagaaagtgtaatcttgcctgttagataagtgttttagaaagcttctgattactcatcaaggaacatatcccattttcaggacagtaatcttcagatttggaatattttggcattcatttttatgacctctggctatttctgtaatttacttattatactgcatttacctctttaaaatccagccaagcttctctcgcacttttttgtctgtggtgtttatccctctggctatgaagctcacaaatggtaagtaaagccatgcttttcttagagataacattgatgctgtgatagaaaacaaagatttagagcactcacagcttgtaagactattatctggagttgtttataacttgtaagccctgttccagagccagtggagtcatagattttctctagcatcacttgctattcaaccatataattctacccactaatctgtaagcatttcccaatcaagcaaatcaaattcgaatgatatcccattaggaaaacctgcgagttagatcaagtggtaataagatttacatagaagtttctgcaactagggatcatattttaacaacgtcagagtgtaataaatcttcatttcaaatcatactgacatttaaactagatgctgggtcattaaaaaaaaataaagcattataaatgcatcacacattcataaaagtgatcttctgagaaataaacaggtgattcattttagatatgtcttttagaatttattttctgacattagtattgctataactatggtggagtagttgttaaatgtaattgttcacatatgctgacttttttttttttttcctgaggaatggttatcattaattttactgataagagaaaggggagcatggattaatgggaagagcaaaggtactgaagccaaatagcctggctaatttgaggcctacttgctgctctatgaactggaggattcagttaaactctcatgtcctcag

SEQ ID NO: 40330 - DNA, 1577 bp, Bovine  19866880983447
  misc_feature (1)..(1): n is a, c, g, or t
nttaataaacattttaatgaagaagactactaaatatttcgaaagagaataattctcattgagaagtgtcccctttacattaacaaggaggatgtaagtaaggaaaggatttttaaaaataaacacattttttttaagtgggtcatcaaaattgttttcaattccaaatggaattttcaatatggacaatgaaggaaaagtatccatttacttcagggggaaataaatataacatgggaaacaattgagaaaatcacttctattagtacacaattttacaatcatttttcaaactacaatcatgcttaaggaaaataaaatttgaagaaatcaaaggaattcaattgagtcattaatattctatgcaagttcagtagtcaacaatcacttttattttgatgtatttattccttggttcacttgtaatgtcctgaatatgctgaaacagaccttcaaatagcacgaaagagaagctaattcagtatctgctgaaggaagaaaaaaatgttaaatgctcaattaaataattattaaatgttttaatttccctgcaatcattctagtttccaattcacataagacagagtgtgaataatagagccatcttacaatttgacattctttctaagccattaacatcattttttttttcctgttctgattattaccatcactttggggaaaatactatttgcaaataaatagcatgtcctttaaaactcttttgctgtgcaatttaggataaggaaataaatgatttatctcaaaaaatatgaatgggtctctactagatcttatttcagatagattccctttacttgcaaagagtgttctgatttctcttaggataattttaaaaaacatgattatctttcttcttagtgacagagtcatctgtcatgcaacatccccagtgaaggcatatacactgaataccttaaaaatagatcaaaagtaaatgcaatgcaatgcaatgcctttttgcaaattgggtaccttttaactaacttattttcctaccatgaggctgtggcttttaaagagctttataaaagcaaataagtggttttatactttttgagatttcttaagagcatttgtgtcttctttatttgggcttttgcataagaatgaggctgggaaaacgtgctaaagtgcaaataagtcatgttatccacaggatttttgccctaaataggaagtaatctcaggtgtggccactttcatgatttaaatacttaggttatgcattaaaattcataaccttcttttggattgatccagaccagataaaattttaaaataggagcataaatgaaaggaaaaatgaacaattgcactcagtactaaataatgttgaactcattctagtcattcttttgtgtgtactctattcaaactccattgtataacaggtatacctgattcactgaaatgagcagaaaccatggagcaacacagaaatgaattagaacagagtttagccagatactgggcaaaataactattcctaaaaacataagttttgttacctacaaaattagcacaataaggctatcatattttgctataaatat

SEQ ID NO: 40331 - DNA, 1385 bp, Bovine  19866881135475
  misc_feature (1)..(1): n is a, c, g, or t
nctatagatagtatgtttttcttaagtaacagcttactttaaatggggaaagcaaaagctagtggtcatcactcattctcctgggctcattattgaagtagccatttattttaagagggaaaatagcattttccgagtgttatatatacattcaacaatggtctgccctgcattttgttaaactttggggaagtactacctgcttatcattattaaacttgccaggaactggagtgacattgtattgattataagtcacagactcctggcattttaactcctttactcctgatgactcctttagagggtattaaatacagttaagcagaatgaactgcaatttcccacactgaagcccttgatataagagactgatataacaggagacatgataacaagtgtacctcttacaccctgattccctccgatcttgagagactgtcacaaataagaaaagcacagttgttctcttgaggtccttctgtatctgtaatgacggctgaatggacgtcagtgaattttctcttctgtttccctcatggagagactttgcatttgacatggcatgaagggatacacaaaaaagagggaagttatcatttgtatttcctagagataagggtccttttagtactcagcttccctgattgtcatatcaacaacaatagaagtactctgagaatagagaaaaacacaaaatcataaagagcatgcccaattagctaaaacaaaaaataacagttcaattgtgtgtaattatttgtatattgtccacattgatacagagtacaccaattggtgctacctgtgggtaaaaagaactttctatatataaaatgagtgaaggccaagagcatcagaaccatattacagtaccattgctagaagtcaggtttattataattaactttattataagcttattttttcattgccaagatactataaaatgattcattaactcaactgacttttattaaacactaagtatgaggtgctattccaggttcttgtgatttccatcagtgaataatgagagatgaaatttcctatccccaaggaacttactttccagtgtgcagagatgaatgataaggaaattgatgtttatatatatgaagtatatcaggtctatcatgttctctgaaatattacacaaaatatttataaacttccatgcttctagcctattcctaaatttagtttttgaaatggatgcaagctcaaaggtctgatgtcagttaatatatctgggaggacttctataccttggcagacatctactctcaagcatactgcatgattgagtgctatgctatgctatgctaagtcacttcagtcgtgtccgactctgtgtgaccccagagacagcagcccaccaggct

SEQ ID NO: 40332 - DNA, 1449 bp, Bovine  19866881169469
  misc_feature (1)..(1): n is a, c, g, or t
natgcaaggcaataaagaatgaataaaccacattttaaatggagaaatatttctttcaagttaacttttatatccaaatgtctctttctactcctccttgcctcagaccttccttaatacccaaggaattttgtaattaggaggaaacgtcctacaaacttaaatcatagatgaaataactctgcaatagatctacttaatttcataaattctacttgctgaaagccatggatggttggagatacaaatgaaatagggtagagctgcaagggtccacttaataccatctggttttcattcaaaatactttgattatcgagtctctcacacctgctgcacatccttaaaacctcttgaatccaccctgaaagttaagggagaaaatgtcattttccgccttcctttctttattccttacatcttccctatagttacttcccacagtgtggctcagatggtaaagaatctgcctgcaatgcaggagacctggattcaatccctgggtcatgaaaatctcctggagaaaggcatggcaacccactccagtattcctgcctggagaatcccatggacagaggagcctagcaggctacagtccatggggttgcaaagagtcagacatgactgagcaactaacattttcacttttcagggggttatacatcttgggagtcatgggtattaaaaattgcagaactttatccaatcaataacattctaatgatgaacatgcataaaatggccatgagacacatttgtgtgtgtttgtgggcaaacacacattgctggaataacaccaaaaactctttttttgttatttatctgggtcacattttttcattcatctcaatcttcagtgcttggaagttatacactgtgctaggcacggggactttcccaaaatataatgaaatgtactctctgtagctgacatcatttatgtgcatgtaatttctggtgaagtcctggattgtaaggagagtaaggatccccagtaagatgaagatgaattatatctacagatcataaggaattatgcagactctgctggtgatctactcagttttttatttcacttcccttcctattaaagatcttgatttcattcagacagtaatgtgcccaaactcagatgatggaacatgattgaccttttatgaaatcctgtggtttccttttttgtccctctggtaggagtatccatgtgaccaagactggccagatggttcctagagaaatttcttctttcttgaaccaaaggacaaatagagctggcacctctttcgtccccttatccctgccagattataaatgtgagagctggagctacagcagccatcttgctatcacaaaagtaagttcctgagaacagcagaagtgttggccttaatgttgttgaaccaatgccatcaatgctccaaaattcttatgtgagaaagcaaagcacca

SEQ ID NO: 40333 - DNA, 1682 bp, Bovine  19866881181685
  misc_feature (1)..(1): n is a, c, g, or t
nattagaacatttctcatattatgtcttaaactctcccaagaagagtagatgagaaacaaggacgtaaccaagctgtaagcagttaacctgtgaacagaccagtaggtaagaagttctgactcgagatgaactgaagttccctcctgttccacaagttgtgtgagtactgcaagtgaccccatactgctgctactgctgctgctaagtcacttcagtcgtgtccgactctgtgtgatcccacagatagcagcccacgaggctcccccgtcccggattctccaggcaagaacactggagtgggttgccatttccttctccagtgcatgaaagtgaaaagtgaaagtgaagtcgctcagtcgtgtccgactcttagcgaccccatggactgcagcccaccaggctcctccgtccatgggattttccaaagtactggagtggggtgccatcgccttctccgagtgaccccataatttcacttattttctcctgttgtgcaccacccttcaaatttgaatgtgatttaagctgtctagaaacctagctagacagagttcatttacaagaagaacaatattactagggtcaaaaatattgaagagtctatcaaaatgagttttaacaaatttgaggtatataactttggtgatctgaagattgccacttctaatgagagaaaataccatgcctaaaaaaataaataacaaatgatcttgtaatttcctgaaatattatcttcaatggaggagttatttcagaacctcattaatacaaattaaggagctgctattcatggtacaatgcatctttgtagtcctgaatcattgttttatcactgatatttttagagatatttttagtaactgtaagacagatgtttaatgttgagaagagtgcactgtagaactagataaaggccagtttgattgttgttgttcagctgctgagtcgtgtcctactcttcgtgaccccatggacagaagcatgccaggcttccctatccttcaccatctcctggagcttgctcagactcatgtccattgagtcggtgatgccatttaaccatctcatcctctgttctctccttctcctcccgccttcaacctttcccagcatcagggtcttttctaatgagtcagctcttcacactggggggccaaagtattggagcttcagctttagccccagtacttccagtgaatagtcaggattgatttcctttagaattgactggtttgatctccttgcagtccaagggactgtcaagagtcctctccaacaccacagttcaaaggcatcaattctttggcactcagccttctttatgttccaactcttacatcaatacatgactactggaaataacttttgtcatcatttgtcatggcttttcttccaaggagcaagtgtcttttaatttcatggctaaagtcaccatcttcagtgattcaagggcccaagaaaataaagtctgaaactgtttccattgtttccccatctgtttgccatgtagtgatgggactggatgccatgatcttagttttttgaatgttgagtgttaagccagttttttcactctcctctttcactttcatcaagtggctctttagttcttcttcactttctgccataaggggtggtgtcatctgcacatctggagggttgttgatatttctcctgtaca

SEQ ID NO: 40334 - DNA, 1472 bp, Bovine  19866881269051
  misc_feature (1)..(1): n is a, c, g, or t
nctaagttgtgtctgactcgtttgagaccccatgcactgcagcccactaggctcctctgtccatgggatttcccaggcaagaatactggagtgggttgccatttccttctccaggggatcttcctgactcagggatcaaactcacatctcctgcatgacgtgtggatttaccactgaaccaccagggaagcccaaacaccccaaggagggaaactccatattgttctcattttatagatgaaaaaactatggcttatagagaatataacttgcctaagctggcatttgaactaggctctttatctccagaagacactactttaaagaccatgttgatgaataatatgcatagatacacatgcacacacacacatacacattaaattcaatctgattttactattttcactaacgagtatttatgcaatatctgtagaccagcaaaggattcaaatggccaggaatcttgtgtttagaattcagtaattctgagcagggataaattgctgttaagggattcttggttacactgctctattaatttaatagcagactctgactttattacagtaaataacatattcattaaaatgtttaaacactcatgaatgaagagaagaagcattagagatgcactctggtagcataactaacaaagcagtgaaatcatttctctgcattggggaattctgaggaggtgatctgcgtgctcagtctcgggctctttgtctgttccgtgtttggcattcaaacccgccttctataccacaaaggccaacttcagacagctaactatttgggaaaggagaatcagcagcctcttggtggaatcaagtaattaagaataatgtaggccttcacaaagaaaaagttgttttggattagtttaggctaacccaccacagggaaataccgagcagtccttcattcctgttgcacgagcaacacaattgcctcttgagtggggaactgaaattgcaaatgtgttgtgactgtcgggtgaggtcttatgggctctggagataattttgtttgtgattctaatttcataggcttcagatcaacttctctagtgaagggtagctccagagtgttcctgacatcagaagttggggcacttacacactgataagttaggcttccctggtggctcagactgtaaagcatctgcctgcattgtgggagacccaggttcaatccctgggttgggaaaatcccctggaaaaggcaatggcaacccactcaagtattcttgcctgtagaattccttggacagaggagcctggtgggttacagtccatggggtcacaaaggagtcagacatgactgagccactaacactttcatgctgatgaattaaaatatataacgagggggtgattttcagaaatagtatttttaattcatttttaactactcttgaaggtctttgaatggagccatgatgttagtatgactgtaggtgcacaatt

SEQ ID NO: 40335 - DNA, 909 bp, Bovine  19866881386250
  misc_feature (1)..(1): n is a, c, g, or t
ntgtctaaactagaacctgatcaaatattccttcgaaatataaaaataaacagcttgaggtttatgaactccaggagtttaaagacaagcttgggtagattggctttgacctatggatcatctattctagctctgagtaaatttacttgaagtaagcatgaaaaaaaaatcgccttgtctaattcatttttaagtgcaaaccccggtgcaaaataagggatgacttataaggaggtttataagactaagaccttttgctctcttaagattgactcctattattggtcaggcacatcacagcaaaaacatcactaagtagagtcaggtctccaagaatattttcagcttagggccattcatggctgtctctactaagcagaaaaggaaaagcaattgaatttttaatataaggtcttattacactattgaataaaatgctttgaaagaatggaagaaggattaagaaaaggaaaaagaaaaaaaaatcctcttcttaaagctgctggagactcttgaaaagttagaaaacctctacttaaaacataaagtcatgcaagatcttcttatcttgccttaagaggaagctattttggctttctttttttccttaaatgatccgtgcttcgtaaaagtgaaaggcagacaatcagcggtaaacgtgctatctatctgctggatgttacacaaataggacaactatttgcattgcaaatgaatgactgataattgcattcctgaccaggaccctgttttcatttcaacattttcctttacttcttaagttctagatatttttaataaagtcctatcagcaagatgataatcatatacttttcaagatatttttagatgtgctaatgaggaagcctgggatcagtaaaacagcaagaatcattaaaattagattta

SEQ ID NO: 40336 - DNA, 1813 bp, Bovine  19866881499927
  misc_feature (1)..(1): n is a, c, g, or t
nttcaagattttctcctctgttctgtagtttcacctcttctgtctgcctgttttctttgtgtcttgtttttaggactgaatgtacctgcaaagagacagagagaaagtctcaatttggaacaaactcaaaagtctgtacctgagattctttgtcacttgatgagtatgaggctcagacaaatggttgcattgatagaacataagttgagaggggggtctcctctgaaggctgtgaaggaccacaatgagtgtgtttcccaacataggcctttgatcctccctctttggaggatgagtatagagcttactcagtggtaaaggacttaaaaagtttcagagcaggaaaaaataaagaaattctggtaccaaatgctttataatatctggggataaaggcgatgatgagggtagggaagaggagaagtttaggattagagaaagtaactcaatttttaattttaaatacattttaaagagtaaatgtatagttattagttatattatttttcaattatggaagaaatttttttttccctaacactataaaaattcctttaaggaaaatgattgtatttttgtcatgttgattacctgccatgaaaacaagatactcactcatgaaacttctgaaagtaatgttaggtaatatgtgaatgaagaaaaatgaggtagtaatagatgtaaatattacataagtcaaggagttgagatataaggaatttgtgataatcagggccatctccagggagatgtgagatttaagagatgcttttgagagtcaatggcctggaaggaaaatccagaccagcagataatgagagtacaaggatggaagtgagtaagagggggtagtggagtcatgactttaaaaaaaaatggccacagttttatggtgcacttttaataaatatatatttgtggggatattctacgttttctgaaacaaacatgtaagcaaacaaaacaacaaacacaatgactaaattatgagtttagtaggcatgtccaattccatcactcactgaagacagactgtagattgcatactctctaggggccagcaaaatttcttttctatgggatggtggtcaaaaaaatagtttaatataaaataggaggaattgatcccctgcttagtacttagcattgtaaatgcacacaaaactacgtgtcaagtaattagagtaatcaagttgcagtcactagctttaattaaactttacaacactgagtgaggagtactaaatttatatgaaataaaagtgaagaggatttaggtctggtctgaattgcatattgattcagatgagagtaaaatgtatgagaatggacacatcagtaattaactagtgtaaatcatttccagtaagtctaatctctcacaaacatattgacaaaaaaaattagggaggagatgcccaaacactgtattagtttcagtcatgatactagactctggaaacttgtgaatagctgtaggtaaagcactgcctggccatgctaacttaatgaagaatgaacatattcagttcagttcagttcagtcgctcagttgtgtccaactctttgcaaccccatgaatcgcagcacgccaggcctccctgtccatcaccaactcccggggttcactcaaactcacgtccattgagttggtgatggcatccagccatctcatcctctgtattccccttattctcctgcccccaatccttcccagcatcagagtcttttccaatgagtcaactcttcgcatgaggggccaaagtactggagtttcagctttagcatcattccttccaaagaacacccaggg

SEQ ID NO: 40337 - DNA, 1035 bp, Bovine  19866881528285
  misc_feature (1)..(1): n is a, c, g, or t
ntggtatttgattcttatctaattgattacttgtcagtacccatggatatcctataagtgtatgtgtctgtactgtttctgattgtcttcctattccacagtaatgtgggttatattcaataatcctagtctgtacagtgtggaaaatatatggtaacaaggatatatatgtggaatgagaaattataaccaagtggaagagactcacagattgctacataatcaccttaaggaagctacacaatcatttactcaagtgcaataagaacttaaagtaagtagtctcatttcatttataagaaaactctacaaattcagcctaaaagggatcagtctaaaataatgaaaataaatatggattatctctttaaaaaggttttctttctttaagatatacttatttcatattaatgactgccaaaaattattattttcaaaatatttgtcatttttaaattgaccagaattacttaattttaacacatttcatataaaagtaatattttaggatgaagaaaataaaaattaaaagcactgtctcagttagtagtggatagatgaaaaagtactccgtgccatagtatgggacagaatgctaagtaagcgaataatgggaagagtcatttctggttgcctgttgaaagtggagtttgagattcagtatattgatatactgaatatatatatttcagtatattgatattgatgggaattacctgtaataactgttttagttttctattgtcttattaaaaacttatcccaaatatagtaacttaaaactacacgcattttttttttaataggtcaggagtttgggcatctagacgcttcttgttgcctcatgcgcatagtcaggatgttggctggttgaactctcgtctggagggtcaactgggaaaggatctagttccaagctcacttaggctgttggtattaatagaatgcattcccttgtggttgaatgcctaagagtccaagtttttgctgactttggctggggactgctctcagattttaaggtcgtctaaagat

SEQ ID NO: 40338 - DNA, 755 bp, Bovine  19866881532738
  misc_feature (1)..(1): n is a, c, g, or t
ncctactgaaacaactgactttagattatagaagaaaataatcgcatttgatatctatttatatagttttttatatatagtttatatatatatataactactatatataatttatatatatatagttaactttatgaagagaggttcaagtggattacaaatggtaatccaaatacactctttcttgccacgtctggaatacaagtacataaataatgtgatagcaacatgttttgtttcgatgaaggtgaaaaaccatggttttacatcatcttattacctcacagcagtgaaggcgatggcaccccactccagcactcttgcctggaaaaccccatggacggaggagcctggtgggctgcagtccatggggtcactaagagtcgggcacaactgagcgacttcactttcacttttcactttcctgcattggagaaggaaatggcaacccactccagtgatcttgcctagagaatcccagggatggcggagcctggttggctgccgtctatggggtcgcacagagtcggacacgactgaagcgacttagcagcagcagcagcgttacctcacagacccactaacttgataactgcttgcaaaagagtattctacttgtctagcttgattgcacccaagaatattcctaccagtgcctgatgagcttcaggcttggagagataacaaatacaggtaatctttgaaggaagtaggtcaactgttcattagcaaaagtaatattagttatggtggga

SEQ ID NO: 40339 - DNA, 2309 bp, Bovine  19866881548555
  misc_feature (1)..(1): n is a, c, g, or t
nttttctctgggtatagggaggggccctctgacatgaggattttatgatctgtttcagggaatataagggaaaagggacagagatcaaagagacctttctgcttctaccattttccccgaattccttcagtttaagacattcagtatgtcaaggtgccctagttgggactgtatgtcctgagccccaactacctccttgttctatttctcccccctctaatcatgttgctcagatgggactgttactagaacttctggagtgtgctggtgcttaattcgaagcgtagtggaagtattcttcatgccatggacatcttaaagtgcttatcaggcacactgagtagtggttactattgggttggaaaaaagtctcagtaggttcacaatggcttcccttgtggctcagctggtaaagaatccacctgcaatgcaggagacctgggtttgatccctgggttgggaagattccctggagaaaggaagggctacccactctggtattctggcctagagagttccatggactgtatagtccatggggttgcaaagagtcagacacgactgaacaactttcacacacacaggttcactataattaattgctgttggaaaaacggtaagctaggtatttacctgctgcatggataaggaacacaagtggttatcagatcacttttcattcatgatttattaattttaaatatctttgctgcactggctctttgtggttgcatgcaggctttctctggttacgatgagtgggggctactctctgtttgtggcttgcaggctcagtggatgtggtgcaggggcttaattgctccatgaaatgtgggatcttcttggaccagggatcgaacaggtgtccctgcactgcaaggtggattctaaactatttgaccaccaggaaaaccctattagatcatctttaatttccatctctcactgaaatcctgagagtctaccttgggttttggtgactactaaattttcaactctcttgtcttttctcttgctgctcctgcctcctcaacccagaaacctatttaagcctacttttcaacccagttcccctcctggcaagcagatgtatttagacagttaaatgcaactaacccctgaagaagtatcatctaagggagatactgacaatttaaaagtagagttttagcaattaggacagctttaagacctgaaggaataattcctaaagagcactttggttactgtggcagagggaggaagagactgggagaggccttaatgtcacacctcatcctgcacgtagccatcttcccatccagaaggttaattatacggtggaggatgagactgagccatgatttctttttggtgcctcattacatatttttctcttaggctgagtcttcagttttatgcagagccaggtgttgttgagtgggctgaagtaacaaatcaacccatttgagctttggaagatactaatttgcctttggatatctttaatccggctgtatatatcaccctttcacagcatttctgaacttaaacactatccaaaacaacatgtggcaggttctctaattactgatgattaaggaaaaaaaaagccaagtcaggccctcaaggcatcaacactttgccattttcctggagaaatgaatgctgcagtgtaaagcagcttgaaaattaatgcacggcacgacacgagacagcggtgcaggatggcatttctttcccgcactgtatttcagaaacgtttcacacgacacgaaaggggcggggggaagagcagatggactcagttatgaaagctatcggaaacaatggtgcagagacattttctgggcggcaaaaacctcatcacaatcgtcagtcactgcatctgcctcagagtgaagggacgatagatgaagagcaaaaacagaaatgcagctgttttgatatgggccctagaaagtaacagaaacgtggttgaaaaaactgagaaggatgtgtcaaactgttagaagtatcatatggggtttctccatgagttaaccaaaaatgacagtagagaaacactcattttgtaagcatatggtcaaatttttccgtatcttaagaagtgatttgtaaatttatttttcctttaatcaataatttattcttactgaatttggggaaaatatttctccaacttggagacatattatctcatttgtctatcaaaagccgaaaatataggagttaatgccaaaaatcagcctgatagatgacccagggcaaaatgtagcaaaaggcttgaagtggatattagcagttttataattcctggaataaggagt

SEQ ID NO: 40340 - DNA, 3536 bp, Bovine  19866880393858
  misc_feature (1)..(1): n is a, c, g, or t
ncaagaatactggagtcggctgccatttccttctccaaacatacaccattactatgtataaaatagataactaataagaacctactgtatagcacagggaactctgctcaatactctgtaatgaacaaatgggaaaggaatctaaaagagtggatattctttggtcacctgatttgaagagattacttattagaaaagaccctgatgctgggaaagattgaaggcaggaggagaaggggatgacagagggaaagttggttggatggcatcactgactcaatggacatgagtttgagaaagctctgggagatggtggtggacagggaagcctggtgtgctgcagtccacggggtggcaaagagttggacaagactgagcaactgaacaacataactgattcactttgctgtacaacagaactagcgcaacattataaatcaattatcctccagtaaatattaattttttaaaaaaacaagcaacaaaatccttctcagtcaacatcatcatcgtgggctcataatatttattgaactacatcccagactccatgttatctcatttatgtcttatactggcattaaccaaaagttctaatgttatacctgatttatagatgagaaaatggagacttggaaaagtaatttgcacataatcaggctgtctgaattcaatcagggatctgaatccagccagtctgactcttatgcccaatttcttaactgccaaacgatgtacaacttctcacaaaacttcttccttttcacccagggcagtgcaatatttgggtccctcagtagtcaggaaccctttctgaggtgcaatacatttatgaagatattggagttaagtattttgcctcatttataaataactgctattttagtctacatggctcattgatttttctgaacaaattattgcatatcattttgaatattattatgaataattttctcactcatttacttaggtgaaagtaactcttatttttctctgtgctagattttgcttttcacattacattattttcttgattattttcaataaatgcagtatttcagtatttgttgtgcatactttgtctgtgtaatggtttaaaatttcctatcatcatacttgtctcttttttcaaaagaatttatgcagatatttttaactttgaggactcacaaatttttggctatatggatgctaatttatattaaaaaatctatcaactggtcttcctacttaatctcctcctgcaatgggctgcaaaatcaagtggatttgcaaagagaacatattggaacacagatggctttttggtctctctcagggaagtcaagagcttggggaaaactagagaattatagtatttgaagggagaaaaaagagttgtctccaagcaaagtgccaaagctgttggatttggtacctaaagcagcaagcctgcaaagatttccttgggtcagagtcaaggccaagaatccctctgatggctgcatttatgtcatcttttgaatgtgcaggacaaatgctgctaccacaaacatatctttgcttcccaagttccttcctcagtgaacacatcccccgtgaacgagctagacatattccacaacttctgagaactctcagatctgcatctcctgatgagattcctttcaaagacccagccctgtgtccagctgttcactgtgccttcacttggatcccttacccggacctcaaattctttcagcgctaagcttgtcatcaccatctcacccccacccacataacggtaacaaccacaacagtcacaaccacaactgaattccacctcatatatttctcatttaaggcctagaaaagctgctcccacaaattagcacctttctccaatctaccagtccagctgattatcaactcataaggattctattttctgaatagctctcgcatccatctgtcttgcattcccagggccatcttgtatgcctgtcctccctgtattgactgtgaatgcctcgacacagtgtctaacttgcagctaagacatttattaggtccctaacaccatcacccagatagtgacctacaaaatgtttgttgtgagaaagacggagaaattaacacatttgatgcagagttattactttgggaaatgagctcatttttggtcatttgaatccaaagtggagcaatttttatttccttttgttgtgaccctcccatctagagctttgagacacttttggagtttttcttggattcatctgaaaaaaatttccctaaactttgcgactgtgtgaaagataaattttaagtacatgcatttatttttaaagcacattaatcatctgtgcttcttgaaaaggccattttatctagctcctctgactccaggcttttaggtgtggtgtttctcttacgaccttcatcagccagttccaagatggaattaagccctaattactggaagagataccacttgcccataccgaactaacttctcttctcttgcaccttccagaataatacaagctctctgacattcttgggacaactgagaatatagtcactcaagtcatgttctgtctcatggttcacaggaggaaccccatggagaaaagcttcagggtcttaaaagaagccttagaagaagttttccacagtctgaccagagactgtgattctctgaatagtgggtcagtctcctccttcccaagccaactcatccatcctctacctcctgtcccagagagcaagaaagccccactagccatggataggatggtagcaaaatattctcctcattctgtgtcttctaagtcctctttaaactttcaaccaatatttagcctcagagttggaaaactcttctgctaggaactaggcgggcatgaaaagaataaccatcatcaaaagctgtgttttcttttgcttctctttggggagaaatagttaagaataagaactgtgatggcagacttgaaagtaatccccagccttgacaattggcctcttttgaaagaccttcccttgacccctgttccctaggaaaaggaaggtggctaacaggaatattacaaggttccattgatgagatgtctctccaaccaagctatgtacgatgacaactagtgggtggaaaaacttccctcaaaccaggactggctatctgccttccaaattacttcactgcatgccaaaaggttatctatgaggaactaggaaaggaagtgcatttgaaaacatcactgggacttgtatacaacatcttaaggtgtttgatccttttatgaactgatgacagctttttgccattgaagtctatgtgagagttgccagccaagcaaaaggaggaagcagggccagcctgtttgaccaaagaacccctgagagctgtttagatcacaagacatgagacagccagagagagggaatggcccagaatcccaagaaaagctcaggcagctagctgcatcagcagtttcaacaaggtttgttctagccatttgaatgtttccctttgactgtgatgtccttttcatttccatcttcattca

SEQ ID NO: 40341 - DNA, 1208 bp, Bovine  19866880421117
  misc_feature (1)..(1): n is a, c, g, or t
ntatttgatagtagaatcaacggactcaatgagtcattatgtgtggtacaaatagaaaaatcagcggaccttctgatttctggctgcctggcttaggttgctgtatggatagtggtggcctgcactgtgtagagagcacaggagagaagcatgtttcttctccttctctcaaaatcccctgtgcttctctttgagcccaaggaattttccaccactccccactgtaccctagaaatataactgcagccatcctcaggaacaagcacctgtgaacacctgttctgtttaaaacaagagtagctatttttgaattcctattaattaaaaatcaactcacacatttcaaattattaaaattctaaaaatgaacaaaggttacttatttaactaaaatttgactaggaaatggtggttttaaatgtgaatgttcaagcttttatcaaatgaacaatgataaattaatttcatgcacttaagatgcagactcagtccctgagatatggggctagaaatggggctgctggcaagtgagggtgtggacaggttcctgccatggtgtggctatgattgaaacccataatttccccatttttagaaaatatgaatctttctgtgtgtgttatctatctttgtttccatctgtcatttgaggtcctttgtagataagtcaagctgtctcatatgaacagtgcgtgagtgctcagtcgctaagtcaagtcatggctgatgctttgtgaccccagggactatagcccgccaggctcctctgtctatgagattttccaggcaaaaatactggggtgggttgccatttctttctccacatatgaacagtatcaatgctaaaatgaaaaataaccataggctgaaaggaaattaaggctgtgtcaaggtgtgtgtgtttgtgtgtgtgtatgtttgtgtgatgagaaagagtggaccaagaagagactcccttttcccagtcatttgtggaaatctatttcaggtgaactggaacaaactgtgagttctggccttgggcaaaatctctatttgcagtcagcaaattaatggatggcaccttaaaatgggttggccttagctgaatcaatgtctgatgtgcaatctttcctcagatcaatttcccactgaggatcctaggtggaaactaactgaaggagtggatgactgaaaagactgaatttttcagtcctctcacgcattca

SEQ ID NO: 40342 - DNA, 889 bp, Bovine  19866880492904
  misc_feature (1)..(1): n is a, c, g, or t
ncgggttgcaacttttatttcctagtatagagttaatgagcagaaaaatggcagagccatttccacacatctaaggcttacaattttcttgaactatttaatgaatgtacgttattataaacgttgagactagcgagtatgtgctgtaggccctgagaggaaaaagtgaagtttctttttagtctcttataattaagctatcgtcgagaattgcagtctatatttttaggcctttgtcctctgactctccttcaggctagatttggcttacatttctactctagtctctctcttccatttcctatccttaatcccatcttgtcatccttccagactacttagcagatgttgttgtaagtgtcttcacgtttacatgcgaggaaagaaagaagactggaggaaaatgggtcaggatgtatgtacatgcaacgcatgcgtactgtgctctagcaaagtctggtctgtcccagctgggagaacctctaaattcctgacatcccagccctaaatactgagctcagagcttttactctcacactggcagtagcagctccaagggattaggaggggcaagggtgtaggggtggactgtacccgctaatctccagcgatatcctcagcctccccagataaacacctatgctaagtgaaagcattcttcaagctagaacctctaatcccttcttccaactagattgctgtccctaagccccttttatgtagaaatgtacatgctaggtaaattgtcaggcatcttcccctgtgtgtgtgtatacacacacatacaaatacatgtacatgtaatgcagtgtttcaagctgatgagttagattgcctgcactcgaatcccagctccaccatatcatgggttgtgaccttaagcaagcta

SEQ ID NO: 40343 - DNA, 1665 bp, Bovine  19866880549722
  misc_feature (1)..(1): n is a, c, g, or t
ntaaagataccaaactgacttctgttaaatcacaaaaataaatattgtctcattctccaccttaagttctaatgacataatgcattttcttgcctttctatttctctcagaaatcgaatgtcctgtgaatcttcctctccattgttctttttaataggcatgtccagacatcctccagctcccgagatccctacgttttatcccctgtctccgggtggtgttggacagattaccccacctcttggctggtaagatccttcttgcaacctgcagccaggcgtctgaacatacatcttctactccccgtttatggaaattagctttatgaataataacacttgtggagttgaagaaacttcaacacatgaggtgctaactttatttcatttcaatttaaaagattaaaagacatacagactttgaaatggactgagtccgtttgctaatatgtgtagaaaatgactgtgtagcattcgctttgaagcttatagttttatggattcagtttgtggctctgggcatttactatgcctgtacaaagtgttcactgtggtctttcttttctagttctttatgaacaacttatatttttgaagcacaaccttagatatattgaatatcgatctttgcttataaatgggcaggtgacgtaaatggcaaataactgtacaaatgcaaaagcatcttgtgaactttaataaagtaagcaccagtttgagttcagaggagtgaaaaacagacaaatggactttatcctttcagaatccaaatgttccctattttgttgtttctgaaagatccataccactgttttcaggttttttataattataaaggtaaagaaaaagaaatgtatttagggaagaaacaatcacttcatacagtggagcctatttttatcattttattgttagttagcacatagctttccctgccctcactcccattcctctcgccccactgctcactccatggacaaagggctgcaccttcagcaaacattttctctcctttccttcctgactctgtgtccttacagacccctggagaaagccccagtctccctccctcacatcctgacattatctcttcttcataaggagggcttatcctgtcatggatattccagctttctctcttctctttagcattaactctcgcagtcaataactctgtttgaatttaattgattatgcaaacacttccaaacctacatcaattattctgtctgaacttagctacttaagggcaataatcctgggctgagttccatcagtggcatctggaaataaagactgtgtaaatgaaaaatgtgacatgtaggaaaaacagagggagagatggaattctcagagcagagagaaaataactccaatgaattgatcttttatttcttgcctgcagcatgggtgtaagggtgggaggtggggtgcagggttttcaaaaatgtgttcatttttatataaacttttatttcctcctttcttcccttccctgaagttctcaaagattctgataaagaatccattatcctaaaaagaatagttcaccattctcagcttctgttatattcagtaagagctgtttacacacctactttgttcaaagcatcagtggggctggagaggggcaggggcaggaagcgagtcatccaggactgcagtg

SEQ ID NO: 40344 - DNA, 1833 bp, Bovine  19866880634429
  misc_feature (1)..(1): n is a, c, g, or t
nttcttatggacagtaataatgttgattttatagctctacatctggaattttttgactatggaacagtttaaaataaatgaacaaaagaaaagatatttagggatgaactctactctccaggggtctgtctgtgtttcttctatttttccttgtttcgcaaacaagatgccacaaacagaaatcacattcatgcctggtcctcgctggcactgagcaggtttcccgcttctctgcacttatccacaaagccacctctttctctgcctgactctgaggctgcaagccatacaactgttctgatgtggacacaggatgcctgttatcctcctgatctagctcacttgattctagaaagtgcactttgtgtgtaaatctgttcaggctaaagcaggcattcctcatattttgttaataagcttgtcagctcattatgtgaaaaagaacttgctgagaaaagagcaattttgcgtaaattcgaccgagcttcagtcccccttaggccatgtgtagtttccatttactaggattagagttattttctcttgaccagtggaaatgaggactcctctgtcagaacagaccaggaacatactttctcgagctcttggaagtcactcctggcttactatctggaaatacacattgaggcaaagactgctacggtttaaaaataaaagaatgtagtttgatctaattttgctctttctttgattcatgagtctgtcatgaataaagttccatcctcagaacggcacctttttatgtctttccgggtagataaaaagggaaccatggctctgactgtatccacagcaacataactttttatatggcagcatatagattttgctttcagggccctctctcgggttgccaagtggaagatcatgagatggttttcattacaggatttttctgcagacgtttttcaggataaagcactaggaatctatatgacatcagaacttgcctttgcaatctagggagtgatgggggaatagtaatcatgtttgatttacaagtatgtcttaaaatgggtaacgaggagctggagttaatgagttctacctctccttctcagaattgcctcacttttccatatggccagaagactaacagcatcacatcaatttaggtgcaactgggggacaactggaacaacgaatgtatcccaccatcctgttgccctgcctaaggctttctggaattaacttcctattactctaattacaataatatgctattactatgagaagtgttgggaatgggtgctaagctgatttagttctctattaggcaagactatctggtcacctgagtaacaaaatggactaaaaatatgccacaaaaatttttcagaaagaaaggaaggggaaaacactccacttacctttgttcctggtaaccctggtaagcctggttctccctgaggaccaatgaaacctggttctccctttaaaaaaaatggacagatgagatcaccacatgtttgacagtaaatatgtgaactattgttcatccccggtgggtcagctgataaagaatccgtctacaatgtgggagacctgggttcaatccctgggttctatccttgggttgggaagatcccctggagaaaggaacggctacccactccactattctggcctggagaatctgcatagtccatggggtcgcaaagactgagtgactttcacttttcacttcactgggattttacttctttgattgtatacagcttttgctgagatccagatactaactataaaattaattagaattggttttgaccagtgacaacactttgagcaaaactttggagaagctctgaa

SEQ ID NO: 40345 - DNA, 2645 bp, Bovine  19866880676177
  misc_feature (1)..(1): n is a, c, g, or t
ntttctaggtagaagaaggtctgtaaaatgggtagactgatgaaagacccccttgggagagactggggtagaattgcaactaagaaaggctaggaaagggggctgtagccttctatgtaatattttcatttttttttttttttacaaataaatcgtatctgtatttatacagttcaaatttaagtccttttaaacaatcacagtattatgaggttaaaacatttatttcttgggatgctctatttagctaaccattaatattgccctgaaaaccagctagtcttcttcctgaggcttatttactcctgaggttcttttctcgcaaagcaatggaagagggagggtaaacagagcagaatttgaactaaatctcaacatggaacaacacaccaattatctctcctccaccctttcttggccctgagcctgctacttctcagtggccacccatctaccctgaaagaaacagagccctttgctgtgacccccttgttctaaggtgaggagactggtttgctcaagttagaatccattactctcaacgattaatcttgttctctacaagctcacttttagccctaccttgggagtgaggtgggggcagagggtggtcttctctgcaaacccctcctaagaatttcaacagagaaatagctattactttttcagagctgtttatttccattctctggaggattggtctctttaactgtattttcagtatttcagttctacacaagccagtttcttcagcttctctcctatcattgtctctccatctttttctctacctctctgtatttctgtcctcttccaatctcattccctctctcagtgttctctttatcttctgcaaagaatgttctaggaaggaaatttgggggatgataaatttcagtaataatactaattcttgtaaaaaaaaattacgaccagaaggtagattcagttttaatgaaatgctcttcttttaccttgcttttatgttgctccctttatctcttcatcaaggaaactatattccatcaagcctcagggtatgataaataacttacaaggatgctcgattgtacattattcttttgacagggtggctcacaacactgataggtattatctacattctttaaacggtttcctgcaggggtaaacccatgtacacccagaaatacaaaagcacacgtgaggattaactgtctagaggtggcttgtttggccccgtccttatttccttgcaaaaggttgcttaaaaaatgcaactacattcagaaaggaataattaactgagaaacagatgccagtggtctgcctggctctggagccttcctggatggcccatctctcggggtgtgcagcccttcacgggctccaagaagaaaggcaacgtgctggctgggagtgacatgaatgcacgtctcctggccgtacttaaagaaacctttttgccaaaatgcttttccaaaagagtgggagttccataaagtgacacttttccctttgacctcgaaccttttggcatttttgtttacatctgctcaggcagacataggaccagggcttatcagtccagcacttgctgacactgctaaaccatgaaacgaggctctggtaaaattatgactttttatacctgacaggcggtgacctgtagaaagctctgcgttctggcagaaacacaaaatcaattgagtttcatctaaaccattctttggctttcaagaccctttgataaatctcagatggaaattcttcagtcccacagaagctcagaagggcaaccgtacactttgattcttgattttatcatgtaattgaggtggcatttttattgatcagttgctcagtggatcagtgggtttatcaacctgaatttctagtcaaataacttgataggacttcatttaaaaacaattttactgtctgcaaccaggctccccctgggcagtgaccataaattactgaagtcagcattttactacaaagcctgcacaggagcaggacaaagatccaatcaagttggggaagttggaaaccttaacatctacttcctgcaccaattggcttctttgcttgagggaagaaggagggagtaaattaatccactctccacactccagcaagagatctttctaaaatacaaatctttctaaagatatttctaaaatacaaatcctatcacatctatatcacacgtgctgctgctcctgctaacttgcttcagtcatgtccgactctgtgcgaccccatagacggcagtccaccaggctcctctgtccctggaattctccaggcaagaacactggagtgggttgcggtttccttctccgatgcatgaaagtgaaaagtgaaagtgaagttgctcagtcgtgccctacccttagcgaccccatggactgcagccctccaggctcctccgtccatgggatgttccaggcaagagtactggagtgaggtgccattgtcttctcccatatcctgcataaaacccactcttggtataaaaaacaaaagactcatcctagcctaccccatcctcccagctctgcctgcctttctaggctcatctgttgcccctcacggtgaaagctctgctacctgaactctacagctgaaggaagtcaccagcctccctctacttctcggcc

SEQ ID NO: 40346 - DNA, 1180 bp, Bovine  19866880704212
  misc_feature (1)..(1): n is a, c, g, or t
nactttggtagatgataaactatttataagacacaaatactgtgtaaaaccaaacatgcagtataaaataataaaaaatcagtacgtcaaactatgtaataagtttacaattgcttgaaatatgtaagcataaatttaagagactagaaggaaacaggacgaaatgaaaacagttatagagtgataggattatggatgcaatgttttgcttccttttacgttaaaagattattttaacaaaacataaaatcaaaggaaaaaaaggatcaagttttagtccctcgatgttcatattttaagaaggatgttatgcagatacctaagcatttgtctcccgtgcttcaaaatctcagcatgtatttcgtctggttccaggggcttaaccattaaaaaaaaaataattctggctaccatagttattctttgaaagtctaaacaaagtttgtattgttccctggcagcatttcttgtttgcattaaaccatgagttatgatattagtgcatcctgttgtaggttctttgaagaagcagactccgtagctctttttatggttacacagtaaatgagagtcctctttaggggtgtattccatttcctatggagttcttacccttgtgtgcgctcagtcacctcagttgtgtctgactctttgcgaccccatggactgtgtgatccaccagactcctccatggaattttccaggcaagaatactgaagcaagttgccatctcctcctccaggggatcttctattcttacccttagtgaaactgagtgaagtcgctcagtcgtgcccgactctttgcgaccccatggatagcagcctgcaccaagctcctccgtccatgggattttcaaggcaagagtactggagtgggttgccatttccttctccagggaatcttcccaacccagggatcgaacccaggtctctcacgttgtagacagacgctttaccgtctgagccacctacaaagggcatatcaaaattttcttataatggccatcattattctaagtcaacatgtttgccattttcttgaagaaaatgcaaatgattgcaatgtaactttatagaggaagaagaatttcttccatgagttaagacattagcaattatagtacaataacccagtgtaatcgtaaaacatttttgcccttttagaaagacactatatg

SEQ ID NO: 40347 - DNA, 1493 bp, Bovine  19866880712832
  misc_feature (1)..(1): n is a, c, g, or t
nctctggcagcttctcctaaaatccgggaaggagatgcacctctgcgttagagtgagtggggatcacagctctcttgaatggagagtttcttacaacattccgtgttcctctcctacactcgctaacccaatttgggcctctagctgagggaatccaaaactgtaaagccaattcttaatttttttttttcctttagatcatctgtaagtgatgatctggtatctctcttgggaatttctatattttcctcattcaaaactttaatgttaacagccagcacaggagaacagcaactttttgtgccctcaacttacttatgaatatttcaggacttgttattaaaggttataaatcttcctcaggcctcttctttcaggagctaaatgagcccaattctcagagggtcatttctccaaggtcctttaataattttgatttttctcctctaatttctctagttttattacgtttcaaataatttgtgcatcagagaaatgaacatgcaagatgtgtgcgtgactttgacagttttatttttctttcacttccaattcttcgtaggtagaagtttcatatattttaaaccctgcacgttacagaagggtgtacaagtgacagcttccttacatccttgtcccaagccccccagcaccatcccccactcccaggaaggagtataagtaggtccctgagaatccttccagtgacactctgtgtatacacaagcgatcgtgtatttataatctgtctcccactcaccctcacacttttccctttgcttttgcctcttataagaatatcttcaagatcctctagatcagaaaacaatttcctcattttcttctgtagctacactatagtcctttggctggatgtcccagactttaactcattccctactcttttttattaattaaaaaaaaaattagttatttttaattgaagggtaattctttacagaattgtgttggtatctgccaaacatcagcatgaatcagccatgggtttacccatgactagttccttactcttgaacattccaaagtctatcacaaataatgctgcgatgaataatctaaatacatcatttagctcatatttgaatatacctactggataaattcctagaaataaaattgctggtcaaagaaggcatgcagttatagttctaaagatgctgtcaaattgttttgcatcagaatggcaccagttatacccttcccagcaatacaggagagtgcccatctatacagactcgcctccatgccatgctgccaaactctttaatcattgacaatccaaatggtgacatattgaatctcagttgagtgaggctgagcaaataacttccctacacttcagtcacttgtattttcttattttgtgaactgtcttgcacatgatatttgaatgcttacctggacaggtctggaaatggggaaggattacttcattggccacacagggaatagtaggggatgctgtcacagag

SEQ ID NO: 40348 - DNA, 3181 bp, Bovine  19866880747266
  misc_feature (1)..(1): n is a, c, g, or t
ntgtgtgactccgagcaagtcacatcatctctttgagccctggtgtcctggtcttcagatgacacggaaataaggccagatgacttcaagggtatctcctggagtcaaagtgtaacttttgaaactacttaaagaaatggagaagaggatgaggcacaaataatatacaataatatacacggaagcttggagtaagcttatacagtcctttgcggcactgttaaactttagtgcctgaatattattaatatgttgcagtgttctgcatgggcttcccaggtcgtgctagtggttaagaacccacctgccaatgcagaagatataagagatgtgggttcaatccctgggtcgggaagatcccctggaggaggtcttggcaacccacgccagtgttcttgcctggagaatcccatggacagaggagcctggtgtgctgtggtccgtagggctgaaaagagctgcacacgactgaagtgacttagcatgtgctgcagtgttaagtgtatgtgtgcgattcaaaccccaaccacgggactgcccgctgcactgactgtagaaatggaatgagaaggaagaggggaactgaagtcctgggatttatacatgacatcttgcagtgggaatcaggcttacttgtatttaaagcaaataagtcgtacttaaaatggaaaacaaccttgttgatctttgaatatctgtggtggagagtagctctagttggtttgctctctcaggagctgtctccccccggcctgtagagttggtctgaaccctcagccactcactggcttttgtgtctttcacaagttctgccatgcaccaaacacaggcttggcggtttcctttgggttttctagagttattcttactagtgaggcagaaagacctctcttcccaactacacttttggccgtagattgcggtttttttgtatgtggttttcttcccctgctgttagactaaatgcccctctatattctctatacttgctggaggtgctgaatggcacccttcacacatgcatcccagtttccctgcagtagggagcccttgctgctctggagcgactctacgccttcagatggaatgccctgctcagcagtctcttcagggtcgatcagaaaatctccatgacaccaagttcgagtttgcagaggtgtctgccagggctgggggcttccccactgactcaagcagtaaagaatctgcctgcaatgcaggagatttaggttcgatccttggtcaggaagataccctggagaaggcaatggcaacccactccagtattcttgcctggataatcccatggacagaggaacctggtgggccacagtccaggaagtcacaaagacttggacacgactgagtgactgagctcacacacactgccagggctgctgctctcccccatcttcctgatccccagcatagccaccaggaaaagccacatcattaccacttgttccagtgtcaaatcctacatgaccgaggacagcccccagccctgaatttcagagaagttttatccagtgatttagtatttgatgttttcttcttgcttgattttctctttcggaaaatccagatactgaagaaggtctcacattttttcatatggaaagagatttctctggtttgtgattaaagatatttatttcttaaaactcagtgctttaaagctgaaatcccggtgttctacagcactgatgtaagtctgtcacttgactgcaccactttgaaagtaaaagctctaaggacatggtgaattaagcaggtagaaccataaaaactactttcacccaatttaattgaattggaatagagaatatgggcagttggaggaagatggagaattgtgcttagagcccttctgattgttagtgacagagactccattcttctacagcttagtagcaaagatgtggttgtgatgaactgccataaccagatcacaggaaggggaccagggagctggcctcagtgtcatctggatcaggtgccaggagcgccatcaggaatctgtctcctcctgcacttctctcatcttggcttccacttcaggcctttggcttgcttggggacttgaagacaggtagctccagggctccatccttgtgactagagttccaaaggggaaagagaaatatccctgccagctaccatttggaaaatctgagacagcctggggttggccctggctgggtcccgtgttcaccgccggctcatccctgcggtcaggcgggtgaagagctctgagtggctgccacacaagaattacaggacaagtggttgctggagtggtgaggagaggggagcagttacctaagcaagagtggtggcagttgcgatcactgagagaagaaggaaagggttctagaaatcccgaagcaactgttaaacccaaaagcacgtgcggaatttagcctacgaccttgctgggaaccatagaatcatggacgattgaaatggatggttctgtcctccaagtgtagaagctgaggtgcagaaaggtctaatgatctgcctaaggctacgaacaacagatacccactctgtaggtgcaaggactgtttgcagcgttactctacagcttgagcttaatttccagctaaacgtttcatccaaaatccatgcttaataaatttgagtttctgctccaaactcaagaagtcacagaagtgtaaagcaggcaatatggtagttagttaacattcactggactttcattttctcacctgtagagacatgactagtctctggcagcgggaatgatttagctaataaaatctcagaatcttgaattaaaacacaaaacagaaatataggtgaaccctttggaaaaggtaagctgaagtatttaaattatataataattaaacccttgattaacactgacattacctcagtaacttacatttatttcaaagttatactcacgtgtcctgccctggcaggtagattctttatcactgagctaccagggaagccctgactgttctatattgctgctgctgccgctaacgtcactttggttgtgtccaactctgtgcaaccccatagatggcagcccaccaggctcccccgtccctgggattctccaggcaagaacactggagtgggtttccatttccttctctgatgcatgaaagtgaaaagtcaaagtgaagtcgctcagtcgtgt

SEQ ID NO: 40349 - DNA, 1651 bp, Bovine  19866880776093
  misc_feature (1)..(1): n is a, c, g, or t
nacacataggagattctactggagtcctgaaaacttttttagaaaaataggaattggagctggcccatgaaccacatcatcactccgatggtaaagaatctgcctgcaacgcaggagagctgggtttgatccctggttgacaatattccctggagaaggaaatggctacctactccagtattcttgcctggaaaattctggacagaggagcctggggctacagtccatggagtcacaaagagtcggacacgactgagcaactaacacccacatgaaccaccccagaccaggaataactgagaattctgttttgtatagccttaagttagctgccttggccttgctgagaaaaggctgatcctcaggggttgtagtacaaatggagctaggaaaactgagcagatgatggaacctggggagtggtgccaagccagaaacaagccagcaatcacaggcaatcacttaaggcaaagggctagagacactgtgggaaatggctgcaagcagtggaactggggacatcagacagaatcctacggacagtcccaggacagcacgggggggctgtgtttgtgacagccgcccattgccaagtgcaatgacattgctctcagtggccacacagcagatgtggacggaataacttggattaaccaaattatttgttttattgttatttagggactggacttcaaaacccacgattggttgctcaacctaaaaaaaaaaaaaaattgacctcctgccactccataaataatcagcacccgtgtgatactaaacaggaaatgaaaacgcttggctcatccctggagggatgccatggatgtgtactgtcagggctgctgttacaacatggatcgttgactcgtggccagatgccctggttggttactgtgccctcggggataggaaataaggtacagtaccgacaaggagtcgacttttagcacttaaccagctgaaaggaatcctcgtgggaggtaaactattgtctctgagcgctttcagcactcgatctgatatctgctttatttttgtatcatgttttccaagtcgaacattgttttagtgtggatctggtgggaatatgttcccactaaaccatgggccaatttttcctcctacaggtacattctttgactttgatatatcagtcaatatatttgtcttatacagaacactatttccatgtaaccagctcttcctttttagctccctttcaaataatagcagcagttgctaggtatttagtgttttctatgtgtcagagcctgttctaaggtctttacgtggattatcttattttagtcttactaaagcttgaataaccaagtgctctgatcctcatttttcaaatgaggcaactaagtgatttgcccaatgacatgtcattaaaagatatttgccttgagatctttgttaacttaaaatctacaaatgtgggagtatggagtacttcctaaaaggctgcgtgcatagaattgttgtttctttactactgacacctggagtttgcttgtttttttctgaggcaaggaggagctgtgttgactcacctcccgcatccgccattccatcacttaacaggtgtcattggtgctcccaaattgtcccatctgaactctgggcccagatatccagtgcagaa

SEQ ID NO: 40350 - DNA, 1676 bp, Bovine  19866880783683
  misc_feature (1)..(1): n is a, c, g, or t
nagctgattttaaatttctatagctgcattttaacacgtgaaaacaggtaaaattaattttatttaaccctaagatatctaagctactatcatttcaacatgtaatcaatatagagatgtcttgtgttctttttctactcagtctttgaaatctgatgtctatcttacaatgcaccttggtttggactagccacagttaaagtgctcaacagccacctgtagccagtggcgactatccttatcagcggagagctaggtgaatacagtttatgtcaactcagtaagcggaagttgacccttcaggcatgtgcctggcagaggcaggaaacaccaggagaccagactcctgaggagtggcagtcaggagcgaagcaccttgagaacggatgccaccttcttacccccagggtggggcccagagcctcggcccaaagagggacaactggcagaagtgtgcggggtaaaaagtgcaggtcatctggatccgcgcactctgtccttgcttccccttggccctcttcaaatcccgcctgaccagaccctcgtcataacatgctcctctctatcacgaccagtgaggacatgtgaaggagagcttaacctgctgtgatacatactgctcagatttctttagggagaacataaaatgatctcctcccctgctcctctgatttttaaaagatgactagattttaagaagatgcaaacccaaatcacaatgagataccactttatacctcctatgatggctgttacaaaaataacaataataattgtaggccatgacgtggagaaattggaacctccttgtacattacttgtaggaatgtaaaatggtccagccattgaggatgacagtttggcagttccccaaaaagctaaacctaggattgctgtatgacccagtgattgcactgctaggcatatacgtgaaagaactgaaaagaggagcctgaacagacagtacactcatggtcactagggcactattcacaatagccaaaaggtgaaaagaaccaacaatatggctatttacgtctcctgttctgttatcagtccccgtggaatatttaatgattatgttattatgctggcctaaagttaggcctgttttattggcctcaagtttcaattcaaacatttaaaaagcaaacaaaggccagaaccctctcacaaatgtgaagtggtcagagaactggtcttgaagataatgatgacaagaaatcaccttggggttttctgcaaacttcttcttggccactttccgaagactttcctcaattccctttctagatttttccaggatgtcctctgtttggtccaccaacactactgtgtggccagttgctgcagcaacctagaacaaaacaaaaaccaaaaaaaagcaagaaaaaataaaaattaaaaaaaattagtagacaggaattctctgcagtccagtggtcaggacttggcactctcacagctagggcctgggttcagttcctagttggggaactaagatcctgcaagccgctcagcgccaaacaaacaaataaaacccagtagagttgcatattctacatgaactccagcactattctactcaaaataccacataaacataacaataagccaacagaaattaaacacacacttctcctcaggcactgcttttaagtccttaacatggatga

SEQ ID NO: 40351 - DNA, 888 bp, Bovine  19866880788892
  misc_feature (1)..(1): n is a, c, g, or t
nctgatagatgagaaaagggagaggacagacagaaagaaatctcttataaaaggattcagactcaaagtttaggaagatgctagaatgtgtgcaaatgcttattttcttattctcaccaggcaccctgggtggggggcctgagaagagaagcattcctgtggtttcctcggggtcactgcagtgaccagaagtggccacagaccccagagctaaggcctgacatccacaacaggaatgtgtccttccctggggcctctgggacttgacatacaagcgtttccagaaagtaaatgttgtaattactgcaacagatgagtgaagctttcactggtttctgaagagcatttgctgtgaaagtctcctcggggaggcaatggagaggtggggccacgggcacttctctttattagcagtcgacagtaaatggtttccagggctgaagtaccgaaaagcaccagaatcctggcttctccacttatttattgtgtgagtcaaggtaactccttgagcctgttttcttgttcctcaggattgtcatgagcattatatgtcaaaaaacatttgaagtgtttggcagaattgctgggccatggtaggcaattaacgagtcattgcaattattttcatagatgtgcataaaaaggataaggatatatgtgttgatggataccagtttttctggctgtcatcttgacaagtttcctacttatggaaactttaagtttccacacccatcgtccagattttctatatagaagttatgcattaaaagcttttctacacttccctgggggtgccacagataagaaaccacttgccaatgcaggggacatgggttctatccctgatccaggaggatcccatatgcggatgggcaactaagccag

SEQ ID NO: 40352 - DNA, 1361 bp, Bovine  19866880815678
  misc_feature (1)..(1): n is a, c, g, or t
nattaatttgagagcatttctcttgaaatctgtatttcattaatgttttaccctgagatgctcctgtttcttctcagatcaccctgtttattgtgtacatgcctggtgctgggttctggaatctttattatatgtgaggtgggaggagtaagtccctttaaccttgaaagttctacactttatatactacatgatactcaaaagaaagtttaggttgaatgcctttgtatatccctgctccacccaaagctccctgtgccatgagagagagatttatcctgggcaggtataaaatactatatttgcttaaaaacctgtaaacagcatcttagtggcaagatattagagccttgctgctgctgctgctgctatgttgcttcagtcgtgtccgactctgtgcgaccccatagatagcagcccacaaggctctgtcctccctgggattctccaggcaagaacactggggtgggttgccatttccttctcctatacatgaaagtgaaaagtgaaagtgaagtcactcagtcgtgtccaactcttagctaccccttggactgcagtccaccaggctcctccgtccatggggttttccgggcaagagtactggagtggggtgccatcgccttctctgattagagccttaagctcccaataacaatacaggaaatgggttagaaactacagttgatggtcccgtcaagacatcagtggaagaggattagaagctaagttgcaagtgtcacttcagcttttgtacaaattcaagttgctccgttcttggaatgttgtatccattattggccaaaaaagagtgttatgtagtacaaaaatgcacacaggtagaaccttaaattataagtatgatgttggggctttcatctgagaaagaagggaggagcttgtgcagttcagacttgtagatcacatccttgcatagttggaccaaggtgtgccttttgaaacctaaggtgttaaaaagaaagctgtttacccctcagaatggaaatataatggaactgtcattcaagaagttgataaagaccaaagatttaagtaattctgtccttacataacaaggtttaaaagagcctcagccactgtgggtggcagttttaatcctgtggaggggaaccaccctttgctgaagaatatctctgtgccactttctgccagtcggttggctttgatctgtttttgcactctaccctagatcatgccatttgaggcagtggtgcctcattctttatgctccttgacctacagcttttggtactggctaaatctgttttgcttatttggtgccatagacttcttagttgctacatcttgactgtagattgtattcagttcactgtggggag

SEQ ID NO: 40353 - DNA, 940 bp, Bovine  19866880832804
  misc_feature (1)..(1): n is a, c, g, or t
ngaagttattggaaaagctgatcccaagtctggggaaggagatacaataaaagcctggcatgccttgtgatactggatagcaaagaagctctctaagacagatagggtcatgtgcaatggacttgagaaccaacttgaagacaaggttcccactgaccaatctaaacttcagaatggataagaattgtaaaggcttgaaatccatcaaataccttgaaatctgtgcattcataattttatatgtatggaaggcactagttggccaccttttgaagatagcaggtaccaattcaattatttaaaaactggatagataaaagggaaaaaatctgcttctcctttgtgaaccataccactaggttatctccttataaaattattacagctaacaaatgaaaacaaaataataaaattagaatgtcacaatcttgtaactcctaataaatgaatagatccaggcattgagtcagtggctgcttacatcaaaaaggaatgaaaaccagacattgggtgcctttttaaggaagaacacagcacaaattgaactttgccaaactgaatctgatctactctctgtattcagctgctagtttacaggagataccaaggacagaagaacaaaatgaactaaaccaagggtagatcagtaaaatccagcccatgggaaacactactgttaaagagcctaagacttttttcaagagggaaattataaggaattaagaaacggcatggaagttaagtggtaggttaaaagaggttgaaaatatatatcagattttgaagaatggacaagattaaatgacagtgtctcaggacggacacttggatgataaaatcagaaggagctacaggaaattgttgctcttaatctcaggatagtggttgcttctgaagggaggaaggagctgtgatgggctgctgggctgagggactgctg

SEQ ID NO: 40354 - DNA, 1854 bp, Bovine  19866880841830
  misc_feature (1)..(1): n is a, c, g, or t
ntgtttcgaactcgctagagctcttagtgtcgctgtttcaggggggcctgttgaatttgcctgaggtaaactaaaacggaaagtaccgactctcttaaataatttcagttatttcttgtagcttctgcagcttacgattgttccagcggagcgggtgggagtggtgaaaggtatgtagtacttctgattatcttccaatcagagggaccaagataggggctttataatactggcagggctgtgtgccaagatgtaatcaaataggaaactgggtgccaatggtaattttttgaaatgtgcttttatgacatccttctccaagatgaaagcagtgttccctaaaacaaacaaacagcgtcggactggggctaaagctctgatatgaaatttatttatgtttcaccaaacccaacttgaaagtaattgtatatgatttgaaacttttaattgttcttgttgtttctctctgcaaataaggaaatcctggctttctgtaaaaaaaacaactctagatcctgactattggtttcttttcaaggttttgccacactaattgctttctgtttgattctgtgcccttctgaaattgaaggttgcctcgaggcaggagaaaagctgtggtggtgacttgtgggtttggggactgggggaacccacagtggtggctgcaagccagcctcattatcccccggcttgggggggggccaaccagggggcccgttttcctgcttcagatctgggcctttgactggaagggttagaatctcaaagctttctctttgcattatttatcatttctgactgataacagcaccactctcttctaggaaccaaacactggtcattatggtttggttttaatgtggtatcatgtattgtatttcactgttcttcaaccgcagatgtacaaactgaggatatgttaaaggatctgcgtttcacaggaaacagacatttcacttcttttcagcaatgatatgatattattgcttctacaccaacggactcctactattactatatgattgcttcctttaaatctgactaaactggagtggtgaaagttggagtgactttattggcttctgagaacatgtatgcattcaatgaagtcagaaacaatttcatccatgtgtgccccgatggctttgtaaatagggtttcagaatcataattcaaagtatcaataaaggaattgcttagttatccagaaaggtttactctataaggcacataggtatccttgctgaatgaaaacttgacccaaagtggagtcaacagggaaggctgtgggtcagactgcttggattcaaatcccagttctgtcactcacccgccaggaaacttggctgggacatttctctgtgcttcgatctgtcctgtgccacctgagggttttaatggtgtctgggacttggcggtttttaacacatactggtgcttagaacagtgccgggcacctggtggtgacttaataaatgccaatgacgatgattaatatttcccaaaaatgttagtgcttttgaaattgtacccattaaatattacttggcgttttccttcagactctgggtcatcactggggacttcagtgatggcaaagtgatgcgctctgggccccaagcaagctaaccacctgccctccagggggcactgctgttgcctcgagcctttagcagatatcttccttctgcccgccatcgccccatcgcctgcccattactttgtgggcctgttggagaaggtggggtgttctttgtcttctcccacacagcttgctcgatttctgctctcactgctcccctcccacacaatccaagccagttaaaccactaatctcccacccatgcttcc

SEQ ID NO: 40355 - DNA, 924 bp, Bovine  19866880930416
  misc_feature (1)..(1): n is a, c, g, or t
ngccagcaggtttctccccgaatccctccacttaccagcaggcccatggcttgagccaggaggaagctgacccattttttagtccttcccagaaccgcatcctcagaggctgccagcaggtacgacagcccgagttactgccagctgcgagtgggtcatttctgggaatgctgctgtgggggtggctctcagggtccctaagtggcacccacttggtgtccacaggaggtgtgggttttattggctatgatgtcagagccgtctttacctgcagggaccagcctgggtggcaaccaagctggctttctcggagtgttttccaaccccggacagaaaggtggctgttgagcgggtgcagctctgaccgctccggctgaggtgcctctttgtctgacgtgattcctgtgccggggatggagaccacacgctcatttcacggatgtcatgtactgtcagctgtggtccactctgcatccaagattttatgaactgggcacttgagggaggccacgtggtatactggtaatgaacatggtctctagagccaggcgtcctgcatctgaacctggctttgccactggccggctttgggcctctgggaaagttacttaccttctctgtacttcattttcctccttcccaaaaggcagataatggcatctataaagtgttgtacttggctaagtgtgatttactgtaattattgtgtgctacatgggtagggtggtctgatggtagggtttccagtttgggaaagtactgtgggcttcctcctgtgtgggtgctgactacagacaggagagttgtcttctcaaatccatccttgatattttgtacccaccaccccgcccttgcttccagtacctgctcattccatcttttacctttgctccctgccggggatgtgtaacggaatcagtagat

SEQ ID NO: 40356 - DNA, 2674 bp, Bovine  19866880960000
  misc_feature (1)..(1): n is a, c, g, or t
ntgtatagagtctctcttgtgttgttggaagacggtgtttctatgaccgtgtgttctcttggcaaaactctgttagcctttgccctgcttcattttgtactccaaggccaaacttgcctgttactccagatattgcttggcttcctacttttgaatcccagtcccctatgatgaaaaggacatcttttttctggtgttagttttagaaggtcttcatagaaccaatcatcttcagcttttttggcactagtggttggcacatagatttggattattgtgatattgaatggtttgccttggaaacaaacagagatcattttgtagtttttgaggttgcatccaaatactgcatttcagactcttttgtggctctttgtggctgccctaaactggcaggaagctgggcctctgcacccccacatcagccagtctttggtctggtggctccctgaccgtgagcgaggcagtctcttgaagctgagagcaatgtccaatgacccagctaatatccttagtccagaagagaggatttgcatagagcatctcagtgtccactcaagttcccttccagtttttccaggccagttattgaggtgagaaagcaggtgagtgaccaagggcagattccctgtccatgcagacctatgtcagactgtgagacctgtaattccatcctgttcacatttgtcaccacgccaaatgggaggctctggttttacccctccctttgctgactctcacatagctgcttctcccctgaccttgtcatagttccttctctccttcccagtcccttcccttttcatcccttggaaagtctttcatctctgtaccagtccttgagatgaagtctggggcagagagtcaaatgtggtctttgaatgaatgaacaactgaatgcatttacttggaatatattccatttctggaaagactttcccagcagttgagtgtaacagaaggtgggggccgttagtgcactgcagtgaacttggtggacttcacctatctttccatgcccacctccactccagtagataagaaccgtggtctcactgtcacagttttcccttatcgtacttcacctagttctataacatgacttttctcctctttcaatctgtatttgcatttttttctctatcagacttgccagagacatggcactgttattaaacacttcaaagaacctcatttgcttttattaatcttttagttttttgtccattaatttctgtgtacacttactaaatatctccagttacatattgtactggttttttttttttttttttaatagtagttttatttatgtatttatttttggctgtgctgagtcttcgttgttgcacgggcttttctctagttgcagcaagtggggcccctctctagttgaggtgtgcaggcttttcactgcagtggcctcgcctctttcagatcgtgggctctagggcttgcgggcttcagtagttgtggctcctgggctctagagcacaggttcagtagctgtggcccacaggcttttttgctctgaggcatgtgggatcttccaggaccagggatcaaacccatgtttcctgcattgacatgtggtttctcaccactgagccaccaggcaagtcctgtacttttaaaaaaaaaaaaaaaatctatttatttatttggctgtatccagtcttagttgcagcactcgagattgtcagtcttcattggggtatgtgggatctcttttagttgtggcctgtgggatctagttccctgaccaagggttgaacctgggccccctgcaatgggtgctcagtcttagccactggaccaccagggatgtccccgcagtgtattcttatcactgtatctctaggcccttcttctggttattgtttgctgcataacaagccatctcaaacttagtggcataaaataacatcactgtattacacttacggagtccatgggtcaaacatttctgcatggcatagtgggaattatttgtctttgctacaagatgacaggggtgcttcagttgggggtgacttgaacagttgcagactagagtcatctgaagactttttaagttaattcctgggtcgggatacctcaaaaacccagctcagcctgagaccaccaatcagagcacctctacacaacatctctggggcttggattctcacatacatggcagctgagagagagcgtctttagagggagcgtatagaaagcaagcagtctaagagaacctgtagaagctgcatggccttttataatctagccttcagagcaacatagcatcatttccaccgtattctattgaccaaagctgttatgagcccccagatccaaagggggtggacatatattcttacctcttgatggatagaaaaagtgaaagtgttagtcactcagctgtgttcaactctttgcaaccccatagactgtagccctccaggctcctctgtccatgagattctccaggcaagaatactggagtaggttaccatgccctcctcccggggatcttcctgacccaggggttgaacccataactcatgtctcctgcattggcaggtgggttctttaccacctggggagccctgatggatagcaattttgggattctattttaaagctactacagtttcctacactcttaatatttattatccttttctttttc

SEQ ID NO: 40357 - DNA, 1371 bp, Bovine  19866881013968
  misc_feature (1)..(1): n is a, c, g, or t
ncctgggtcttaggccccggtccctgatcctcagcagtccccaccctctccctaggaaaacaatgcagtgttaaaccctcaaagcctctcagctccgttgttacggtaattgtgtttactcttttccaaacaaagtcattagaatcagaaaagtaaacgtgctcagtcctcagttctttgatgtcatcttcctccttgctcccagtgtgggactccgcagcccaaggcaccatggcccagagcctgatacacaaattccataagtacacaaagcctgatgcacaaattctataagcattgccatagctacaccatactgcttgtgatcgtgatgcaaaacaaacaaaacataaggaaaaactaatctgaaataaaaaaacacaagctatggggattattctgccctttgaacacctacagagattatgaaactgtggagtgttttaaaatttcagaacaatttttcagcatgaccaagtcccagatacaagaaacattctctttcctgaaaataatatctgatcaaggcaaatggtatgttgaaacagtaagaaccagtgtctgtgccacctgagcctatcagatgctttccctctaggtgacccttgttaatcacctcagctctaaatatgattttaggatttcaggttcctaagactgcaaaagctggtggctgtgtagtcatgctgactggatctacgcaggggaaagatagagccatccctgccctatcagatgaattattcgactcatccagataaagcactctggtcaatgggacacctacgggctcctccactccaaacctcccagggatcagtcagttctcactttgtggggtcctgagtctactctcctggagcttcggctgcttcttttgttgtttctccctttttaacactccctttcacctcaattccttatagcaaaaagtttgaagttggaagggatttaagaaggaaaaaaaatagaaaacaatccaaaagaaatttgctagaatatcttttgctcatttaacaccctgaggttaagcttctctaacggcatgtaaatccttgggctttttttcattactttatgtacttgcaataaaaacattccttcagatgttagaaattctaactaaaacaagaacaaagagtgttccttcttttcagctctccacccaaagttatcattgtaaatcaaggtaagaaagtaaattaactactggcatttaaatgtttgctgtcccaaatatttattctttcccactcccccaaatttgtttcatacaaaacaatgctcataaaaacaataaatattcattctttatctaccaaaatttttagatcaaagtcctgtgggcccaaatccgaatagcaaaaagta

SEQ ID NO: 40358 - DNA, 703 bp, Bovine  19866881016174
  misc_feature (1)..(1): n is a, c, g, or t
natcaggagtaattatcctagtaactcttaattctctctatggttagtaattctttacaccctatcattacaacctccacccaaagaaacttatgaactaaaaaaaagcgagggggggaaaatcacacttttttagacaatgatatgctctccttgctagatttccccctattttataattaccagctcccctctaacagcagagctcgcacagctcctatagcccttggcgtttattaagtagagcaccattatcaaagccacacgcctttctctacacacctctgcacagacatctatgcatataaatgtgtaaaaggttaaaaaaaaaaagtttccatgcttttcaagtcttaatgatacagtgtgccaagtacacagaatgagcttctcaaatataaggaatttagagtgctagaggaagtgaggggtgggtgggtgtaagggatgttattattataaacccctttaaatatggaagcaaaaatctcaacactcaaatgctaaaatgaatgcatttcaactctacttgagaataactgtttcgagttccctttcagaagtctcataagaagcataatttaaacgatctacaaagatattttcttagggtagttaaaaggagtaaagcattacagaaatcttctgcaaatacatatatatatatatatatatattatacacacacgcacattttacgtgc

SEQ ID NO: 40359 - DNA, 1224 bp, Bovine  19866881118873
  misc_feature (1)..(1): n is a, c, g, or t
ntctacctttggagagaattgtcctgttcagataaaagtagaatgtgaagatgcagaaaagtgtggatgtactggaaagggaaggtggaggagttctttccgatgacttcactgaggttgtagatatctcatcttccaagacagcaggtgtgggggttcagggccttgcagagagcagagagttttgaacagctgctgtcgagagtgggatagggagccgacacgtgtccgcacgacagcagggaagaagattgtcagaggcccaccagaaacacgaatgaaagggtcattccatatgcatctgtagttcattaagaagactgtagcttcctaaaaggttctcatgcgattcacatctgcctctgctataggtttaaaaagtcggtcagtgctgcctggaagtcagcctccccaccctgtctgacaaacactcctcagatggaccgccctccagcccacctccagggccagtgagacgccggagctgtcacactcacagagacccattgtggcatgtcagaacccaccgaaaatgttcctcctgtgcattatttatgacttttctgcatttatataatatccagcttcctgaaagtaatttgttttggattgtgtagtgctgggcagcacatcaaaggtatgctaagcagtggtaataaaacattgaggtttatggtcactgaggtattaaatatcgctcataaattacagggtgagtattttaaatgagctatggctcagagaacagtaggcgccccctcatagcacatattaagtgttggtgcctagcttattaattatcaatagtttccaaggctttgttgctgttgttttcgtgaagagccaatctcctgccctttctacagctctgtgagtgtgtgtgagtgagtatgttgtatgcatgggctggcaataagcgtaataagaaatgtgagggtactctaggatactgtggagtctgatagcccttcatttaagaatcgagtatccctccatttgaacccctgccactgtggttgctgtctcctaaccaggcatgctgcttactgctgccgactccaagggcaaagtcagaagaaccctacagctttgtttcacttcaggttctgatcagtttgaatttttggttctaaggctctgtccctgtgattcccaccctttcctgccaaattgcgtcctgctgacaacgaattaactttcacagactccatttcagccggaatc

SEQ ID NO: 40360 - DNA, 941 bp, Bovine  19866881162207
  misc_feature (1)..(1): n is a, c, g, or t
ngaactctaaatcccatagccataaacctaatttaaattttaatgttactttaaaaaatcacatagttatctgggatagattcatggatgatacattaatatcaatattttatttatattgtatttgaagttttagatataacaaaccctagcaagcatttgaaaaatacatgaaacaagatcatccgatacttatcttttgctttggaaacaatccgtatgattctgggtcctcagaaaaattctagcctgcttagacaaaataatttgttcttaatcctgaaactctaatgttaattttatggtaacagagataaggatgtgaactaagggttgcacaaagcagacctgtaatgtcccctaattatccctagccctcttctcctatggcatttgcacagtgctgggcaccgcttgctattcaaatacattgttattatgatgatttattcctaatgcaaaaatgtggaaacagtagaaaaattcagggttctaataacatgttaagagtggagatgtttaaagttctgagatatacatatatatatgtatatacatacaaaaaattacagccagccatttattgtgttgagcattatttagtctaaaaatatttttatcacaaaattattttgaagcccactttccagtatatctgagaagcagagtttaattgacaaacattcagttatatgggcttcccaggtggcacagtggtaaagaatctgtctgccaatgctggagatgcaagagatgcagggtcaatccctgggtctggaagatcccctggagtaggaaatggcaacccactacagtattcttgcctggaaaactcatgggctgagagcctggttgggttatagtctatggggtcacatagagttgagtacgattgagcatgtacacatgcagagatacatatgtgtgtgagagagaggggg

SEQ ID NO: 40361 - DNA, 1719 bp, Bovine  19866881399300
  misc_feature (1)..(1): n is a, c, g, or t
ntcataaaatgtgttgtggcttccccctccctctttctctctctggctttctctctcatcacttatcccagagaagcctgctgccatgctgtgagggcactcaagcagtcccacagaggcatccacagggtgaagaacaaaggccttctgccaacagccagtagaaacttgccaggtacacatgtgagccaccttcagatgactgcagccctggctgacatctggactgtagcctcatgagatgctctgagccaaaactaccctgctaagtcactccccagtttttgacccacaaaggctggatgagataatatctcttcctttaagcgactaagttttagagtgattttagcacagtgataaatacctaacaaattggggcactgggcctctctgctcctcaccactgcctccccagggccatctgccactggtgagcagccccagcagctcagagcctatctgtgggagtgtggcacggcactcccttccaaggtgagagcccagtgaccacagacacccttgcttgaggacctcagcactggcatcagcgatcgcacagcagctttgatgcctcactggtggttacccagcaaagcacttggtgaaagtgtacccggacaattttctgggtccttggatgtttgctatgggcgtgaaatttggtgtgtctctaccctcctcccgaacctgttttcactttcttcagtctccatcccaaaacaaaatgtacctttgagaacagggctgtttagaaacacacacacggtgcccatgtctactcctgaccacagtctcctctcctccagctccttctcactcccacctgtgttttcagacccacggtcacacttgaccacaataaggacctctcccctttctccactccccctttactgcccccaataatcccaccatccacatcccctacatttcctggcacaaagacagtcctcaacaggaaatagtacattacacacgtctacacaggcttttctccctggaggaagcaataaagaaagagtctcggtcaactgtagaaagaactattgtagattcgtggtcttggtcaagaaattctgctctagttggtttggcaataataacaacagtaaagtaataatgcttagcttccttttttgacacgattattttatattaaaattctttcaacttgaagttctttaagatttataaggtaagaagttagtttcaactcactagatcccccaagttgctctaaaatgaacacctaagtatcaacattaatcaaatgcctcctgctttttcgcagtgcaaaagtgagacaaagattactttattcttaaacttttttttctccatgtttttgcctggcttgaaatcagactcatgttctataaaggagcgattaagtacaggcttctattttaacaggatgtatttaaggcagccacgagtattctccctgcaaaagttaaaggtcttaatcagaaagaaaaatgtatttcccatattgacataggcgtcacttattgttactgtccatgaaagtgtaggatatttcagctttgcatgaataggcaggttccaacacaaggacatctgactccaggctcctcgtgtctgagtcttccactttgctgtcagagagaaattcacatttctgtccctgaacacacgcagttttcaagtgttcttctatactggcgcctctctcctactgtcttccaccccaaa

SEQ ID NO: 40362 - DNA, 789 bp, Bovine  19866881417550
  misc_feature (1)..(1): n is a, c, g, or t
ntttagcacgggttggatcttggatgggagcaagctctcacatcagcttctgtagacaatgtagggtgaactctcctacatcttcaggaaaggttgtttcatccacccgcttcctgggatttgtgatttcttcagcaacccaagctttggtgagatgtacacatgctttgtcttcagcaacagggactgccattccaagaacctcctaccccaaagaagtgctgtacgcctctgtcattttccaaatgcacccattttgacacttgctggaatttggtttattaaaaaaaaaaaagtccactattctgggtgcctgcctttttgtaaacctcttttctgcttggtcacacgagagacagcgcaggaggctgaaccaatcctctatccttgtcttcactgccaagggcagcccaaggaaaactggtgtcagcaactagctcagcccctggacgttttaaccaaggaggccacatgagcccacaatcctggaagctgaagatctgtagctgggaccgcagcgcccgtaaaatacaagaccatttgtgtgtgcgctctccaccaccttaatcactttttggcaataagccacggtgtaacccccttgagatgacaaaagaaataaaagctccgttgtgatcaaatgactcatcacacggcatgctagcatctgaaggtgtacagcaagcaggctcggcacacaatcatgctctttagtcagtttcagtggggtgggggtggggtatgaacagcaaaggtgaggagggctgtgatgataaactctaaactcag

SEQ ID NO: 40363 - DNA, 1526 bp, Bovine  19866881419659
  misc_feature (1)..(1): n is a, c, g, or t
nttgtgtatcagtttaatacgtaactatttaccctctaaactactctagtgcacatgggaacatgttttctgtgcatgcaaagccaccaaaataaaacgatattttgggagcttttctagtggtccagtgattaggactccttgcttcaaatgcagggagtttgggttcaatcctggttggggaactaggatcccacatttcctcatggcatgaccaaaataaaataaataaataaataaaaataataataatatattttgtttagtttctaaacatccatggagccaagatcagaaatgtttgtaatgttttcatgttgctaaaacttgtactccagacagccaccaagtaaccataaatagggatgacattttattagactcaaaagagtgggttaaaaggttagaataataattggatcgtattatttaagaatggaaaatccatttgctgcagaacaagaaccaattaaaagacatgaaaatgatctgtaaaatctcctgcacactatttaacactaagttatttgtagtagcttttagtgctattcatttctttacaagtaggtttgagggagagattagatgacaagcaagctctattttgggcaatggcataagacagtcttttttttcttccaattttattggtatgtaattgacatacggcactgtattaagtttgagtttcacagcataacgatttgacttacatcatgaaatgactatcacagttaagtttggtgaacatccatcatcccattaatacaaaatttaagaaatagaaaatcccctaggatttgctttcttaacaactttcgtataaaacatacagcagtgttataatcaatcatgttaaaaggtaagacgcccttatcatgttgtacatgatacttatttaccttagtacttatttaccttataaatgggagtttgcgccttttgactatactcatctgatttccctgcctcccagctcttcccaagaagtgtaatctctttttttctatgagtttattttgaagcatgattcacctacaacactgtgttaattcctactatacaatatagcgattcaatatttccatacatttcaatttggtcaccgtggtaaatctagttacaatcaagacaaaaatctgcttccaaattctggttttctctcttattggcttgaaccaagcttcttaatttttctgtgcctgttttctcacctataaaagtgagaatgatgataactcctattatattattgttggaaggattaaatgagataatatttgtaatagctatcagttcttaatatataggaaggctcaaaaaaaaattttttttttcctagttgaacaaaatttcccaaaggaaaattagttcttggtttgtgtaattagagctgtcagagttgatccatgggcctctaaaaggtattgtcagatcgtggcaaatttaatataacaagcataagaaatgtgagcaatgtcacggatggggggttaagggtaaaagtttccaggctaatatgaaat

SEQ ID NO: 40364 - DNA, 1329 bp, Bovine  19866881465405
  misc_feature (1)..(1): n is a, c, g, or t
ngaaatgaaacacaaaattaagaacttttgactcattaaaaaaaaaaaaaaaaaaacctgacaataggaaaaggaaacagaaactttaaaacaaaacttttaaaagtaatttaagaatagtggatgcattttaaaacaaattaggaaaaagaaaattaataaactggtaagatgaaaatggatgtgagagttggactataaagaaagctaagcaccaaagaattgatgcttttgaactgtggtgttggagaggactcttaagagtccctttaactgcaaggagatcaaaccagtcaatcctaaaggaaatcagtcctgaatattcattggaaagactgatgctaaagctgaaactccaatagtttggccaccttatgcaaagaactgacccattggaaaagaccctaatgctgggaaagattaaagacaagagaagaaggagatgacagaggatgagatggttggatggcattacagacttgatggatgtgagtttgagcaagctctgggagttagtgatggccagggaagcctggtgtgccacagtccatggggtcgcaaagagtcagacatgactgagcaactgaactgaagatgaaaatatccagaataaaaatgttataaaaggaaaacaatcaagaagttgagaaagtataacacattgactgttaaagccaagaagcaaggagagaaaagattgaaaagaagcaatatttgaaaaaataatgactggaaattgatctgaacattcaaaaagccctactacatccaaactggataaatacaaagaaaaccacatttaggcacatttaggcatatctggaagctagcctccaaaatgtccctccagtgatccctgtggggatttgatgcttggggaatcagtacaaatgatgctttctggctactactgttgtggtgagtaataaaccatcctttgtctctcatccagaagtctcatgtcttctgccagtatctatgaaattgtagtaggctaattcttagcttagagtaattaccatttctttttagtagtttgaataattaagttctagtcttagcaaatttgatgaatgaaatacagtattgttgtctatattgttcatttgtttttaaaataaaattgaaatggtcatttcactttatataggaaactgatttttttttttttttggtagtgttttgaccatttggtttatggatgatgaaccagaaaatagaacgaaagataaccactttttggttacctccataggtttttttttggggggggggtgggggggaggggtcagtgacaatccattattccagatggggagttgggcaaag

SEQ ID NO: 40365 - DNA, 2588 bp, Bovine  19866881490092
  misc_feature (1)..(1): n is a, c, g, or t
ncttgattcatgtactgttgaagcctagcttggaggattttgagcattaccttgctagcatgtgaaatgagtgcaattgtgcagtagtttgagcgttctttggcatttcccttctttgggattggaatgaaaactgcccttttccagtcctgtgcccacgatgatttttccagatttgctgcatattgcagcgctttaacctgtagagggtttgtgaacataaaaaatgtatgaaattataaatgtctttaacattacttttggtagtaataactatggtgctagtaaaaagtgctagagtttaaggcaacaagttaaattcagtgaagggaggagaaactggaggagatacaaaacagatggagaaagttctagcctgatgatggaggggcagtgttagtggaaacaataaatttagaaagaggagcaagttttaggacagacgtacatgagtttgacttaaggactattttatgttttctatgttaagaaaacaaaaaaattaacccatatctgcaacccagcattttacattatggacatcattttggtctataatttatctaagtcagcaatgcctcacaagtatcacttcacttctaatgctgcctgaaccttgtgtagaagcctctgtatgataaaaaatagaagtgcatactgaccacaggtgagggaggaatagtattaatatactactgtataatatctaatgaattcactttacttgcatttttcttattaaatactcactatatcactgtggaaggaacactaccagttttcccgtcttttcattcaagatagtgacacacacaggtttcattgttcactgtagtctcagagtttagtaagtggtagaacttggattcaaagccacatagccctgatttagaagctgggacccattttataaactagttcctccctctaaagaataatcctgagttagtgtcagtaaattatattgaagattaaaagcgtctgttatatttgtgctttattaaacaatgtaagtggtttggctctagtggtggcttaaataagttctcagaatacttgaaaattgtcttctggtttattcaacacataatcatgtaattgctcaatgtgttcttgaaaagtcccaggaaatatttgtttcttgggtgtatcagccacattttgataaatgcttaatttttatgggaattcctattgcttaattctagggtcccagtgtccacatatcttaaggactcaatagattaatcaaatagcagtgtgcgcagaggtttttgtcatttttggaatctccttggtgaatgatgttgccaccttattccataacaactgagttttataggcaaaaatctgctgccaaagagtcttctttgcacaataagcaattaaaatgtggtaggtgctttgtttctaggagctgtttgtagtgatttttgtggtatcccgatattaggttaagtaagagaaattagcttagaattaactggaattgtgatcatttctgagaagttataacagtgggtttccttaaaaaaaaaaaaaagaaagcttttttggtaagaagataattattagaaacaatcttctttctctcaaaagaaaatgtctctgttgttgttttaaggtaatatatatatttttaaagttaggggaaaattcattaaagaacagaaaaaaatgcaagtgccttctgtcacttatataatggtttcatttatgttttccttaaaattttctttatccaactctacgtataatacaagttttttttaataagatggctcataaggttactgttaaaatttttcatcaaaaatatgttgttgctcatcttcccatatgaataagtaaagatctatatcatcatctgttgccatggctggatactacccaggtatatgagtattttagtttattgattttatcctcaattatgggtgctttttgtctttcttattttaaacaatgctaaaatgaaaccttgttaaaaatacatatttataatctatttttataagttatacagaattaaatagattatagaaataagtctatttaaatagacttcagataaatgtgtttttgcgtatttatgtttatctgaatcactggatcatatctttcttgatttatgcaagctttttatatataaatatatatatggctcagcaggtaaagaatctgcctgcagtgcaggagacagaggagacatgggttcagatccctgggtcaagaagttcccctggagaaggaaatggtgaccactcccattattcttgtctgaaaaatcccatggacagagaagtctggtgggctataggccggtgggtcgcaaaaaagtcagacgtaactaagcaaataacacgtgtttatatataaagcatattaaccattttgataacaagaaaatgctttccagcactagcttggctcatttcatgtaatttatttcagaagaaagaccctcttttgactcttgtaggatggtacagtaaccagagaaaacatgttatttcctttcactatcagaagaagttacctgttgtagcagtctctgaattagccctcaagtctagggttaaacgagt

SEQ ID NO: 40366 - DNA, 1003 bp, Bovine  19866881845482
  misc_feature (1)..(1): n is a, c, g, or t
nctcctcccatcccatgggattttccaggcgagagtactggagtggggtgccattgccttctccgcttcaagcaactaagtttgtaataatttattgcagcaataatggaaaactaaaacatttatatatacttgaaattttctaagagagcaggtcttcagtgttctcatcaaaaagagtcacgatgtgagacaatggaagtgttatttaacttaagtgtggcaatgatttcacaatgtttcaatatcaaatcatcatatggcacactttaaatgtatgctattctatttgtcaattatacctcaataagactttggccacctcatgcgaagagttgactcattggaaaagactctgatgctgggagggattgggggcaggaggagaaggggacgacagaggatgagatggctggatggcgtcactgactcgatggacatacgtttgagtgaactccgggagttggtgatggacagggaggcctggcatgctgcaattcacgggtcacaaagagtcggacacgactgagcgactgaactgaacaggtcaggaagttaagatgctaagaaatagcatggaaatagggttttccataaaaatacatgaaacatttttaaatatcaagagtcattatgttataatattacatgaagaagcaagacacagaatttatattgtatcagtatgtttccaactatatttttaaaataagccttgaaaaaaagattcaagggaaagatttttcaatggtgagatcttagggtgttttttccttctttctattacttttttgtataagttatattcaaatggctagttgtttcactttattcaggtctccttgctaggaaaaagaaaataaactgcttaaaaaataattacaatgcagtatgctatttgtaataatacatggaaggaagtgtaaagccaagggctggcagaaaggaacggagaacactgggagagcatcacagaggagcggggaactaaggggaatctcat

SEQ ID NO: 40367 - DNA, 820 bp, Bovine  19866882056160
  misc_feature (1)..(1): n is a, c, g, or t
nttgaagtgattgaatctgcccatcacggtaaaagctggtgtttctataaaagcagtctgtacaattgaaatcctttagaaaagagatataaataaaggagcagttcaaggactttcgtggcagctgagtgattaagactcagagctttcactgccgcgggctggggttcagtccccagttgggaactaagactccacaagctgcatggtgtaagaaaaaaaaaaaaaacacaacaaattgtaaatcccaagatagacatcataggttaagaatttcaggaatatcacagagcaatattttaagaatagtgaagaataaaagcaaataattgaatatacaaaaggaatgagggattagtgttctctatcttctttgtttctcctttttaatttgtatcccaccaagaagaacataagctatgtgtgatgtagcagggccagttaaaatcagggagtcctcagggtcttctgaaggaacaagtgttaggggcctgtggctctctgaaagtcatttttgctttctaaagcggtactttctgcttctacagccccatttccacttcaagttatatgttattgttgcaattttcttcttcccaggggaggaaaatgcaccctggatttttactttccttattgtaactatttcagttcagagatgatgttgctatcggtatataaaatagtaaggatgtagaagtcagcatttggtggcccatgtttcattatgtttaggtcagcattaactagtagaagtattgtgtgtatttgttactgggtcacttgagtgggttttcctaattaacattttggtgtgtgt

SEQ ID NO: 40368 - DNA, 3280 bp, Bovine  19866880369935
  misc_feature (1)..(1): n is a, c, g, or t
naaacagttttatataaatgactatggaaactgttcttccttggcagtgtctgggagaagcagatgtactacaattgatattttttccctcaagaattggcatgtattgattatctgcaaaattttttaaggaatgaaatattattaatcaattagatttggactaagtgaatgttttacaataccatctatttaaaataagttaaaaattatcatgggaaattatcttgaatataaatctacgtatttaataaatttcctgaccattttttatgacaaatatgttataaacgatgtctgtggtcccctctgtttcacttccttcatactctaagtgattaacctcaaatttggggaatttaaaaacatttataattctttcatgatgtaagtttttattccttttgtttgacatttaaaatatattagtgctacaaaattgtagatactttgctaggtttcatatggtgtgtttaaaaattaagatctagaattgatgagtcttgttaaaagtacagagatattgccaatatgttttagtgggcttttatccttaataaatttttttttttaatgaggatagaattgatatgtgattttaaaaatggtactttaaaaaattagtcaattttgtttgggaggcagctttctggtagtttaattctcgtgtttacatagaagcaagactgtgagtcacttcccaagcagcccctctttgtctcttcagtggcctagggaacagacttgtcactctgaagtgctcacctataattctgtcctccccttcttccctggggcgagtctgaaataagcttatcagatcatatcttattgacaaaaagcaaagcttactggttgacaaaagaagagaagagaacaagtaaaacgtaaatgacagaggtttgatgtaaaaaaaaaaatctgggttaacgtttctaaatattttttgaaagtgggacatacatctttttatatttgcttgatttttactttatgtaaaattttgagtgcaataaaagctaacggttttgtttgttatagttacatgttccttgtaagcaaatctttctatcatatttttgaaagaacttagagaaaagtatgttgcatcttatgtactttaagtataattttctaatagaaaatagatatggctttcagacagaaagtagacagagctttcggataggaagtagaaatattataaatattgaaatcaattattataaatgttaaataattataaggattttatatcatatttaggctacccttttagttcagttggtaaagaatctgcctgtaattcaggagacccaggtttgattcctggcttgggaagattccctggagaaggaaatggcaacccactccagtattcttgcctggagaattccatggacaaaggagcttggcaggttacagtccatggagtcacaataatcaggcacgacttagtgactaaaccaccaccatatcatatttatatcctgtcttcttcactaaacaaaaatagtcttacagaacttttaaatcatatttatttcttgtcttcttgatcatataaaacaatattaccatctccattataatgcagctgatatttattagttgcatagcagatgtaggaacttattctgggtactctgaaggtggtatgtgctgtaaggctggtcactttgattcattctttgtttccagactctttaaccaaccttctaaagttgctctatctactagtacacatagatgagtcaaatccatctcctgactgctagatactggctcctaagcaatcccagagaacaaagaaatctgaccttggtccatgattgagaaagtcaggagaaatgtagccaatgcactctgggccacaaagagagaaagagagaagtcgcttagtcctctctgactctttgcaaccccgtgggttgtagcctaccaggctcctacatccatgggattttccaggcaagaatactggagtgggttgccatttccttctccaggggatcttcccaacccaaggattgaacccagatctcccacattgcagacagacactttaccctctgagtcaccaaggagtacaaaactatatttgaagtgagactgatagcagctaagtagggaaaggtttggaagagacattaaggaaagaactagagctgctaaatagcaacagtttgaggggaagagagccacaataggtaggttttttaagtttttaccagttactatggtggtaagtgcaagcaagaacattcctgaagctatcatgaattcatcctcagtcatccttgttatgagtattggcgaaggatagaagagtttgctgaaatagagaccaatgaggaagaaaagagaagttcatagacttgaggaaactaatagtagcaatgtaatgagactagtattccgataatggtgatattatgaaaagactgatggaaagctaagtggagactaaaatcctaaaatttgattgcagaggaggggaaaaggtattgagatatggagatatgttactaacttaggtttttaaggaacattaccttgcttagctcatacccttcctcggctcttccaggaaagactgttgaggctttccaaaagtttcttataagtttacagtagggtcactgggattcccaagttattatctgtctacattcaggaatgtaatcccttcaataggaagggtcttctctacatggaaaggaaaccacctgctttaggatggtgaaagccgacatatgctgagaaagttagaatggcctaactaagccatgcccattaaatactgcaagacacaataaatcatccacttgtccattaggaatacggggcagctctcagagccttctggtttgtatccagattaacatctagtaatgttggtggagacaacgaagtcattcaaaatatgaaaccagaatatataggttttagaacctggaatgaaagtactgtgtcattaagagttcattataatttgtgtcagaaagtacaggaaataaagcattcagaaaaaagttataccagttcagaatgtgtcacctatcatgttgtgtgccaaaatcctaacaggcatttctgtttacacatggctcttctgaacctcattcctgcctttgacttatcctgtatgaacaacatccttcattagtaaacaaatgaacacacttcttcactcagcagttaaagaaagccactaattcacctgtaagtctcaaggattgattttggggaattatgcctcaattatatatatatatat

SEQ ID NO: 40369 - DNA, 2431 bp, Bovine  19866880442348
  misc_feature (1)..(1): n is a, c, g, or t
natggacctagggattatacagtaagtgaagtgagccgacaaagacaaatattgtatgatatggtttacatgtgagtctgaaaaaagaatgatacaaatgaacttatttacaaaacaaacagtctcacagacttacagttaccaaagtggaaaagtggggaaggataaatcaggaatttggtattaacagagacacactaagttatataaagtggataaccagcaggatctactctattgtaatagcccataagggaaaagaatctgaaaaagaatatatataaatatataactgaaccactgctatacacctgaaagtaacacaatattgtaaatcaactatgtatcaattaaaaagaaatggatgttcttggttaaagtatatactgtatgctaacttgcttcagtcaggtccaactctttgagaccgtggactgcagcccaccaggctcctctgaacatgggattctccaggcaagaatactggagtgggctgccatgctctcctccaggggatcttcccaacccagggatcaaacccgagtctcttatgtctactgcactggcaggcaggttctttaccactagcatcacctgagaagcccaaagtaaacactatatatagcatgtttatatggaaattctagtatgagggcatatctttattttaatttacaatatttaatgacaatatatcatttgctaaagtcatacagtttttaaaacttctcaggtattaatattttatataatttattttaaattaaatgaaaacttgcacaattatgtggtactaaacccaagtgctgttttcaatttttgttagaaaatactgagaagacaaaaataagaaatttatctaagtggcaggtataaatacagtcatgtggctatgagttaatatctaacctaaaagttttgcagcttttaatccaagtcacttcagcttttatccataatatttctatgatgtctcttggatgaaaatacactgatagagattaatgatacaattaactttatgttgacatataatctccatgcagaataatctgacatgacaaactttataataatgtacccattaattttcttttcatagttattcttacatttttcaactcttccaggtggtattaaaagtcatgaataaaacatacttttttaaataaacagaactttacaaaacctgcaattatttacattggtcaatatcttgacagaatttaacattaaataatttaacttcaaacaattctagagatatctatagctcacctctggctgctagtgacatagattttaacagtgaaatagtttctcattttctgtaaaattttctaatggaatctggctatagccagacaaaacagacattcaagagaggcttttgtattcagtcttcaaactttacctattacatataccatataaaattgcaaatctcaggactcatctcagaaaaattaaacccatttatttttaaagtatattcaaaaaatgtaaattataaggactttggcttaatttcatttgctcaagttctcattaattaacactctaaaaaatataaactgctacatctgcaaatgattacaattacaggaatgtgctataagtaattataaattaccagaatacttaatttccccccatctgaaaaacagcaacaaaactaaacacacaaacaaacaaatctggccctagtttttgggacaaaggaacttcacattttaaataagagaagaaacactgggtcgaaatttcttttgtggctctgctttaacataggcataagtggaaacagaatttggggccaataagttaagcatcccctatttttgaaattcacgggctgtgaaagtattacataagagcctttaaatcccctccagtaggatttaaagcatcatcaatatgaaatagcatgggacaagcaatcataatatcttagggctaaatgggactggagagtccttccatatgggcaggagtgctaaaaagcagtcgttttcccataagggaggctatcagattctcctttgttatgaaagtgatcttatagatctatctagcatccagaaaacttactgaaatcaaatgatgtgacatatttcaaattaccttgcaaactatgactagacatttagcaaaagaaatgtaaaaggaaatagatttggggagtgataccgtaacagcatctttctaaggcatgtataaaaatgaaatactatagaatacttttaatggaatatccaagtccatacagcttcctctcccaaatacaagtcatctagctggcagactgttcttaactagattttttttaatggaagtttattggtaggagtatctcttggtatcctgcatatttttaaatccaatgaatacagcataagaattcacaaaagggcaaatcacactgttaagt

SEQ ID NO: 40370 - DNA, 2444 bp, Bovine  19866880503606
  misc_feature (1)..(1): n is a, c, g, or t
ngtgagaaatgacatctatatatctgaaacttaatgtaggcaagacccataaaaatgcaatgtgagcctccaatctctctcaccaggatggcacagggattaatcaaatcaaaccaggagaagtgtttcagcgactctagagggagaaatcaaccattcttggagaaaaacatattttccttctattcatctacttaaaaaatataaatggcctataccaaccttcagaaaaatgatttaccacactactaatactaatcctttacatttatatagtgctttaccactttcaagaagctttcacataaattatctcctatagtattagatcccacgacaaaaatgatgattctagaaatgaaacaactttttttcccaactcccatgcacttggatatactgattacttttcccctgatgttatgaactttaatcataagaccttttacctgtgaacattaaccttatgctatgaactgataaataaaattcataattcttgtttacttaacaagacaataatatgcgcaagtgggaaataaaggtgaatttaaaatgaataaggagttaaaggacatgatttgccctttgctagccttttcaatggcacagagtttaaaacaattcaaggtctggtttgtgtaaatttcttaccacctttaataacttaatagcataattgtgtgcacaatttctccctgttctggcaagctgccacaagactagaatctttgtctcgttcaaaacattgtaaacatcattaaaatgccaaaacctgtaaagcacttttacgaagtaatttgcaaattttatagacttaataaggccacagcaaattttagcccgagctacctgatactgcattgtcattccattttatgtcattcattcattcattcgctttttcattaattcattcattcactgcttatcctccatggaatctatgaaggttcgagtgcttgtatcttaaaatctgtgtagatattaggccaagaaaataaaaagaagtagtttagaaagtaataaacacaaacatgacaagtaaataccccacttctacttttttaaagaaaaatgctaaattaaagaaggaagggatgcagcgagatggtggtgaaagatcctcagtgatggaaaatatgtttgcagcttgatctcttggagctaaaaagtgaggttacgtgttactacaggcaaagggaattgcgaaatactcattagaataatgacagcaatatttagaacccacagaataagcacaggagtagagctacaaactgggacaaccttgttcagtcgctcagtcacgtctgagcctttgcaactccatggtctgtagtgcaccaggcttccccgtccttaaccgtctccctgcgtttgcccaaacactcaagtcctttgtgtcggtgatgccatccgaccatctcaccctctgtcgcccccttctcctcctgccctcagtctttcccagcatcaggatattttccaatgaatcagctttccacaaagtcctggagcttcagcttcagcttcagtccttccaatgaacattcagggttgatttcctttaggattgacctgtttgatctctttgcagtccaaggggctctcaagagtttttccccagcagtacaatttgaaagcatcaattctttggcactcagccttctttacggtccaagttttacaaccgtatgtgactactggaaaaaccttggctttgactacgtggacctttatcggccaagtggtgactgtgcttttgaatatgctgtctaggtttgtcatagctttccttccaagaagcacgtgtcttttaatttcatggctacagtcactgtctgcaatgattttgagtcccccaaaataaagtctgtcactgtttctactttttccctgtcgctttgccacggagtaacggaccagatgccatgatcttagttttttgaatgttgagttttaagccagctttttaactctcctattttaccttcaacaaatactcttattgttcaacagagactcttaatgacaatatgtattaaaaataaaaatattcataaaataggacttaatgatactaataacaagcttttctgaagaaataatcagagattcagatgacaatttattatgaagatacttgccacagtgttagaagaaaacaaaaaatgatgtaattcaaacagtttatagtaaaggaatatttatataaatttgtagctgcctgtagagcaatcttatgaaggctttcatgtaataaaatcttaagcaaccgttacaacaaaatgtacgatgaaatcctaatgatgttgggaaatgttaatgaaacaatgttaagaaaggcacacaaacttgaacagttagtaccgtaacaagtgtatagtatctttaggcacacgcacacacacacacacacacacacacacacacacacacaa

SEQ ID NO: 40371 - DNA, 3253 bp, Bovine  19866880568510
  misc_feature (1)..(1): n is a, c, g, or t
ntgaattctaactacagctcaaagatgtgaactttcttttttagcatttccattatacagatgcaaaaactgggggaatgagagggtgaggaacttgctcagagtcacacaaattctggcaggatcaggttttggggccaggcttccaagaccatattttcaataactatgttgactcccctctgtagaaacagtactgtagaagtgtcacccagagtgaccgtgggcaagttgtagctttgaagtcaggaagaaagcagcaggagaagatttcaggtgtgtttaaaagacttccatttcattctttgagatcaattcagaaacatttaatttagtttccaatttctctgcctcctttcctctgaataagtgtaaggaccgaggagaaaacagaaggttgaaaaagtctgcatgacagggacagagttaccttttccacttctttcaatgttatgctatatctgtgtgtatgaaatgcaacgggatttttaaaaatcacagatatcctgaaaatggtcactgcaaagtcatctagatattgatttgtgaaagatagaattaaatgtaaaatgtaacaatagtaatttaaactgctaatataagagataacatagatttccactagtggatcccattaatatagaggtaccactgacacagaggatactctccagatcaaactaaacacaagaaggaattaagcttccttttcttcccagcttgctgctgctgctaagtcgtgtcagtcgtgtccgactgtgcgaccccatagacggtagcccaccaggctcccccgtccctgggattctccaggcaagaacactggagtgggttgccatttccttcccagctttaggttacagaaaaattaaacttcagaaaggaaaaaaaaatcataattcagacttcaaaattatagaaaatcacaactgaaaagaagttgttctctgacttcccaaatcctgacaggagcctgacaggaaaccatcctgtcaggatggtttttggaagtcagccgtctaaaatgttgcttattcatgatgttggcaaggtagaaaatactgagaggaaaatgagattgcaatctctcccttgtccagctgtcaaagacgacagcaaatttctcttccacggtagagacaaaacttgaaaaaaaaaatcacattgtcagaaaactgcatatcatctccgtgggtttgaggaacatctaaaaatggatgtaatgtgacagcagccacctggacaccaattcaaaagtgacaaagagtattgctctagtacagtgtgaactatagggaattggaaaatggtaatgaagaaaaagtctacacgtgtaaaactacacagaagacatgattaggccctcagggtgctggagaacagagacaccaagcagggtaacaacttacaattctcagatgcaatgtttcccttttgtcttaactttaatatttcatgcaatcttcttttcaacataactaccaattacgcagtttaatgataacaaatcaacgtccctggtaagatcaccaccttgtacaggacttgtacacctagatgatcgactaaaaagtgattataatgtccactccagagtggaaaatttttttcttcttaaagctggagaagtcaaggtatacccacaaagctgaaatttagaaatatgtaagtcaaggcaagctaatcctcaaagcacgaagagaaaggcagctctaagagcatcccatggaaacatttcagagctttcctctcctcccaccctggtttctcaagccctttctcctcttgatggtattctccagtttttcattttataagtgtgttatattgacacatcttatttgcgaagatggaaaaccatctcaatgattctattcaatgattctattctttcttatctaccatcattattatatatcttgactattggtactctctaattctagtcttcatatgtgttttaatcacttttattcagtaactttatgtaaggagattccatcagcattagtgttttcttcctctaggtttccttattcttgcctgtaattgatctgcttttgaccttcttccccaaacagggaaccatattttattgacttttgaatctctgacagaagccacagtcccttacacagcctgtgctcagaaaattcttgcagatacaaagtacaagagccagaagatgttctagaacattttgtttctattttcttacaaaaatacataacatacagaaacatctgagcacagctgcatacctcatgaataattacaaggttgggcatctagtcaacctggtgagggattaaaacaaagtctctgtgcatcattttctctcttctacaggactcccatttggttttccaggatcactctggccttgcttgtctcaacactgcaggtgtttcctcttgagccccagaaagggattcagttgtttaactgtaagtgctacagtgactctcagttaaagaaaggagagaggaggagagaaaaaaaattaatcttctaaccctttgtctattccagattaatgaaattccgtaggagaaacatatccttttatatccgttctctctttacttcatctttaagctccactcacttccaaactgtctactacttagctttagacaatatggctttgagcatgatttggatttattactttagggatggtggttagagagtgtgaagttgggaagtttgggggctgtccttgggggtaggggatggggggattttaaggggtgaagtgggagaactatgcatagtttcaggtcatagtaattatattctctaaaaactgtaacgcaggatgaataggtatctgtttagagctttgtttcctctcagttttacagacaaaatgacaagagagtatctatccaccatgtcaacattattcccaaatatttctagttaagaggaacttgtgaaacaaattctatcatgaaaaataaatcagaattaaactccttttccattcactataatattaaaatgacattttaatagaattcttgttattgtagctgactagtctgtgtattgtaataagaatagaattacatcaagtaaacatgaagataaataaaccttcaaaacgaactgcaaagtatttaaacattaatagatgcagtaaagcaaaacataaataaatcaaattctattttttcattgaacattagaaaaagatagtttataaaaattttcttaaaattgtgtattctgtccaatgtgtcccgta

SEQ ID NO: 40372 - DNA, 2201 bp, Bovine  19866880637830
  misc_feature (1)..(1): n is a, c, g, or t
ntagcttgagttgtatgtatcaataaggaagtcatccttttgagggatggatgcttaatgaatatggattatgtcctgccctttgttataattctttatagtgttttgcatacagtagtcatttaatgactatctcttaagtgaactttttaaaggccacaacttgagatgaaatttgccatttccatgctgctgtatttctcttttactcttgtgtgttgctctgatcacatactgttcatgaaatctgtgactctttataaattttcaatgaacacatttttttttttatcattgatgttctttctcttgaaaataaattcattatacttcccttagatatctatgttaaatggagaccagcatgggtaaattttttacaagtgaagaaagtttatatagtacatgttcattaaaaattcaaacaataaaaaacaaagtgaaagtgaaaattattgatacatacattgatttaaacagcaaattgaacattttagattaagttttggagaaattttttcttatgcacataaaaatatataaatatttaaattcctgttccaaatatttactgtgtgacaggctaggctttgcttgggtacctaaagctactggggtacttgttctgtgtttctcatcctgagacccaagctccaggaacagccccagtctgggatatgacagagcacaggaaacgaaggaatggagagagagaaactgagaaagaaacagggaattttaagcttctgttgccttgtggcaaatatcatgtcttctcatagtctattggtttaaaacgtgccttgtgattattttccacacctgacatttgaccccagtgttggctctcctctttgttaagccccactcccaaccagggatgcaaatttattttcatctatggttccatcagcagaattgttcagagaatttgggcaaagccagacttcatgagagggtttatataacatgcctctcaggctacaggtattgtggggcacggggtgatcacagagtctctaggagaggcctctggttttcaacgttgaaggctttctgttttcaagatatccaaaatagacataacatgtattcaacctattctctctttagtctgaaaatatgtgcttgcctaagactaacagctctggacaggaagctgtgtccttgaggctttcatcctgaaagggggataagcagtttcaactgaggccaccctgccaactcaaacctgctttacctccttgtggtctgcagggaaagtttttcccctagtcttatctcccaggcagaattctggagttaatattctagtcaacagtcctctgaccacaaagttcagcaaggataggagatgaagatgcatttttgaggagctgtcattgactggtctgggggaaaaaaaaaaaagcaactatagaaaaatcctaaagagagtgttaaaatgcaaatatctcagctgtataatcgccatgtagttatttctgtgctttttcaggatcgagcagcagcattgtagtggcattacggctgtgtgcttattgcttttacagtttatcacgtcatttccccactacatttatccaacttctagaccaggggttgcttcaccaacaaagtgaaggtccaggagatgtcactaaaatattccttttccaaccttccaaaagcagaagctgtattggtcatgcttatagtagataaagctcactgatgctgaattctcagtgctagaatgttccattataatagtgttcagaaatgagagagcctgttttgagaagaaatataaaaaatgctaacataaaattattaattgtccagaaaatttttattaatggattataagaattactttatgactgatggatttatcattaaaacagatgtagggatttattccaatcttttgagaaatcctttattttgatcagtagtatatttatatatgtaaatccctacttatattgtcgtcttaatttaagttgaagtcttgaaatggcaaatattaggcatatgatcaatgctaaccattgagtgaagcatcctttgaaaaatcaagaggataaaagcagagtcaagagtataaaattaattctcatgtaatattagaataaaaaatgtaaggatgtgatgacaaatggtaataaatgctgagtttccctaatgatacgggacacattggacagaatacacaattt

SEQ ID NO: 40373 - DNA, 941 bp, Bovine  19866880653942
  misc_feature (1)..(1): n is a, c, g, or t
ntgcagtgcaaggaagctgtgcccctttattttctggaccgggagtggactagtctcactgttccgacagcaccctctgtgcaccctctacttacctcctcaccccatctctgggccccacaagcctctgacccagtgggagaatctccgggccctcccctccaacagaacctaacagacagcagtgaggggagccgagtccctctttgggaatgtatatccaggtgttagtggtgcccttgagcctgccagaaaccagggagcaagcagactggactcgatggtgcagctgaagtggccccgagcggaagaaggaagtgacagccagcccagagcagcagtctgcgcagccaactgggtggtcagtgagcatacgtgaaatttctcctgggaaccctaatatgcttggtttcgctgatgggagatttttttagaaatatgccttagcagatggtcaatatacattatcattgtagctattactgcatgagtaactcctggtgtgagaatatgtaaaataaacagatgaaagtaagacatcttttaaaaaaaaaatcccttggggataaacatttatgttgtcatttttaataagttcatgaatatgcaaagtctgcatgaacactttgactgccagagatgttaagacaaattggcctaatgatgaagtctgtgggactaaagggactgaagccctgggtcaggctgcacagacacagagcagctttttacggcgaaatcacagtgtcaagttctcagtggtggaggtcacaggaaggcggctgatcacaaccacgagcaatgctggctagcctgttataaagcatgctgctgctgctgctgctgctgctaagtcacttcagtcgtgtccgactctgtgcaaccccatagacagcagcccacgaggctcccctgtccctgggattctctaggcaagaaca

SEQ ID NO: 40374 - DNA, 631 bp, Bovine  19866880678945
  misc_feature (1)..(1): n is a, c, g, or t
ncttagtaattatgaggccttattgagtatgtgttgctgtatacaacacgggttttatctctgtgttacacaaacatgacaaacattttagctaatcaacctataattgcagggttgctactaatgtaggcaagtacacattgaatatcaattcacagtctaacaggagaaaagctccatttccaggctttcctttcattgtttccaatattttttgatgttcttattggtggtagactattatcttgtatcattaaaattggacagggcttattttatggaattttactttagagagaatatttgaagcagaatatcctctacactttatgaatatgtcttttattcatgtgacagcctcattcgaacttaatctttaaatcagacttccacagcacagtatcagagcctttctgcagacactggtgatacctgctagaaaagataaagacagcttacttcaccacaatgacaagaaaacatcaactaattggttacttttatgaggtccctggaggttgtgtgctgaccacgtgcccaggtccggctcctgtgccctcatgtatctgcgggactcaggacagtcatttgctgaaggtggggcagggcgttaaggtggtaactctaggga

SEQ ID NO: 40375 - DNA, 2428 bp, Bovine  19866880783602
  misc_feature (1)..(1): n is a, c, g, or t
ntcttctaggtccttaagctaaaaatgcttccttatggcagaattttcttaaacatctccagtgttgttaactgtttgaaagcaccgctgcatgaagacagccggctcttccactgtgggtcccagatgagggagcctgcgggcctccttggggggccctctgatcctgtacaggctcaccacccagggaagcccctccacctgctgaggaagtgccccgggaaccccgaggaatggacggaggaagaagatcctccagaacacaccaccgaaatgaaacgagaaaactgagagcaggcatctcgtggctaaggagacacatccagagggggctgcatccaggaggccgaagaagacccattccagaaaggctggccagccgtatttaaccctgcccagcagccaaggaagacgcgtgctgagctctgttctctactcgtaggtgatgagaacagaattattccaggggagcagtgagaatagaggtcagagttgggtgggagatgtcagagacgtgagggtcagatggcggcggtggaggttcagcagccaaaagggagaagagggcagctgtggcagggcgattaatgcagggcagggcgttggggaatttatgtgatcagacccgagtgtgcgcaaatgccagtgaggaggaaccagcaggaggcaagagttaactgcagagagcagaaagggagctggcttagaaaggagatgggatccacctccagaggagggcggggccttgggtgggcacggccctcttgcctggtgatactggcggggcccggtcggccacaccagactgcatttcagctgagccggcagaagagcactgtcacctcccttattcagctaaggtgttttctcacagtcagccactgttgttttcttctggagttgattagcaaaaggacacacgctttcttataagggcccccgctgagtagcatctcctctttccacgcatatgcctttctgaaccaagttcaggttctaacatttctttcctttaaatgccattctattagatttaggtcacgtttccaatttgtcaagatctttttatattttaatcgaactcacagcataccgttgacgtgtttcacccttgtgtcacccacccattaaaatatcagctgtatatcttcacccaaagagctgtcttgagcttttctttaatttccattccatcaagcgccctgccccccgtccactcatagagacttgggtgaaggacaattagactggatgctttgatgataactgataaagcgtctcgtgctgaggagtcctccggaattggattaagtggactcatttgtggtttgcggtgtttatgttttagcgacacagagacgtgaaaactctcactctgcctgtgttcattctcacaaatagatgggtactgtcacttttcaaggcctgtccatctggaatgcatcacaaacacattgctgggaaagtaagagccccagaaagagcctcattttcccctgcaactgtgaaattgagtggtctcgtttcttccatgttgttgtaaaatcacaggagtgtaatgtaagctacatttttaaccatttgggatggctttagattgaataatgcttcctgccagacatgttttccctttatttatcacttacttttctctctaatttcagcaacagcgattgctgattatggaaatgactccaattgttcaacctcccataaccacatttagtcaccaaaagcaatttatctgctactttcaaaagctgttaaacaaacaagcaatttattccagccttcttgtaagtaaccaaagaatacagccaagttctccttgctccttgcatcgctttcagaactgtgagtgcctttttctaacttgaatcaaaactggctgtttcctaaccactgtctttgcaaccagtaatctgacgcggtgggcttaattcaaagcaggcactcacattctttagactgttggtcagtcttccaggaaatcaagaagaacaacaaaaataaacaaacactggccctaaattaaaccaactagggcggaagaaacttcaatgaatggtgaaacaaaattaaaagaaaaaaacaaaaaaggagaaataaatagaaaatattccaagttctcacttgccctggccccatgggcacccgctttatcttcctttcctggaggaaatcaaagcctctcccaagagcaattattccggtcagtcccagacttccacagagcctccctctcgcctgccccagcaggtgagcacacctgaggtccctgcagagacattcctagaggtttctctgtatctctattgccagtgtccctgcagaaatctctgtactgaaataaagcagactcccttttgagttaaccccagcttggctcctcacagccacttctggtgctgaacagaggagccttccc

SEQ ID NO: 40376 - DNA, 1764 bp, Bovine  19866880830395
  misc_feature (1)..(1): n is a, c, g, or t
ncctgaaatggtctttgctttttaaaatgaataattttgccatttgaagggaagagtatattacagctgcaaagagtaagctgaatgtttcaaagaactattcctggcatcttttagaataagacacatttaagtcaaagagatggctttgggtgagatcagaggcagatccaaggttttagtgggggataaaacttctggccatttcccaaaatctccagagcgcccccttatttacacattcatttgtgtgtatctcatcgttatcaaatgcactcacatatttactgtgtgtatgaatttcctgacagattaatataaattggtctctgcccaagttctccagcagttcatcattggtctgcaacctgcagttctaacgataaggcagtgagaaccacatttcatggctttatgggctatatttggtgactgaggtttgccctaaggaacccaatatttaacctagaaatatttgtgaacaggatcattttcctgtcttccttttcctttatctagaggtcactgccactagaagtatgaccaaactgagaaacaaggagtaaaacagattttcaagttaaaaaattctatattcatagaatatagaatacatagatatactgtcaaaatagttaatcctcatttaaatttttattatattattaagtgctcaatactgaaaaaaggcaggaaatagagaaaaatactaaaaagaaatgaaaagttgcccaccatctacattttgtaaaatgtactaagatagttctgatacacagagttgagactgttgctgctggtgattaagaatgacaagattattacattatctcatagatcagtagactactattgtggcaaactgtacttcctgaagatgactgcaacagtatttcccagtcctcacagtcttctgtgactctgacactactcccatggagaggagggtgtctgtgttccctcctcttaaatctggatggatctgtgactaatggaaatcatataagtaggtgactactgaggacaagttataaaaatctgatggacttctccccgtttctcctgagatgctcattcttaaaacccagccaccacgcctatgaagaggccaacttggagagtacagaggtccccagcacacagccccggctgcgctctaagcagaagtcaacactgactgtgtgagtcatccaacttgaaggtatatcctccaggccccaggtcagccaccctagctaatgccattgtagacggagatgatctgtaactattgagatttgtacacaaaatatattattgtttttgttttaagggcactatggttttggggtggtttattatgaggcaacagagaaatactccacctaatagctaatagtaagagcaagtacaactgaaaaggtaagcatttattaatactacatggcaaaactgtaaaagggttttaaacattgtaactcagttaattctcacaattaccctatggcattaaagtactattactccaaatttacattttaggatattcaaacacacacacagattaagtaattcacctacaaattaattaactgagcaagtagaactgggctatgcaccaggaggtctggctacaaagctgatgcccttcaccacaacactgagcagtgggagcactactatctaattaagatccgatagtgtgcagctgagtcaggatctgcttccctagatctgcttcctctctgctcagccacattcttctcttcctaatagaaagacaca

SEQ ID NO: 40377 - DNA, 1795 bp, Bovine  19866880841899
  misc_feature (1)..(1): n is a, c, g, or t
natggaagcttgataaaaagatgagatttgaagtactcaacctgttaggaataagtagttttattgttgatttaagctggtagattgaaatatctcagaatgctaaagaggcagagcagcaggtttcaggtgattaaagaaaatccctcatcttggaggaacttgaagggacatgatgctatttaagtagaatctaatcagaaagaagaaaagcttgaaagtaaaaagacggaatgtttcatgtcgttatttgcaaagcaaccgaacaaaaggtgagcaagataattaagtgccttgctgctgagtagaatttttcaaagtgggttgattagaggtctttcttaaaaaaaaaaaaattaaacatctaagtctaggaaatctagttgaaacagctaactcagttataaaggtggagaccagtttgggagaaaatcgacagtattgtgtgtatggtggcatatgttcacaatgatgagtttaattgtcagcaaaatcctgatcagttctgaatagttttagcattaatgatattttcctgtgttttaggtttttgaaaaatgggaatccaagcagacttaacatgtgatggcactaaatagattattttccagtgccttggttcctccatttttcagttgatctggataaataggacttgattcttttattttcccttttgcctgaaaaaataccaaaagcgagtattatcagtcttattataaaatgttatttgtaactgccaggcgaaaatgggatgtcatttcttatatctgcattttgtgtttcaagacatttctgatgataacatgaggaaactgacatgtcccagattgtgctttgtgaacttcatgctggcaaggctctgccttctcttgaaggcaggccaggtcaaagcactgatggatgcattatagctgaaaatgaaaaccaggaagtcatgaccttaggacctacttttctaccaaggaaaggaagcttgaagctaataagttatgccagtcaaacacctagtgggcatatgtttttttgcattgttcttttactctttcaacattctaatgacctcaggcttacttagtaatgcatccttttgggggcaaacatccagcagcagatcacttcatttattatcactgaatttatttatttcagtcagtcattgcagagctttgtctccaaagaattaattataaaagttaaagtgatcctcagtcacctggcagtccactgtgagtataaaatggggaactactgtctgcctttgagcagtttcaaaggctggttttgggactgtcatcttggactgttgttgtttagttgcttctgtcatgtccggctcttctgtgaccccatggacccaccatgtagccctcctctgtccatgggatttcccaggcaagagtactggagtgggttgcatttccttctccaggggatcttccccatccagggatcgaacctgcgtctcctgcactggcaggcagattctttactgctgagtcaccagggaagatcactgtgattttggatacccatttgaaaatcaaaaatgataacaggcccagacattctcagctgaaacagatgatctaaatacgtaaattagagaaaaaatcatttttggattgtagaccctacttagttactaaaaacagccttggtttttaacttgtgccttgttttagctagtgttcctcaaattagcctgcacataattacctggaggaacttgaaaaaattcttatgtcccaggcacactcccctcccagaccaatcaaatcagaatttatatggg

SEQ ID NO: 40378 - DNA, 650 bp, Bovine  19866880879684
  misc_feature (1)..(1): n is a, c, g, or t
ncctggaaggcactgacttttttttaagttattttttttgtatacatctctcaaatatcacttgaccaagttaaaaaaaactgtagacaaaaaaatgaaatagaagcttgtatcatatgactatcatttctgtcttcctgagcgatctttctgcatctgagttcctgcatgtacataagcactgaaatcccactacctaccctctcatctgccactccgtgtggacactggtggggaaaccagtgatgcccttggatgctccgaacaaagggtccctcggaaagccaaggaaatatccacagacatcaccaggagtggaaactcagaacacaagccaggacttcaagatggcttgaagtttattttccagggctcttcagtgtcttgaacttttttccagctggcagacaccaagtcccctgactcttttcagctccaactcttggactgatccttttcttacgattccctaggagttgataaactccccaagttcaccttttatggagagtgctggaatgttccataattagttttctcacataaaagcaaagcatataaacactcagtgaaaactgcagaggaaaagtttgaggagtcagttttccaggggccctgctccctcattgagctttctgagagcttctcat

SEQ ID NO: 40379 - DNA, 1542 bp, Bovine  19866880976769
  misc_feature (1)..(1): n is a, c, g, or t
naaaagttttgatagaattggaggctccttaattaacacttggaagcaaaagaaacataccttctattttactgccacgttcaagttatgacaaattttcttactgtttttcttctttttgaaaaaactttacttgctgcccagttatatatttcacagatgttaatgtttaggaagtgtttaattgggcattctgaacctaaacataatcgatttaaaatgcagggggggtgggggatgaaaagcccaattaataacatagtattatacagcacaattaataactgataattagtattatacagtattatatacaatattaatgaattcattatgtttattcattcaataatatctttgctgaatcttgggtttgatgtatttttggcagcattctatttaaaaaagaaattagacgtgattttcctgtttaaatacatgcaatcatgtttttgcaaccctgtttttttatttcaggctaattaatatatctagatatgtgtgtgtgtgtacattgtatatacacatatatctgcaaactaagtggcatatctctgatttaatcttacagattaaaacctggcatgttattattaatattggtagtagcggtaacattaatattttgtagtacttttaaaaggttaatttctttctttcctcatttcaaaagagatgggtatcagtcatctgtgactctgaggtcctgtctgaaaacaaattcattctttatgtttatgctggttaggatattcctgtgtgactggggataaatgaaaggcatagcctcagcctgtgcactatgatagtgtctttattcatattgtttccctaatgagggaacatacgtgtgcattttagagcggatcgatttattaagaaaatttaaaatagctaattgttaaaaccgttagagaatttggttctataattggcacatatcaaggcttttttttcctttttcattctcaggaagtaaataacaatcaaacccccagatgctgagaaaatataggcctgttgcactctttatttctattcaaccattttgtttcagatctaattcactgaaaaaaaatttttttgagtagatacatttaggtagtttttgaaagctttgtggtatgaaatatttctttcaatgtaagattttcctattataagttgcaagtgaatggatactcttcagtatcccacttgatgaggctctactcatttttccccctgccaccctgaaatccctgcatacatcaggcttagcttccaggctgagctttgttagtttttctgagtagactttgccaattactatgctagtcacataccacatttgcccgagcaatggattttggcgttctgctggagaggggatatggtttgtaagagagtttccccttcctctgagttgaattcactagttgagatttgcaagcctggaatgcttgaagcagctctggcaggatagcagtgcaagctttaaaatctaggtgtagctgttaatccttgcagaggcacataagtctccaggagtagctgggttag

SEQ ID NO: 40380 - DNA, 1872 bp, Bovine  19866880985415
  misc_feature (1)..(1): n is a, c, g, or t
ntcacatatttttttttaaggtataaacagttttaaagtatagaaactctggttcttctctgtactaagttcactgccttcattaaaagtgtctaaaatataatcgataaatacttattgtggaaatacattcccatttttccccacacagcttcagattaaacaaagtgaaaaatcatttcataaataacctttgtgcaactgaaaattctggctgctgaaaataattctgaattgttggcaaaggcaagattttttaagaaaatgaaatctaaacttttgtcaagttagaaacagttgttgtattggttttccaatgagaaatgattatcagagaactgtcaagactattattagacacacatggatgttaacttttatcagccattgtgagattgtcatttaaagttttattattatattcctattcaatactttacaaactaatgtggttaagaatgattttggagaaattattaatgtatgagttgtaattgaattctcatgttatatagtatcttttaattattagagaccaaattaattgctggaaagaagcattgaggaatgaaaagagcaaaaataaagtttgatgaaagttcagctcggattcaacttccaagtagtgagattggaaggactttaagggcaaagctttgttcctctgggtttgggaaaacagggagtgcttgcgatgaaaattttcccttacctgaatttttttttttttttaagagagaagagaatgtaaaaggattcctttaataaattcctctaaggggttttctcaaccacttttatccactgctcagaacttagatttaattacatttgcaagactgagggtggggtcaggacagtagtctatttcagggtcagagtgccaactttaaatttcttgtcctcaatccattggtatcactaccttactgttatttaaatgtatgatttttttttcttttttactgaatttcctttcaaggaacacataaaaaccaatttcttttttctaagaaacaaagactctccctataacttactagatagacaattgcattttgagtctgtgtggtagcacactaaaacattattgggtaaatgtgcagatgaagatcctaaaaattaaatagtcattgtattattaatagtattgagttaacttacatacattttgaactcaatggggaaatttttaattataaaagagatttgcttaggatactaaaatttaagtataaaaatattaaattatttctcgtaagaaatgattccctttcttgccttgtattaattgcaacttttgctctcatattttgtaatttttgagcaatttatactgaacttctttatattgaaatatcatattcataggctaatccagctttttataaggtttaaaaataactttgatcgtatttcatctacacctgtctgcataatgcgtttttgttcttagtaatgtaataagaagaaagttggttcttttcattattgacttcattctacatattgaattagtgtgcagttactatattgagattattagaagtcaagtaatcaatgaaacagacttttagaatctccttagtgtttctgtggttattatatattttcaagaggcctttgccagactgccttacactataagccttttgcacatggcttctgtcttccagcattaatcttcctttctttcttcatctagataaatccttcccattcttcagattttagttcctctcaagtgtcttccctgacctgcctgatccatcagctcccttgaatgcttccgtgttctaattacgtgttctccctttctgtggccttcatcatagtctacagtttgacttctctgtgattatctgtccaact

SEQ ID NO: 40381 - DNA, 1265 bp, Bovine  19866881007045
  misc_feature (1)..(1): n is a, c, g, or t
ncttgtaagaatgaataagagattaatttagaggttggtaaaggtgagcagttgagagcttggggcagggaacaagctttacgtttgcattgacttttaggcaattgcaattaaaattacgcttatccttgttaaaatgcaaacattttcgcactgtgagcctgatattccttcttcagtgtggtgagtacaatttgcttgatatgctttaagtttctaatagtcaagtttccatactctagtacaacaaatatttaggtctgctgtgtgccacgcactgagctggaaaatgataacatccataatcataaaaaacatccttttttttttttttttttcatgtcagagttgcgtattgctgatttaaaccattaaagaggatgaaaatcatcagcacataaactgatcaatccacagttcagtggtgcactttaaaaatggggtttaaccaaatgtggtctctgggttttcttttcaaagttgccacggtaacttgtgcacgtgaaaagtgaaagaataaagaacaaaagctgtcattgtctcatcagagcaatttctcctttcttgcatttaagcagactaatacctggagagagctttttatgcattcctgacacttgatttggggggctaggaaagagattatgcgtatgttaaacaaatacaactttagctgctgcttaaattacagttttgttctttttttacttaaaatctgttttctctagctctcttgtcaacagacatcaaagtcctgaaaccagctctcctatgcaatataaacatggctttcaatttgtttttttaatgtgatgttttaccaaagtcagtgatgttgatctgcatcctgaaactggaaaatgctttctgaaatgtatatttctgttttggtttttaagaggcagaaggctttttccaggagacatttacagactatctcttagttagaaatttgtttcttgacttgtgataaatttttgaaatggtggaatgttagaaagagttgacaaaaggtccttttaatgttctgaagagaaaactgcactttggagaattaatactgctgagagatttactgtagagtttttgcccgctggggggtggtacactctaccagaacacagctttcagaagccgcaagtcagatgttggctgctgccggccacttttcctctggcttaattacaacaaagcctcccgatgagaacagtgaaggcctcgggggcacaagttgggggtgggagggaagagggagtgaggggaaa

SEQ ID NO: 40382 - DNA, 1470 bp, Bovine  19866881007602
  misc_feature (1)..(1): n is a, c, g, or t
ntcaaggttaattcatgaaataatctacgaaacagagatccaagcaagaaaaggaatctcactacctatagcaactttcctgtggctaagaatcccatttactggaattgagcttcttccacaagcataagactcacttttcaaatgtgctagaaaaaaagattcaactgaaaccatcatttgcacttcaaagaggatgtcacctggcatattttcatttccttgaccagaaacaaaagtatcaatttacaagcatctacatttccagaagatgtaaagcctggagtgagtgtatctttcctgtaacagaccccaaataaaaagatgaccctcccccaagaacataatattacatcctcattccaactatttacaaggtagcaatcaactctgtgcttggattcaccagggttctccaggaagtcagtatttgtttaggagcagaacggagcttcttagaaaagcatccagtagggccacctaagcacagccccttgaggaatgcacgtgataataaaagtcagattgctctcaattacatacattgacagcttccacttcacagagccctgaaattacagtcagggaaaaaaaacagtcttggaaaaagataatgtagtttgagaaacggtacatttattctttaaaatcaaacatctttgatttaactacttttcagatttgttcttgacaacgttgcattaacaccgtaacctaaagcaaattcatatttatccaacatacattccatgtgaaaaattgcttactctctagataaacattcaggcacgccttcccacccacatttaggaaaccagaatcattactcatacaagtgtacatcacaaaccgtgaaaagctaactctttaaaaatagccaaatatataatactagcggggactgtactgttattaaaagaatacatatgcagtattacagattaattgttgttctcctggaagattttatgctcaggtcaatttaataaatttgaatatgtcatctactaaattatgaatcaccaagaagacctactcacccagaaattgttctgttgtttcaaatgcaactttaaaaaaatcatcatctcaagcattgagaagattaaattacctgttttttaatttcagcaagcaatggagtgtgtctacctgctggatcctctgccaactgacagacaaaaggctgaagggagtgcactttggatgctatcaattaaggaaaggtggttcattaatctttactgtcaacgcctgaattctgctctgatggctcctacggtatgcagtcagttgcttgcatttcaaaccaagacccatccagctaaattccccttgtagaaagataacttgagcttttcctggttaactgttaagtccattaaaaaaggctaatagcatggcttccctggtgatacagtggataggaatccccctgctaacgcaggggacacaggcttgatccctggt

SEQ ID NO: 40383 - DNA, 1120 bp, Bovine  19866881010128
  misc_feature (1)..(1): n is a, c, g, or t
nattctttaacttctgcttcttttatttgcttattagtcattctcgctagtaaatcatacctgtaaaatgtttatgatgataaaatgtagtagcatcagttcagttcagttcagtcgctcagttgtgtctgactctttgcgaccccatgaatcgcagcacgccaggcctctctgtccatcaccaactcccagagttcactcagactcatgtgcatcgagtcagtgatgccatccagccatctcatcctctgtcgtccccttctcctcctgcccccaacccctcccagcatcagtcttttccaatgagtcaactctttgcatgaggtggccaaagtactggagtttcagctttagcatcattccttaaccaacatttattgccaacttcctacatgccagatcttattcaaagtgcttgtcacataataactaatttacttacaaaattcttatgatgctgaatagagctcctgtgagggtccccgatttacagatgaggaactcaacctatggagccaaatggtggcactggaactcaagcctgtgtctccagagtcatccttcttccactctgcaaagccgcctctcataggatgaaagcttctaagtctcttagcatcctggaaggcacttggtaaatcctccaaagacgagacatattattatcattattggatcccctcacagcttcttgaagaatgctttgtgcaaggtagtttaataaatttatgttgatttgatttagaaagaactctgttgtatcctcttgagcttctaagggatatagtcaatgagagagagcctcttatttttcaggctaatatgatttgtgtggcagcttttagattaagttatcttttatttacagaagaagattaaataaatatgtacaggtctaagaacttcagaatcctcttgctaaaagtggtttagaaacttgtctttgtaagacaagggagagacctcacaggaccaatttctgaaataactggatttcactaaatggtgcttttagtattttttgttaaacatatatttagaactctctcctggttctttctttctttctttctttctttctttttttttttgctgcctcttgcattcagggtccacagta

SEQ ID NO: 40384 - DNA, 1233 bp, Bovine  19866881027952
  misc_feature (1)..(1): n is a, c, g, or t
ncgctgagactgcagggcacaattgctgaagggtcctctttcattcagcactcattctaattttaacttatttggtactgctgtggaaaagctgtttgcctgaaataaggtaaataaataaatgatatcctgagtatagagttcataaaataggatgcagaaatctgggagctaagatttagacccaaggcactaattttcttttaacttttcctcttccacttttattctcccttttctccataatgatcatatcgatcaggttggcagggatgaaagaacaggataggatacaagatttgatcaatttgtttacgcctctctgtttgaaatgggtggcattgtagaatccagcgaagctcggatcatgtcctaaaagactgaggtgtggactgggtggaaggggctgcctggcctttgcggaatccagaggtctcaaggaagagcagagagagcagaccaccctggtcaaggagacccaaagccacggcgccggctgtttcactgaggtctgctgcattgaaccaagtcatgctgggtgtaaatatgaagcagtttaaatagaattcttaattttctcacataggtattacatcttaacatttccgtagaccagtctcagttttttttctgaaggtagagaagatgtatccctatgtcctgcctccctggaaaacaacaaacaatgctgtcttggtttttatcatagctttcaatgctgaccttggggagttactgagctttgagtttcagtatcctcatctataagatagacaaagtaggattgctctaaggattaaatgagataacatgtccagcagttaccatagtacctgccactcagtaaataagcactgtcactattagctcgtaatagcatttcaatcattttcaagtttattatgacatttattctgcctggcagccttgtagtgtgttgtgtaataggtgcaggcaaacttttctgtaaagggccagatagaaagtacgtttaactttccagtctgtacagtttctgttgtaactactacagtatgaaagaagccaaatacaatgtgaatgagtggttgtgtctgtattccagtaaaactttatttacagaaacagctggcaagcagatttggcctggggactatggtttactgattcctgacaactctctatttgctattatctggattttaaaaataagaagatggaagcttattgctaggagaaggcccatgtcctcat

SEQ ID NO: 40385 - DNA, 4754 bp, Bovine  19866881031804
  misc_feature (1)..(1): n is a, c, g, or t
nttttattcttttttctgttttcttctttctctctctttatttgatgaacacctaacaataagactttggaaatccacaattggaaaaataaaaccactattgacagccttttcaatatactggttacattattgaatgtaaacaggaaggttaagaatgtctcccaaattcccttttctattgtccaataagcaaacatttctatactgagccattaatccccctattgtattctcttccctccattctaactgagtaagattagaaatcaagagggaaaaaaaagcagttgagagattaggagatactgacaattcaaactcacaaagagtctctgaatgcccaagaaataagaaaggctggcctttctcattaaaatctttctgaatcagtgcaaagtctgaagccaccacgcaaagtttatctgtaactctgtacacttgagatgtggtaaaataatcaaaacaagattggtttcatttgatattagcttctctaaatgtctcaggaatgactggtcacttaagaaacggtagtatgcagggcagtcaatgcatctcagctgatgtgagaaacaaagaacgccagccagtggcaattatcagtatctatttatcactttctagatgcgaacattagtgtcccatgagataaagcaaacactgctctgtggctgattaccaagaccctagaatacactccacttttgctgctgtgcttctcagtttatttttaataatacatactaattttatggatcactggcatgcagccatatactttcccttattcaaatataattctcctaaatggaagtgtaggaatgaaacaaatgtgcatttccaaccaagagagatatatgtttgactaacttctgtgactctaacctgggggcatattaaaaaaaaaatgaaagcctcaacattttagcaaactcgaccccactttgaaaagatatatgtgaaatttccctgaatctattagagtctttcattattattgttattttaaagaattctcttctctagtttcattaaacttctgacatgaaaaagtatgtgtttcctacagatggaagtggtctggacaggacttaagaagctgactaacagtggcttagctagctccagagtgactcctattagaatggaaaataaatagagtaagtgccaaagtcaaaactattctcttacagagataaactacaagtgctctacagaaagctagaacagctctccggggaatgctagggatttgggtaaagaacaatgcaactgtttctgtaagtcaagtggaaacacttgggagaggacagcagttgggagagatatggaatgagccaaagggtgtggacctaatgtacacccccatttagtccactggcctcagagaccaacaccaggtcagttctgaaaaggaagctaagaaaccttgtgatgaatatgaaccccatttgtaatggagatgccaactatgtttttttttttttttttaatatttggcaatatacaaactatcacctagtctttaggattaataacatctttcaatgcttcaagaaaaatgactttcctaaacatggctaataatttatacatcctgcttttgcaaaacttatgtgatataatgattaacttgggtgcttctaaagtcttcaacaacactgaaaattactcctgaggaactgcaggatacagatggagacatgatttattcctcttttctgtaaataataaaaaaaaaaaaaaaagctgaaattgacttcaaaaggattgtctgaaagttgtaattatgctttagcaaaagactccaataaatcaaaatggttgcatattctgaacaaaactccagaaagaacacttgtgacccactccagagaaatctgagcaactgtctcaatccttagagtacaaagaagtctcagtttgaatttacaacctggtactaaatttgggtataatttaggaaagataaaaaggattgcatgttctctcttaatttgaactccaacatgcttggtatgaaagcttctccgtttgggagaaggtaccatggaatccactcagacagaaggcaaaagctgaccagcagagacaacgtgagtcctcagaagaggagggccctctctcagccctcatcaggactctacctgtaggaatgatcatacacctgagtgtggaggcggaaagtgcattatcaattaggaaacgtgtggactgagctcgattgcatttgtctgtttagaaagagttaaaaatatcataagaactaatgagtgagtagataaaggtagtaagaaaaaaattaagcaattaaaactatagtaaggtgcatgatatggacaaaacaacaaacaaaatacaggatagcaataaggaggaagtatcccagagaggcagaaacgaggctcaagccaggatgcttgcatttcctgaatcatgttaaaaggcatcttaacttttaaattttccccaaggaagatttagtcagtaacatgtaaaaatctgaaactcaagttactcttctatgagtatttattgaagcaatgactatctcaggaattctgcatatgcggcaatgaaccacatgcttatttcccactatacaaatgaaattataacctaaatatttactgcacccttaccacgaacttgttggcttttttttttttttttgataaatgctatttaaagcatgaaactttatattttgaaaattcagttaaaggggtttattgaatatttattgcttgtcaccagcccaagactgagcagataaaatggaagcacatcttcagacgggcaggactttaggtcaccagccctaagcacatgctatgttttcctgttgattgtggtgtccattgtagtcaagtaaacataaccgaagcctctagttaagccattcaggaccttttttacttcctcattttcataggtatcaagggagcttgcaaattgtgaactgtcttctgactgctgctgtccctagatttgtcctaagtctctttacattagactcagtatcactcaactgagaaaagaactatttccaattgtatttggcatgacaaaatacataaatgaaaataaatatagcttatcaactaggagatatgtttaaaatccattattccatttgctgcttctaatttgtggtaaactgagaaactgctacccagtctactaaatttgaaactaaatacatataaattggatcaggataatagcttgaggcaacctctataaagtaccatctgagagtctggtgcacaatgtctgcttgtaaacaccaaacaccctccttaattcatgtctaagtgtgtgtgtgtgtgtgtgtgtgtgtgtgtgtgtgtgtgagagagagagagagagagagagagaaaccacagagacacagagagagagaaggagagagaaatggaacgtgaatgttgtgagcgcatgtatgaatgcaaaccctagaagcaccaatacaagactttgctcaagccatagaccgcatgtgtctctctagggatgtcttttagaaccaacaaaactctaaagcaagaacttattttgtaagtgttttacaggtttgttttttttccccccaagactttgacccatgtttcccaaatgagccctctaatttaagatgcagaatccaggaatacattttttttttttttttaggaatacatttttgactacaaaaatacattgttagtattactgagaatagagagaagtattaaaactgctttgaggagctacatttctaaccctcacttaagactgacaaggcatcaacctttgagagagtcaacgaggatttgcatgctagcaagaaggctgccttgatttttaaagttgatgtcttggtcttaatacacagtaaaagcagactgcctcaggatctccatgctctagccaacagtgtgaataaatctgtttctcagacaaggcagaagatcactaggtgagaaatgcccatcataaattgctctgcatagagtcctgaaataaaagttagatatcagtaggtataactgtgccatatataactacactaaagcctttgtgtggatcacaaccaactagaaaattcttgaagagttggggataccagaccatcttacttgtctcttgagtaacttatatgctggtcaagaagcaacagaatggaacatcgaacgactgactggttcaaaattatgaaaggagtatatcaaggctgtttattgtcaccctgcttgctgctgctgctaagtcacttcagtcgtgtccaactctgtgcgaccccatagacggcagcccaccaggctcccctgtccctgggattctccaggcaagagcactggagtgggttgccatttccttctccaatgcatgaaaatgaaaagtgaaagtgaagtcactcagttgggtccgactcttcgctatcccatggactgcagcccacgaggttcctccgtccatggggttttccaggcaagagtactggaatggggtgccatcgccttctctgtctattcagagtacattatgcaaaatgccaggctggatgaatcaaaagttggaaccaagcttgttgggagaaatatcaacaacctcagacatgcagatgattccactctaagggcagaaagtgaagaggaactaaagagcctcttgatgagggtgaaagagcaaagtgaaaaatctggtttaaaactcaacattaaaaaaactagatcatggcatctggtgccatcacttcaggcaaatag

SEQ ID NO: 40386 - DNA, 917 bp, Bovine  19866881122780
  misc_feature (1)..(1): n is a, c, g, or t
ntctgccttattagatttcacaaatgacatttcctcagtttttaatataacataaaatgtagaactattgtctggtcttgtaaaggaatttcatacaattaattatgagtttctagcataccctaattttatagtagcctatttacagcatctctctgggcactgaatttaatcgttcctgacaaaagagatgggcaaaaaaaaattgcatacacataaatatttacacaatagaagcaagtaaacaagatatttgctttacagtgaaatcctaccaggtaggggaaaaaaagctttgagccattttccaaactttattcattacttttgtttcctagtattaacttagcactttttcagtgtggccttttcacttgtttgctggcttgttttggccatagtctgtagtctttatttatccttcaggggttagtcccttctttgtgatcattctggatagaatgcttcatggaaacaactgcacaacagcactccccacggagccagaatgtgtatattttagtatatgcaaaacactaatcaaaataaattccctggttgagtatgatatagggaaatccatctatctcgtgtttcctatgtaaagcatgagaaactgccataccaaaacatggttttgctaattagtaggacaaaaactgatccaaatgattgctttattgagctgactggccaatttcattaaaaagtgatctctcttatctcagggcttccctggtggcttagaggttaaagcgtctgactgcagtgtgggagaccagggttcgatccctgggttgggaagatcccctggagaaggaaatggcaacccactccagtattcttgcctggagaatcccatggacggagaagcctggtgggctacagtccatgggatcctagagagtcagacacga

SEQ ID NO: 40387 - DNA, 2177 bp, Bovine  19866881177079
  misc_feature (1)..(1): n is a, c, g, or t
ngagggtaaaaacagggggaaatatggaactgtaaaatttcacaacttattctatcaatgattatcatccagctttactatttaaatagcagcacatcctgtgtttgactgtcataaagaatactttttctgaagtggttttcttgagagtactgttacacatggtcattgtgtcctctctagacctttgtacaccagagtgggtcacatttcggccatcccatgtcaccatcacttttaggcaatattaattgatttctggtgaatggcaatacttaaggtagcattaattccagagtcctttccccccagcaacagcaaacaaactaataaaatatattgaattttaatctgcccttttacctcttattccttgaataaacgttagaatttattttgttaacatacaaggaacctctgacattattttcgtggaataaaaattgattcattttcgttcatctgaaataccagatggactgtcagattcagatgatgttttgttgctttatggtaatactcaatgattaagatattgtccagatagattaacacctagaccctggaagtcttatagtctggcatttaggtttaagtatatggtgcatttgtaacactgcatgcaaaccaaagaacatcactgtccattgttaaaatttacatataaattatgtatgagaaattgtttgtaatctaagatagtgctattatttaaaagaattttattagatttagttttcgatttgtaatgtgatttggtaactgctcttttcaaatggtgctttctaaatgtcttgatctttgagacattttagttcagtcataaactgccttataattgtggactgaaaactgctacaagtttgggtaaatacttggaattaatactgaagagccttttagtatccaaatagtttatattttcatgggcttttgagttttaataaagtgaccttcatcgctatgttagattttggaactgcatatgggaattttgtatttttattttcaaaaacaattcaagatttctctgaaagtgaaaatcaccctgttgtttccaagtctttgcgaccccatggactatgtggtccatagaattctccaggccagaatactggagtgggcagccgttcccttctccaggggatcttcccaacccaggtatcacacccaggtcgcccacattgtgggtggattctttaccaactgagctatcagggaagccctcaagatttctctggggatttttattgttcattgggatggtaagttttttggggattttgtaatgactaagagactgtgtaaatcttgatagtattattatattttgtcagtctgcacaagttatacctatgtattgtattgatgaggaaggaacaccacatttaacatgtgaaatacttcatgtgtgttacttgaaaatgacaaatactttatgtgggttacttaaaaatgacaaataaaaaactatcacgtaatagaaaaaaatatgctttgaaacataatttctagtgctatattttctctattatagttaaactgccctcctcaatggcaactcactccagtatttttgccaggagaatcccatggacaaaggagcctggtgggttacagtccatgggttgcaaagagtcagatacaactttcactgtttttcaagtatatatacctgtatgtatatatatgacctaaccaatactgaccctgcttgtttaagtgaccgctgcatgtgtttatagataccactttatttttttctcattttaaaatatttgttgtggctttctaatttcaaaagtaatacatgttcattattaacaaaaaaacccaggaaatttcagagaagcataacaaagaatcaacacagcaccatacagagataaccacagtaagatttccagattttttccatgaaaatacagataatgtacaaaattacaggtaggtaaacacttaaatgttgcttattaaaattgaaattgcattacttcatggggtttcctaccgtttaataatctagttttacatttgatattctatgtactcactttaaactattcccaaatttaacttagaaacaggtctaacccagacacctggtctttaaactccttctacactgagctaaagcccctgcctagttagtgccagccacacttttaaatcctatc

SEQ ID NO: 40388 - DNA, 3276 bp, Bovine  19866881198799
  misc_feature (1)..(1): n is a, c, g, or t
naatgaatgccttggcaaattaatttttgattgtcagagatccaaaaagaactgatgtcattagaaattatttgtccaaagctttctttcacttgactaaaattgaggaaaaaaataaagttgtttttgaaacaactgtgtggaaactcagggcttttaatattttataattggcaccaaccataattggcacaaggaaaggaagtgaactaaagttgtgttaatataaacacaaatgttttgtttccatctgaaagaagaaaggtttttgatgttctttggtggagatatttattgcagaaaagcctattgccagtctacattccactgcaattgatttttaaatatggagctaaacaggaaatgtcatgagtaatgtgaccatctgtcaagtgtaaatgaagtcagagcaagtagatggaatctgcacaaacaaggtaattgcattggagttccgtctgagagattttaaactcaaggagctatgagtccagtgtatactgtctgtgtcacatacttgtagttcctgtgcacttgggtttattgtagctcttgtcacagctctgataatttctgctaagtgaatttaaatagcatctcattccagtttcatagtttccatctgatatgctttggaatacctggaacttcatttctttcgttctcttttgaaatccttaggagttctttcctagaggagaaacttgttttcgtagtaattataaattgggagtgcaggtaagaagaaggaagaaacacaaaagggtgctttatgtaatgccacccctttgctttgttcagagctgtgaaaaaggaatcaggagttgttaaaactcacactaagggatttgtagaaggcatcaaattggtgacaagttacaataaaagttttcattgcaaatgctctcaactaacaatgtaagagctcatcttagtaatcagtggagaaaaagttctttcaggaaaagtatagtatattctaaagtgatttttttttttgagatgtagatagtcttttaagtaaagctttaggagtaaaacgatacatctatcattttggttatacgtgttatatacatttttcttgaaatgtggatggctttacctttatcaaattacagttttattatttcattgctgtttagattaatttccattaactctgttgtgattcatagtttaaaatgggacacaaaaattgctttcatcatttcacaattttaaaataagtatcaacataaggctatcctgttcctttaatggatcagtttaatccttagtaatgtaaccctttaaagtctacatgtcaaagatagcatttttacttgaagaaagtaaacataaaagaactttaaagtttttagtatctgtttcctttgccgattttaatggacttcgaaaacaatcaagggcagtgggtggcctcttactggtagaagccagtttttaaatgcatgcatttcttcttccattttggcctcttacctgggacatatttactgtcttttaaaattatatatggtaaattagcttattgaaatctaaataaggacatgttccttttcagcaatttgaaatgctgccctttataaatttaaaatgattgaaaaacccagacacacacattcatgctcagacacacactgcatgtatcaaaggttatagcaaatacactaatattgtatttgtatcagatacactaattgtatcaaatatgctaatgattatatttgtatcaaatacattaatgattgtattacttgcatgttattagccacaaagaatatacattattcacttatagtttcatgcatatttttgatgtcttgctaacacattgttaatattaggtacctgatattaggtactgtgtgtgtgtgtgtgtgtgcacacgtgttgtcattagtaaagtcgtgtccaactctttgcaatcccatgaactacagcccgccaggcgcttctgtccatgggattttccaggcaagaatactggagcagtttgccatttcctgctccaggggatcttcccaactgacccagggatccctgcactggtaggcagatcctttactactgtactacctgggaagtccagagaatgtgccagactcttttctaactgcattcagttcaatctgttacttagttttcatcataacaatttaggtatgtattgttttaatctccttttactaatgacgacatgaaaacttacttaagaataacttattcaaaaacatattcctagaaagtgttgacttgacagctgaaactctaattggtcttcgtgcagagccataatgcatagtggcatcctataaaatctgttttgtagaattcatagtttcctaaaatactatgggacaactttatttccattgaattctgctatattcccctctccacccaaccctgattcatctttattttctttaatggcttttctcagtctcctttatttcaaatgcagaagagaagtcaagagcagagataggtatgccatgaggatatggctctggatgagatcaccaagaaagtctgaaacaaaactaatgttgaagatagaagttcccaggtggtgctagtggaaaagaatctgcctgctgatgcaggagctgtaagagacaagcacaggttctatccctgggtggggaagatcctctgcaagaggaaatagctgcccactctggtattcttgctgggagaatcccatggacagaggagcctggtgggctacagtccctggattgcaaagcgtcagaggtgtatgagtcaaatttgatgtagtcaaatttatgctttgtggaatagaaattgactgcagttaagctctactgagaaggactatagtcatttattgccacctccattgaaatggacttcccaagtggctaagatagtaaagaatctgcctgatgtgcagtagatctgggtttgatgtatgggttgggaagatcccctgagaagagaatggctacccactgtagttcttgcctggagaattccatggtggactacagtccatggggtcacagagttggacacgactgagcaactaacactttcacttcagatacaagtgttcagttcatttcatgtgattcactcagtcgtgtccaactctatgcgaccccatggactgcagcatgccaggcctccctgtccatcactaactcctggagtttactcaaactcatgtccatggagtcggtgaggccatccagccatttcatcctactgttgtccccttctcctctcacctttaatctttcccta

SEQ ID NO: 40389 - DNA, 787 bp, Bovine  19866881256653
  misc_feature (1)..(1): n is a, c, g, or t
natactgcaataaaaattaattaataaaaataaggttaatattctttttccgttcctttccacctccctcactctcccatcaccactgaattattcaccacagaccaggctacagacagaccctgataatgtccgtgggtgagggagggcattgtgattccttttgtgagctttgtctctttgatcatctgtagtcagggtcttacacacatagcacacagtggaaatagaaacaattgtctaaatcaggggtctgcaaactttttctgtaacgggccagacagtaaatatcttcggctttgtgggacacgtggtctctgtcacaactattcaacttgtggaatgtgtgaaagcaggcttagacaatctgtaaacaaatgaacacagttgtgttctaataaaactttatttacaaaaacaggcagtgggccagatttggcctgtgagctgtactttgctacccctgatctagactcatccattcaacagatactctgttcctcatacatgaaagatactgtcccaggtgctggggatactgctgaaaatgaaataatgtccttgccccagccatatcatcaaggtatttattcttgtccatttctcacactgaggagaccaagtgaagacactttttccaaaaaggaatcatcatctgtgtgagaggctactagaagtgtgaatgaactgaggactgagaagtgaccaccagattcaataaggaagaaaccatcgggtgacgagagcgtgtccctggaacagtggagatggaagcctgttgagtgaa

SEQ ID NO: 40390 - DNA, 1290 bp, Bovine  19866881285410
  misc_feature (1)..(1): n is a, c, g, or t
ngatactgaaaaaaattacagatacatttaatttattatttaggaaacgtgaaagtagaaatagcagttagcagatggataaagtagtctctagtgagtattgcaaagtgcccacagaggaaagtttaagtgatgtattgcttaatgtgaggttttacaagtaatgcctttagggctttgctcattattgttgaatttcagtggagtattttcttgaactcttgctttcttggtaagtgaaaatggaaaaccaagctgtgaaattaataattacaatgttattttaaaaagtatcttctgtcaaatgttttctaagcttgaaaattattcaacatataaaacaatttggtaaatttaagaaaaaaatttaaagcaatttaggaaacagttacttttgttaaattgcattaaaaactaattaaaaccattataaaaatcgcacagagaacctgcttaaacggttgccaataggcaggcatttctcctaccccaggacacactttaaagttgagaagatgaatctgatgaatggaagtcaaaagttgttggtcagcctagagtatgtacaaggtgatgatcataataagcagagataaagctggtagctgaagtgtaaagtttttaccaattcaaaatctaatatgtattggtttttacattttcaaaccagagaaagaaaaaatattctacactggtatgaaaaggaagattaatttatttttgtttgtttagttttacaagtgtgaaactgcttcctctgctctatttgatgtgcaaactcacatggccatgaatacaatggtggtaataacgtgggattaacagaaagccgaaaatctcattcagttcttggaaaatgccgttctcttctccccagattgcattaaaacaaaaggcaaaaatacaaaacatatttctctggagaggatactcgttcaaaaatgaagattccttcacaagttcctactccctttactcaaacagtccaatgcatgcgtgattttgtttcatattttatatcttctcttgcctttttatatttaaaaactatagtgctaaagagatttgttttattttgcatattagaggctgtaatggtctttccatctgaaataagcagctctgctcccatgtttagacttccctgtttctgagctggctctacgtattcatgcatatagagacattgtagttgaatgtgactgaggaaaaaaaaaatgacccccactggcatgcacactgtggccaggtttccacagcgtcgacttcagaggctttatgtctgcatag

SEQ ID NO: 40391 - DNA, 854 bp, Bovine  19866881381873
  misc_feature (1)..(1): n is a, c, g, or t
nctccccccacatcatcctagaagtgaaactgttttactgaaagaacactatacaaatagcaattcatttttaaaggttaaattgtaatacagtcaccataaatatgttattgaaattatcaggtatttaacagtctttttaaaactaatgtgtccatactctcttgggagaggaaagaaagaaatccagcattaaaccccacagatattttagaaggcatttgcttaccaacacaagtgtggtttagcagtcataagcaagttactacaagccaacagctttactttttggcaaagcattgttctttcctgggtggtctgataaagccgggcaattccctagaattaccatgtacttaaactaaatgctagtgaggtaaaattaaaaataacaacaagaataagcctttcaaagagccttttcatatcatttgacatggtcttatgtctttctgtttaaggttttcttatcaccactaagccagaaagacatgtactattacctttgtgataatgatttaattgttttatgttcttgcccagccacacaggtggcacttttcacggacaaagaaaacccttagtaaatagacagcccaaaccccagagacgcgggatctgctctcacactgcgttaaccgtgctggctggtgtctccctgcgcagccctgcacagcttcactctgccaaaaacaaacacgacctactggtttatttccagctgtcgctgaggtttttcatctgattttatttacttgtctaaagtggccgtataacaagcaccaaataagccacaattgcccagagcagaatataaaattaaagggcttcaattaagaataagtaataacaca

SEQ ID NO: 40392 - DNA, 1174 bp, Bovine  19866881396963
  misc_feature (1)..(1): n is a, c, g, or t
ncagtgactctgacctgttattaggaccgaagagacaaacgcggccaaggttttgcatcgggcattaggagaacatgaacgcagcttgttcaggctgacttgcatccttgattcttgtgttactgtctgaggtcttcctgacaacatcgggccattttgtcctggtggctaaaggaaagcacatcagtggtctgggcccagtcgggtcagagcgctgtcctacctggtgcttggtaaagctgtgagatacctgatgtctgttcccaggatgccagccttctcttttaaactctcagagtatttatcctcctctgtattccccattttctgccacagctagtcaattataccacagggttggttgctccaaatatctattatgtactctggaagaatctatcgtggcagatttagactctggctcttttaaaacacatttcagcacacggtattattttaagcaagaggatttctgagcctctgaatattatgttaagtgtaaggtcaccctcaatgatttaattttgaggaccagcactttcaggatttgaacagaatggaaaattaagccacacttggagcttcttaaccttggaaggagatcctgcaagcttctaaacattgacttatgggggactaaactgtgggacatagtatgccttaacatggttacaatttctctcctccacagaaatgaaatggatggactgatcatctggtattttttttattatggaataacttctcctactttatcttaatgtctatggtgtttcatttaagaagagcttaactgaaccttatatcgaaatgaactgtgttgcaatagcattggttcccagctggtcgctccgtgaaggcagagaatgctgcattatctccctgcccatcctgaactcttttaagaaagtcattgaggtacagacacttgagagtctctctctcttttttttaaattattattttttttattggagaataattgctttataatatcgtggtggcctctgccatacatcaacatgaatcagctatgggtattttattgctttgcaaagaaattccagtttagcatttacctgcttatggtccccaaatatttctcaaaggaagataaatcaagcttgttgggaagttcctagtcatatattatccagtctcattacctgaacaa

SEQ ID NO: 40393 - DNA, 810 bp, Bovine  19866881410755
  misc_feature (1)..(1): n is a, c, g, or t
ncaatttcaattattctcaagtgcagctatgctgtttcttttattctgctgtttgtgaaacagcaatctcagtaattgaatattaattttcaccaagaaagcattccaaactcttcttcaaagagggagttaagcttattaattcattccttaacaagaggagaaagtgcatgacttgctgtataaggaataagaactcctaggggccaagaagatttaatcaaggattgaaggggaaggaaaagggaataaaccagaaggcagaagaatgtgaggtcacctgactttttagaaagagaaaaaaaaaaaaaatttccagagctcagccaaagtgaagtaacaatgcaaagccatcagaagtacaaattcctcctgagatataagctaacgcattgactttcctttattatgccactttaatttctgggaaaattccaaagcaaaggtttatatttcatgatattgtcaactttgcataagactacttgtgctactcatgacttacacagccatagggacacaattgatttttttctccctcataaatctggaaaatgttctctgccttcccagtagatctctaatatttatttggtgtctatcctaaaataacagttcaaggttggagctatgaaaacagttggggctctaatttaccatagagaaaacctactggaagaatcagtgataatacaaagcactccaagcttgcccagaagatactagaaacacctccacctagacacacatactatctttcctaatagattctgctacagaaaaaagttacagagtgacacgtgacacagg

SEQ ID NO: 40394 - DNA, 1255 bp, Bovine  19866881775216
  misc_feature (1)..(1): n is a, c, g, or t
nctcccctttatttatatagaaagacgggaaataaaagagaaagaggtcatcttatcccttttcaacaactactatgatgaaagatgttgcctaaagaaagaattgaagctaaatttctaggaaatgtctctagtatgttaaagttctttgttaatagctgattaaaacattttactttcacaggagatgctcaggtccagtgtatttcaaggaacagaaatataaaggaaatctagtatgcttccatttttcccatgaagaatatttgaattaagttttctttacctcttgaaagaatacctgttcttgcataacctgtgactgcaccagatattctgagaaagcagcaagaagcaaaagctggaaatagctatttcacagcaggtaatcatacctcaggatgtagctactgtacaaagtttatacttggataatcctggatgggaataaaggtggggggtaactgcctgaaaaacctattactgtacaggccttagcatcatgaatggctttcttcatgaggatctgaagttactatctctgaccacattgcacagaagagcccataagaatttcaaagagagcaatttccactaagggaattaagctacacaaaaggaaccttcacacagaaactctataagaaaggaaaaaaataggaaaccatgtgttctacacagtaacaggaacctgaattgtttctggtccctactttaatgagcttgcccaccacgctgaaccacagctggaatgttcattgacaacagcaagcctgatctggaggtgtgtgcggcatagaataaacagtgaagaacatttccaaggactaaacaagagtttataagtcccagcccctcaccaggaaaataatatatgtgcattggattttcactcacgcaaaatttactcacatcgttcaataaggtaggaaaaatattaaagtcttttcttttcatgcctgaaattataaaggctaactaatacctaaaggtgtagaagaaattatattacatactagataaatataaatctataattctccacccatggagaaaggtgaatcatattttagattagaacttgaagaaagataaatacattgtgaaaacatgttatgagctagaatataatgaaagatgttcataaacccatttaactatgtactacaaaacatacagtaaaataggaaaaaaagaatttaacatgaaatggaattttccacttagataagatagatgtattagctatataaat

SEQ ID NO: 40395 - DNA, 1178 bp, Bovine  19866881816023
  misc_feature (1)..(1): n is a, c, g, or t
nctttttagttcctcttcactttctgccataagggtggtgtcatctgcatatgtgaggttattgataattcttccccacaaacttgattccagcttgtgcttcttccagcccagtgtttctcatgatgtactctgcatataagttaaataatcagggtgacaatatacagccttgacatactccttttcctatttggaaccagtctgttgttccatgtccagttctaactgttccttcctgacatgcatacagatttctcaagaggcaggtcaagtggtctggtattcccatctctttcagaattttatacaatttattgtgatccacacagtcaaaggctttggcatgggagggcccaatctggcagacaggatgtagtaaagcaagactcagtcaaaaagtttcaaaattcatatcatacgccagcaagactaaggtctagacatcatgacctgggcagcagctgtaacagagatgagggctccctgtgtagtagtttagccaagacacaagtttagtgtatcttgggttactctgactcaaccaggcctaaatctgaggcacatactacatgcagccctaagataagttcattgctacagccagactctggcaaataaagactttctctggaatcaaccaagtttctctctagaggcaaaccttactttatctgtgcctgtaaaacaaatctacacagagattaagacctcatttaactaagagtgctctattgccatgtctgtggctaatgagcctatacagataagcaaatgcttagtgaggtcagtccactctgctttggagtccttccgggtcctaaatccatctgaaacagagactgagatctggtagctgagccttaggtgcaatatatatatatatatatatctccagagagtgattaaggatggcctattcagatgcttgtcaaataacaaaacaccatcactggaaatctttttaaatgtgggaaaccttaaagaccttacttaaaaactttactcaaggaagaactggtgaggaaggaaagtcagattcctaaagcctgcttcagcaatcatggagggctccacactgccacccaaggaaagctgctatattctactgtaggactttttgttaaccaaagacagtaaagctggtatcagagataagccacgaatcaataaagaat

SEQ ID NO: 40396 - DNA, 1870 bp, Bovine  19866880397169
  misc_feature (1)..(1): n is a, c, g, or t
nctgctagtccttagaccccaggcatggccgtagaattctcagcgtcaccagtgagggatgctcttttattcactggtagaaggaaacttgggtacgtttcatatgaatgcctgtaccaggaactgtccgagttggggatagggaggagtgagagggagaggaaataataaatacacgttttcagtggtacccattgccagggagaaatttaaagccacaaaggggtgttagggtaccattttatggaagatggcatttgagagaaatcctgatggtttgagggagcaagccaggtgggtgtcgtgtcacacggcagtgtctcgccccatgaagccatcgactacttcttcacaggcccacgaagccgtcatccatggccactacccggcccccgaggagaacctgcaggtgctggctgccctgcggctccagtatctgcagggggattacgcaccgcacgccccggtaccgcccctcgaggaggtctactcgctgcagaggctcaaggcccgcatcagccaatccaccaagagcttcacgccgggggagcggctggagaagaggcgcacgagcttcctggaggggaccctgcggcggagcttccggacgggctcggcgatacggcagaaggcagaggaggagcagatggtggacatgtgggtcaaggaggaggtgtgctccgcgcgggccagcatcctggacaagtggaagaagttccagggcatgagccaggaacaggccatggccaagtacatggccttgatcaaggagtggcctgggtacgggtcgacgctctttcgacgtggaggtgagagcgggctgctgcttcctggaccaggctccacacctgtcagtgtgaccctcggtcaaggtcaaggggaaggaggactgggtggaacacgtggctctcttaccctctgaggttgcgtgcatgctaagtcgttcagtcatatcagactccttgcgaccctgtggactgtagcccactgggctcctctgtccatggattctccaggggtgaatactggaatgggtttccatgccctcctccagggcttcttccccacccagggatcaaacccgtgtctcttatgtctcctgctttggcaagtgggttctttaccactagcgcaacctgggaagccctgcccttgtaggttagagctccccagttttacccttcacaccctcctgtacccacccaaagtattcttcctccttttcagtaattacttgtaatgttagaagcaagtggaaaattaagatattatttattcttaagtaactgactctcattcaagccgtacacccaatgaaaaagtgctggtaaaaatctgcattaaagtttttaaaaatatcttagcagtatgtccataaaattagaaaatttggatacacttggattttaattttttttcccatgactatttgtagggaaaaatttcttttacacaattggaatttggctaagtttgcatcaacccagtactgattcatatcctttttctttttttaagtagaccatttattggaagagaattttattaatgatcaagatcaagccttgacaaactgcagcctgagggccaaatgctgcctgccttcttttttttgtaaataaagttttattggaatacagcagtgctttcttttatgtatttttctctggctgctttcaggctgaaatgacagagttgaatagctgtgatcaataccacaaaacctaaaatgtttgccgtctgttccttaacagataagtttgccaactcttggtctagatgagcatctatttttcttatgatcagagtcattcagcatgttatttgttgacttttaaagaaggctttataaaaccctaaatattgatct

SEQ ID NO: 40397 - DNA, 1636 bp, Bovine  19866880407526
  misc_feature (1)..(1): n is a, c, g, or t
ntctgttggtaaacgaatgagatcaaccaccatacacacaaaaggccattgctgctacttgtcacaagatgtattttgcaggaggagctgaaactgcacagcacatatttggagaatttccctctatgatcctagattttgtatttgaagaacacccatccaaaacaggattgaggcggaactagagatagacaggaatccccaggcggcattagtggtaaagaacccccctgccagtgcaggagatgtaagagatgccagttccatccctgggtagggaagatcccctggaggagggcatggcaacccactctagtattcttggctggacaatcccatggacagagaaacctgttgggctacagtgtgtagggcgcaaagcgtcagacacagctgaagtcatttagcatgcagcaataggctgcttgatttgatgggaaattactgtcgagtttctcgcctgtggccaccttcacatagctaattcacatggccaagacagtggtgatgttgagaggtggagagtccaagcaagatgctgaatttaccagttggtgttctccaaatgcttggggttaatgagttggtcagaaatcaatccaggcagtcagagagctaccatttctcacgtcttgtatttcagttgccctctgcataaagacacattgaatgtgttcagtacaccatgcagagggctgggctcagagcccttcttgtggtttctgtgtcctgtttctgactttgctgatctgatcttgccccaactcttgcccgccccccagtgcaaggaaggtggctttccccaggacctctggctgggcgtcagcgccgatgcggtctctgtctacaagcgtggggaggggaggccattggaagtcttccagtacgaacacatcctctccttcggtgcccccctggccaacacctacaagatcgtcgtcgatgagagggagctgctctttgaaacaagtgaggtaagaggcaaacctttcgtccgtggccttgatgaactagcaagacaacatcccagttcctgatgcctttgaccaaatagcttgatttgcatatttcgctctaagacataggaaaatacagtatggtggtccctcccctgctgcaggtttctcacaggccaaaatctgacagtcccacgtttcttctgtatacctttgcaatggagaaatttggttttcagctgtcaggggattttacccttgcaggaaaagaagagaaagggaagtgacataggaatgaagagatttggtttccagctgtcaggggggtcttacccttgaaggaggagaaagggaagtgacacagaggtccaaaaaattatatataatttggcaataaagccttgcgaaaattattagacaaggtggcagtgggtcacagccatgggactggggccaggcagcgcccacggagcaggagggtgagtggcagcccagcctgcgaagagctaattctcacaataaaaatcacaaaacccctgtatatatgccatcctactccaaagcataaaatgtagtagtaatcatgatgagaatgcaggaagcctgttgaggtctccacacagggagctgccagcaagcaaaggtgagaaatgggcgtaatcccaagtgagggtgaggtg

SEQ ID NO: 40398 - DNA, 1364 bp, Bovine  19866880508926
  misc_feature (1)..(1): n is a, c, g, or t
ntatctttaccataataagaaaatgagtatttgttatgtttgaaccaaaatattagtgtattcagctggtgaatatatatatatagtaaaaaatattttagatctaaggagactgataacattacttactactgcctaaatatttttcatcttagtctctacaactgatactttcaatttaattctatttgttgattgagtatctgctatgaagtagatgctatgtaaagctctgggggctacagtgattgcaaaatcttccaggattttggaggaatctggcaggtaatgatgactataatataaaaaatggtgtggtaattttttaaaatagaaagataagaagcaatggatcaataacttacttggattctgtatgtgttggcagggatgttaagtcctccgggtattcacatatgctttcttctattcctttgtggaaccagtttttgagcatccacattggatgaaggaggtagtgttttaataggcagttggtgacacccaaatccctcacccacacagagctaacgtcctattccttgtgatctcatgaaactctaaccaggtaagatagttctctctctttaacttcttcatccaattctccagttcacttgaacctatgaataaagaaactgtagaagactgtaacatattcactctttttgaaccacaaataaaagcttgttcctcaacaatggtggtccaaaagtatcatctgtgtcaatataggctgctttagaataatctagactttatcagatttggtcgactcatttgatttgtgctccttatttgagaagagacaattaatgggaagatattgaacatttcagttgaaatgctgagtctcctggtttgttgctgagacagctactttaattttcaaaagagattgcaaaaattgactcttttaaatgttcgtttaactacacagtattttaagaatatcagcttagacaatagaacactaagaatacataccactcaaggcttaggtaaacccagaatatttcacaccatgcttgctagcaagtggaatatattaaaaaatacttaaagtacttgtcatttggcatcccttgcccgggtgaggatgcacatctctccccagcaatctgaggaagttctccaagtcctggtcctcatattctcttcgccactaagagatggagccactgcaactcaggctctcgatgcagtagaatttcagtgctgtgccaattgttaggctaaaagctctatagctcatgtgatcttgggcaagataatcttgcccaaactccagttttctcatctgcaaaacaagcacaataataatagtatctataatacttcatagggttattaaaggtatcaag

SEQ ID NO: 40399 - DNA, 1207 bp, Bovine  19866880609834
  misc_feature (1)..(1): n is a, c, g, or t
nagttttatgtctgagtttattggggaagaaagcagtcatcaatttccttgggcctgtagccttactgaggcaccaggtccaccaatgggtgtggctgggctctgttgctttgtgtagagttcttcctacgtacacgttattttttcccggatgtataaacggatgtgagttcaggactgcgaagaaagaagctggccctgaaatgtgtttatgcaaatgaatcaatttaagcaaagaaaatctgataaagtcaatttttatcagatggttttaaaaggttagtgagtcaacatgctgaatgggtccacagtcaggaataaataattcacagcatcccaaatgagccctattacagcacagctgattcagtcatattttatttatctctggactgaagaaaatcaatttgaggagatttgcagggcgatcccggtatcctggtacttacctgctgtggatgagtgggtaagcaccaggataccagatgtgttaagttagatgcttcttttcaagtgaaacagctgcaaaactttctcctgctctttctacctctctggtaagatctccactgcaggtattcaacaccaccgcagttttcgtgcatttgttcttctcagtgcacttctgacttgtaatttaaatgatggctctgggattctaatagtcagaatgacatttatgttagagtttagttcttctcctttatccatgtcttccctaaacgtcctagctgggcaatgtcagatcttctccttgagcttttattcctgtgcccgagaaagtcttagcacttcctagtgcctgacccttcatgaggtgataggactctgagaaagcaacttctgttataagggtgctttgggggaattttacccaaatttgattgcttaaacatttgtccctcgatttagatagctctttatttagatgcatgagtgtgtctgtatgctcagtcgtgtctgactctttgtgacccctggactgcagcccgccgggctcctctgtccatgggactcttcaggcaagaatactggagtggattgccattcccttctccatcatgagcatggagaagcaggcaatcccagctccctgctaggcagggcacacatcatgaaggtagcgtagtgggtgaagtatattttctggtgagagggattcagttcctggctcccggaattgaagtgtggtcagttagatttctta

SEQ ID NO: 40400 - DNA, 858 bp, Bovine  19866880749209
  misc_feature (1)..(1): n is a, c, g, or t
ntttaggagacggagagggaagttccggcagttcaagagtattcattatttaacaatggagtttgtttcctgatacatttgccctaaatatttctgaatgaaattcatcacaatagctatcttggtagcagactttaagccaaaacagatattaatttcttggattaaaatacaaatgagacaatatattcagctggagcaggggctagcaaaggacagccttggagtcacatctggcttgccacctggtttgtaaataaagttttattggaacacagccatacattgtgactgttttcacagggcagtggcaaagcttaaaatatttactgtcttgccagttttagaaaaagtttgccaactgctgagttggagaatcaaagccagggaaaagatgcactcaaatagcacaaactgaattgtgttccaagggtaactctacacgagattttgagaaatcaatatgcaaataaaatataaaatgtcaataatttcgaaatgtattacatgttgaaataacatctcagatttattgggctaaagcctaattccacaaaaattccttccttttaaaagtggccactggaaaaattttaattacatacatgactcacattttacttctactggacaatgctgctctaacaaattaggctgaacctctgccctgtaatgacttgggcagtgaaagaataacaaagcttaatattgtaattctactttgaaacttggagcatcttttatataaatgaattgtcaagactattttaatacaaggcttatcgagagacaaacaacacctatcacttctcatgaaaacattatccatgttcaaagataaaagcaacactcacacga

SEQ ID NO: 40401 - DNA, 611 bp, Bovine  19866880756000
  misc_feature (1)..(1): n is a, c, g, or t
ntaaatttcttcctgccttggataatatttctgtgggtcggtaatggaatgtcatacaccagtaacagaagatcagtaaacagctgtaagtggaacatcttatacacttgactatgcctggaacagagcgccacctggatccatgacctcagtgtgagctgacaagggggtcttttccaggcagagataaattaataatggaaatttacttcctcctgcatctttttatctggcaatgccctgaatctctcataggaccttgcttctattaattcttaattactggagctagggactatgaacagtattttggaacttttcacatgtttgctgaagctaagtgctgcaaaaattcaaggaaaagaaagaggaacaggactatagtatggacagacagatggtccttaaaaaacaagatttttctagagtcgggaaaggagaaaggtgagcacttggggaaaagggaaaagcaaggtagggatggaaatttctcccgtggatcatcacatgcccaacgtgccagagaaaggggtttaaaggaagagagatgcaggcaggaacgtgacccgtcagaatcaggacctgggcttcgatgactgacgtgacatgca

SEQ ID NO: 40402 - DNA, 2031 bp, Bovine  19866880791331
  misc_feature (1)..(1): n is a, c, g, or t
ngagcatgataaaataaaataaatctacattatatgatggaatatcaacactgaaaacactgacataactctggtcattcaaacatagaataattgttaagatgtattggagatagtagaaaagaaaacggtgtcctggagagtttttatatctgttatcacctccgagaaataaaaaggaaatgcccacctggatgctggtgtgttgattaattaggatacaagaaacaagtcatattgttgacccttagcaaaagcactgtgaggcaggtgggcaagggtggtagataagagttctttttactctgcgccctctataacatttgatatttgatatttgtccataaacatgatttcaaaaatacagcaatcaaagtcttaatgaaagtgcataatacagtcgtccaggttgttttttatatacaagtatttcaactgttttgcttgtgtattttaatggtaaaaataagaggcagagggtagcactaacatatacacactgctgctgctgctaagtcgcttcagtcgtgtccaactctgtgcggccccgtggactgcagcccaccaggctcctccgtccctgggattctccaggcaagaacactggagtgggttgccatttccttcttcaatgcatgaaagtgaaaagtgaaagtgaagtcactcagtcgtgtccgaccctcagtgaccccatggactgcagcccaccaggctcctctgtccatgggattttttaaggcaggagtactggagtgggtgcccctgccttctctggacatatgcacactaccatgtgtaaaacagacaggggggaagctgtcatgtagcacagggagttcggcttggtgctctgtgatgctctacagaggtgggatagggggtgggtgcgaggctcaagaggacagagatacaggtacacttgcagctaacttactttgttgtacagtggagactaagacaacattgtaaagcaactaattcaattttttttattaaaaaaattaaggcaggaataatcatgacctttacatttgatcctatgattctcaagtaattttataaaccatatagaggtcaacttaaaaaaaaaataacaaagccaaaattattttcagaggtatcttggcagtaaattcattagaaaggaaaatagcttttaagaataagagccaatactcaaatgttggtcttttgacactagcattaatttagaacttgagaaaatgatattttaaaaacctgtccaatccagtgtgtacatggtagattctttagcttctttgcaaactatcaagtctttgatctttgctctgaaataatttcacttgtgttgatttcatatattaaaaaaaaaacttgatcttaatctctcattttctttcatttcttcctttttaaccagttgaatttattgcattttttcatcaagtggaaatgtctctttattaagactgctggactgagttcataatgtgcagttaatctatagcagtctttaaaataatatgccaagattttaaaaagattggagttttatgagtaaaattggctgcttcatttgcaatgttgtattaaaaggccttcaggtaattttcctaagaggctaagaatcaattgagttaaaaagacacaacactttgtatttaatggtgctggcttgttcacatagttcagaaatatttttgctcaaataaatgaacaataattgaacaataatgaacaataattcccactgcagtgggaattcaaaaggagtttattaaatcagtttctctaatttttgtataggttttgttccagtcttaaaatttctagcattgttgactccagtcacctaagtttataatcccctcacttctcttaacttcgcctcctcttctctgtcctccctgatcttccctcaaaaggaggagcatctccataagagatggttcattcattcaacaagtatttcttgcatgtttctgtgagtaggcttccctgatagctcagttggtaaagaatctgcctgcaatgcaggagatcccagtt

SEQ ID NO: 40403 - DNA, 1194 bp, Bovine  19866880842278
  misc_feature (1)..(1): n is a, c, g, or t
ntagaaattaggctaaagttcttaatataaaaagagttctaacaaatcaataggaaaagcctaataactcaattaaaaatacggataaaagttttctgtaaacagataatgcatagaaaagataattataatggttcctgaacataataaaaaatgctcaagctcagagaaatgcaaaaccataacaccatactggatagccttttttacctatcagatttacaaatcaaaatgtttgctaaaatgctgttgctgctgctgctgctgctaagtcacttcagtcgtgtccaactctgtgcgaccccatagatggcagcccatcaggctcctccgtccctgggattctccaggcaagaacactgcagtgggttgccatttcattctccaatgcatgaaagtgaaaagtgaaagtgaagtcgctcagtcgtgtccgacttttagcgaccccatggactgcagcctaccaggctcctccgtccatgggattttccaggcaagagtactggagtggggtgccattgccttctccaaaatgctgttggcaagggtataaaaagaaataggcagtcacatgcattgttggtaggagcataaattggtaacactccaaggaagtataataatgcaatgacagccatcaaaactacaagggcacattccctctgatccaacaattccacttctgggacttcctcctacagcaatacttgcttacatgcaaaataatgcatgttcagacccttagctataacgctgtcatagcaaaagtttgtaaagaatcttattctgtcagtaggagacaggttaatgtgtgacatccatacagtgggactcagctgatcacaagaaagtgatcgccaaagtgcgctaagaagaaaaatagcccagacagtagtccacaatttgcagagaatattttgtatttgttgaaatatgcactatctggaaagatacacaagaaacaggtaacactggttgcttctggtaggaaagtgggtagccagagagagacataggaaagacatttacagactgtttaactttttgtaccttaaacttgtgaactctgaggctattagctatttttttaataaagtttaaaattaataattttaaaaacatgttcctcattggtaaaatgagagagatacagccctatgactattgttgcccaatttaccatcatacatatat

SEQ ID NO: 40404 - DNA, 812 bp, Bovine  19866880926911
  misc_feature (1)..(1): n is a, c, g, or t
naagactattcctggctattcctatccagcgtctattcctggcttagccaagtaaaacaatgaatgggccaaaaaataaaaggaatcatgtggggatccactcaaaaacacagaaattcaacctagatatcactcttgcaaaatggtttcacaataaacattttttggaagcaagctaaaactaaccccaaagaaaacagaggccattccagtcccttcctctgctccaaagttaagaaatatcactgcttcactgggtggagagtgcaagcttagtcaagttttgtttggtccactcaatgaaaaccaaaacgttctgcatttcttgtcaacactttacacactgggaaaattcacagaaatctacttatctagtccctctgtaaaaatgagaagacctggcaagatggagccttaattatctcaggtctgtgagctcctgttgaccacagtccccaccactccctatagcacacaatctgcatcatctcacttacccttcttacctgtcggcccctaattggcaacccttttacccagtgcttctttttttttttattggcagtttagttgctttatgatgttattttctgctgtacaacaaagtaaatcagctatatgacatgcatatccccttttttggatttccttcccatttaggtggtcacagagcactgagtagattttctgtgctacactggaggttctcattagttatctatttcatacatagtagtacatctatgtcaactataatctccccattcataccacccctgcctttccccccgtggcgtccacacattcattct

SEQ ID NO: 40405 - DNA, 1612 bp, Bovine  19866880964540
  misc_feature (1)..(1): n is a, c, g, or t
ntgtgttttattggtaaatctggacagcaaatgaaagtagtaattcagtttgctctggcctgggtgtctgcccatccctacttcaaccccaccctcctcactcatttccccaacccaatcaatggatttgtgaatgtggggttggaattcgcccagtaatatctgaaaatgccctctcacgttgtctgaatctctaaggaggaaattattcagacgactgacgctctttggggcacaatattaaattgatcgtttggcaaggaagaccttatataacttaataccacaattcccataaataccaatcagagtatcaaccagaaggcttacctctttctcaaaatgagacaagttctatatacctttttgtgtagttgttatgtttaatatgtgtgtatcttaacatgcgtaagccaagtgtgacataaatgacaccagtgaaaatacactgccaagcacccaatatgcttgatgaaacgctgccattgtaggactgtttttgagcacttacctttcaagtaaaatatcctctagactgacattatttttgctttttctaaccctcagtgggaattctcttttcaacagaaagttttattgtattcccttctgagacatgactgtattttaatgatttaaacttgcagaagtattagttaaacttgcaataggtatatttgatagctttcttactgtgaacctaaaacgtttgtaaaagttttctttccccaggaaggcatttcttgcatccatttgttcattcattcagtaaatattcattcagtgcctgtttgtgtcagatccagggttctaggcgctgggtgttcactggtaaccaaaacagacatggtcccaaataaagatgaagaaaaatcaaagagaggtgttcagtaggtgagtgaggcatggcgtaagggtgctgtcagggcggaccctccaggcacataacacctgaacagagaccagaatcaggtaagaagtgagagagcagctgtgccaggggaggaagcttggagcagacagaaagtgtgcaaagaccttgaagagaaacatcatgggcatttctttatttctttgtgtgtgtgtggcttataggatcttttatacataaataaataatatatataatgaattatatataataatatatagtttatatgatatataatatatataatttatttatttttagctgtgctgggtcttcgttgctgtgtgggcttttctctagttgtggttagtgggggctactctctagtttcactgcacaggcttctcattgcagtggcttctcttgttgcagggcacaggctctagggcatgtaggctcagtagttgtggctcctgggctctagagcacagcctcaataagtgtgatgcatgggcttagttgctccgtggcatatggaatcttcccagaccagggatcgaacctgtgtttctcgcactggcaggtggatcctttaccactgaaccacctgggaagtcccaatttttaaatatagcccaaggaagcagagttttattattattatttttcttttggccatttagagcctgccttgtttgcataccctgtgaaactgcccaatgccttctagagatacagaag

SEQ ID NO: 40406 - DNA, 1207 bp, Bovine  19866881067156
  misc_feature (1)..(1): n is a, c, g, or t
ntcccatccctctgggtcatctcagtgcaccagccctgagcaccctgtctcatgcatcgaacctagactggtgatctattagaaggctctctttactgatgaagaccagaaagagacaaaggtctgtctagtcaaagatgtcatttttccagtagtcatgtacagatgtgagagttggaccataaggaaggctgaatgccaaggaattgatgctttcaaactgtggtgttggagaagactcttgagacagtaaggagatcaagccagtccatcctaaaagaagtcagccctgaatattctttggaaggactgatgctgaagctgaggctccaatactttggccacctgattcgaagaactgactcactgaaaaagaccctgatgctgggaaagattgaaggcaggaggagaaggggacgacagaggatgagatggttagttggcatcaccgactaaaaggacatgagtttgagcaaactccgcgtaatagcgaaggacagggagccctggcggactgcagttcatggggctgcagagtcagacgagactgaatgactgaacaacaagaccagcagatacccagcttttcttgtagcaaacatttctaaagggactgattcatctccagaaatgcctggaggccatcggatgctagccaggcctggagaacattcccagaaatgcagttacctggaggggaggttctttcagtgtctgagatctctcagccctccccaaggccagggcagcaggtggaactcatccagccaaggccacaagggtgtcagttgatgcgtggtgaaatgggactttgaaagggattctctggtccctggcccataccctcaaagctaataatgattaactagtacaaggctatggagctggatagtctccatttcagtttggcttctccaccaaatactgggtaaatgtacaaccaagaagcatcttatcaggtgctattaaaggaatgaaaactactttttaacactgacttcgcaacatgtgataaggaagattaacagatgaaagtgttacataatccttggttaaacataggttgtaattaccctctgtttttcattgtgttttttttattaattaattaatttttaattttgaggagatgcagatgtagagaacagactttgtggacacagtgaaaggagagaatgggacaaattgagaaagggagcgtggaaat

SEQ ID NO: 40407 - DNA, 1119 bp, Bovine  19866881111306
  misc_feature (1)..(1): n is a, c, g, or t
nttttcactttcatgcattggagaaggaaatggcaacccactccagtgttcttgcctggagaatcccagggacgggggaaactggtaggctgcggtctctggggtcgcacagagtcggacacgactgaagtgacgcagcagcaacaggaatgttattaagcattaatgatatacaagacactaagctaaacctattttcttttagtagctatttagcttatatttaggggtgaaatgcagaaaaaaatgtaaccaagaaaaaattgtatgttaagcaccaaatggataatacagactatagtcaaatatctaatgactgaatgagacaaactgagatgtaaaccattacttatcccatttcagagaaaccaaaatcgtgatggagaggcacacacaatcaaatcattaacaggggaagtgaaagctacagcattaggaaatgtgaagcttatcaggagaataaatatgtatgtgaaatcttatactggattttcctgttcctctttcataaaagatgccagttttcaacattgaccttgggcaagatcaaagctcacctgggctaagtcagcacacacttgctaatccttaagtaaaaagatacacttgtgaacagtaacactcagccaagctcacagactccacacacaatcagagacttaaagggtaatttataaccaggtgagtaggatgtttaaggaaccatgtttcattcactaaaccaaggatcccgttcctgccccaagtgcagaaaaagcactcggtatgacttcaattaacctcgctaggcacccatttccccatctgaaaaaaaaatgaagggctttggaatagaacatcctataagacttctcatgatttgaatagattattttccactgataaaggacgagactctctgacaccaaacgcttcccttcctaatactttggatcaaccagaaacctgaaaatttcatccaagaagctttccttaagataaagcgatagcattttcccgagaataattgccagtctcgttgaaactttagccagggaacttatcaaataaagaaaccatctagttccagaccataggcagagtccaggaaagtcaaacccacggcctcaggaaatttag

SEQ ID NO: 40408 - DNA, 1329 bp, Bovine  19866881339037
  misc_feature (1)..(1): n is a, c, g, or t
nctgttctcatcacagttaaaaaaaagagagagagaaattaatatgaaataaccaaaacaaagtttcaaacaaaacaaaaaattctctagcaagagttaataagttaaaagtgcttgggaaccttgaataaaggatctaggagaaacaacagaaaaagaggaaatgcaagcacatctcataaattgtttcaacatccatgaggagagactctgaggaggcaggaaacaaaaggcctctatgaaggatttaagagataaattgtatcccaatctacaactgcagcatgacaaagggttctttaaatatttctgatgggaatgcagtgaattacagctgacaagagggggaaggaggatgggaaagggcaggagttcgggtcaaagaagatggtgagtgtcctcgtcagcctggaatacctgcctcgcctcttcaatgaggcttttgctctttatttaagatttgagagttacttatccttcgcataatttgtttctcatcacaatagaatctatctcagaggtgcttctgttttgattaccttcacattctaaccattgttcattcattcattcattcatatagttttctgttttattggccatgccacgtggcacgaggtatcttagttccccaaccagagatggaacccatgcctcccatggtggaaatatggtgtcttaaccactggacggccagggaaatccctttgtgtgtgtgcgtatttttaaaaggcatgaaattatacgtgattctcacgtagttcattaagagacatttccatccgctgaagtttacaaaaactctcaccactcattgatccaatcactaggcaaacctccatccggaaccaagcacagctccaggcagtgtgctgtgagctgaattatgttgtaaacacagccctttgtatggagaccagggccaagtaaaatccacacttagtgactcctttcaaacatcaatgttgcgcatcactaacatttcatgagaactagctctctgccagggcagcattatctcatttcatcttcacaagtgctgctgggaaaatgaacaccgatcactccacactacagaagagaaaactgaggccctgaaacgctaagtagttgacctaaggccccgaaggaggctcccttgctgtgtctgggagctgccaccttcctctttgcagaaatagaggagaaaggatctcagatcatcatctccaatccaacttttttaaaaggtaccaacagtaggatatatgtgtaggaaacccactggaccccaacacacacagcatcccctccctggtcctgctcctgcagttaatccagaggtcagga

SEQ ID NO: 40409 - DNA, 1069 bp, Bovine  19866881395602
  misc_feature (1)..(1): n is a, c, g, or t
ntctttcctattttgagtacagaggaagtcccagtttaaaaatggaaaggagacttggcttcttcacctgcacctacttttagcatcaaaaccatggcaacaacatacacacagttcatcatacattttcacagcagatttatgctgccagggacggctttctgatctgcttatttaaaaccaatgtgaattttatatcaaacttgacttaacacatgacagtgaaatcctacactgtactgaaagctggagaggcccatgagaggtgaagaacccccctgacccagcttctgtgttcatcaggagcaataagaatgtacacaccgcctcggtccaaagtcatcaaagagcaagggatgggccgtgtcaggggctggaacagaggccaggaagcaacatgtcttctcacaccagcctcaatgggtgtgcaagcagggacaccatgtttcttccagggtgtcttccagggtgagctgggggtccacttctcctcccatcaagtgcagctgctgtcacagaaggggttcacagggaggctccccaacaatgagaaatagctgtttctggggtctctgcgatggcacaggattataaacccgaagggcaaaactgaggctcctctaggggcatcggcctgaaaggtaggcttcactgaatgcatgcccacaggcccccaaacaggcacagttctttaaaacgtgctgtgctgcgctgtgctagaaattatccctctaaaagatgatttcaaactggagaagactcttgagagtcccttggacttcaaggagatcaagccagtccatcctaaagaaaaccctgaatattcttggaaggactgatgctgaagctgaagctccaatcctttggccacctgatatgaagaactgactcactggaaaagaccctgatgctgggaaagactgaaggcaggaggagaaggggcaacagaggatgagatggttggatggcatcattgacttaaagggcatgagtttgagcaagcatcgggagatggtgagggacagggaagccaggcatgccgcagtccatggggtcacaaagagtcgga

SEQ ID NO: 40410 - DNA, 1288 bp, Bovine  19866881450404
  misc_feature (1)..(1): n is a, c, g, or t
ncgttgacggctacaagaatggcatctaccattactaggagctaagagtgaactttttaacaaaagctttgctaaagacgacttaaaaggcatgaaggatgaacggggtgtcttccttgggcaacacagacagctattctttgcatgaataaaaatatgcatgaaactgggtcttcagtggtgccaaggaattttatctgacccaccaagagatactgtttccaacagcaggttcagcagcatgctctgggaattacggcctcaaggctggatccagagcataaaaactccaaaggtgtcctgtcttgtttcatgcaaataaggaaagtccatacctttcctcctcctcccgtttcctcttttcttcctcttcccgtttcctcttttcctcctctgctcgtttctctgccagcagttgtctgtaaactcttctggcaatctgacctcggagttgcttctggaaaaccacagctgcttttttcaggtgcaaaaatctcctcctcaggaggaaggccctgtagttcttctgtatgatcactacacaatcaaggaccttcttgtattgctttctgaaaaatgagaacgaaaacagcacaacagcattgctgaggacggaatgaggccacaagctcttcacaggagtttatgttaatgttacacgacaagagagcaggatctcatttggggctgatccactcattatgggactcattacagggagccagtgagtaggcccttgtgggcaaaacagaagaaaaacaaaagaataataacagaactcaagcaagaagcctatcatcatattggctaaataaacacatcactcctaataactgactttgcaaagtcctggcaggaagtgaggctgtaaacagaaccaagggatgtgatactttctgctgttcttaggagcaaaagggaaaaggattcaccaccgcaggatggcttttatgtttgagaaaatgtaatgtatgatgatgagatgatgaccagtggaccagcctgctggtctagggatgcacgagaaagtgcctgtctcattgggcaaacccgggagagggggccgctgtggaccccgtgggtcgacaccaaggtaaaccggcgagctgcctgtggcttcagtatatggccccaaggagctagggaaattatttaaatatctcgcccgatgccccccagagacactactgctctgagacatcacgagcccctgttcccacttactgcccacgtcaagctaactggcatcaccaattgggagcactgccctggccctctcctagccggt

SEQ ID NO: 40411 - DNA, 1199 bp, Bovine  19866880347097
  misc_feature (1)..(1): n is a, c, g, or t
nttgttttattgtgtatgagtaggtatgattattatcactatttctggagcagaaaactgaggcataaagaagttagatagcttgctcaaagccatgcaactggcaaaaggaggtaaaaggattccaatctatcccaatgtaatctctgctaataggcacaaagacacatacacagtacaatcacagaaaatggccatggtcataatctagtaatacagctgatacctgaaatgctctctcacacatacgcatacatacacatctgccttattcagttcggcttttaaatgttacacattttagtagggtaatctattaaaattgtttaacaagccacagtgtgtgggacaatctctatgtatcaatgctcagtgaaccactgagcattgtactgaaaggcttatcatgatggattacatggagaagtgtattttaatatcggtgcttaattaatactttagtaaatatttagagtagaaatatttacaaatatttgcaacaacttttgcagagtttcacgattggttagaatggaaacgaaatagcatggatggtaactgtgggaacaggaatgtgcattatactaattaaacgttgtgctgaaacactagcatggttttgtcctatttttataaggaaggtctgatgattaatctttaagtgactaaaactaccaactaaataaaaaagttctttatttgaagttagggacaatcttcaatgtattttgtcccttggcactattttgatgacttttctgtgtctggcctctgattgaacttattttatctcctgaccactagtttgttctctgtaacttgactgggaggcttgcttccctagacagaaaactgattagtggtttgtgagctccccagattttcctggccctgaattttagcaaatctagggtgtcttggcagagggtttaggcctggctacctggctgtcatctctgtatctctgtcacattgcgttaggtctgttataccagtaggtgtcatactgggctgcactttcccacagaaatacatcaggtagaaattcagaagtcctgtgctataaactctgaaaatagagcactctaccatacagaagcaggaagttgtactatcttaattatgaatgcatcaggtatgaaggcctttctctcttcccaggtctactcatagagcttacacgcagcattagggttgtt

SEQ ID NO: 40412 - DNA, 4391 bp, Bovine  19866880393537
  misc_feature (1)..(1): n is a, c, g, or t
nccaggagatggtgaaggacagggaaccctggtgtgctgtagtccatgaggtcacaaagagtcggacgtgactgagtgactgaacaacaaccaacaactgaatattttagtgaattaaatgtaacatcaggaatgatttgaaacacaagtgtgatgctacttgaacagagttgagcccctcccacgtgtacagtcttgggattgagcagtggggagggtactcagtctgcctaagtcaaacaaacatattgaccaagacaaaatacagtgagctctaatcagttgtctaaacggttcaaaatttatctggatgagagaaaagattaatttttaacttagtgaaaactgaaattaaactcactttagcataattgtttataaactctcctttgaatgaacctttttccacatgcttaactgttttctgaacacaaaataattgcactagatttgaaactctttcatgactgagtagagggatctctgaactttctaaaattgtatatgaaattgatgtctattcactttgttcagagatgttccatagctcctatcagatttttaaaggaaccgtcacccatcacaaaccctaattgaatccctctgacacaaaattagcttcagaaatatattccctgaattttttgagaactccaatatttctgtaacacatataagaaaagggaaaagtaattaaagcaaattgctacagtgagctaaggagtagtgcacggattataacacgttttcacagagttccagctggcatagacaaattagagcagccttccctcttagacttagcacacagagaagacttgaatcgctactggaccaacactcaccgttaggggacactccaagcgtcttgaagtttgaaaacatatttctgaactaactcaaaaaggcatagagctaagtaaatgcattttcattacacaaattactaaaaattaatgtaggatatacctctgagttagaagttttctgcagatttattcagcctacaggatttcagaagagtagatagatgcattgtaattagaggtaggattacatacaataatggaaataagaaaccattaaaaaattatagattctgaaattttaggcttcttgctaagctctctgaagctgcagctgtcttttttaaaaattacatcaatgcttctgtttaggaaaatggctgggaatgaaaataaatctttgtgtcactaagtaagatattaaaaaatcacagaaaaaatggttgttcctgatgcatatagttactgagcacatgtgatttgaaaataagatattcatttctgcatggctcagcaacacaaatgcgatttcaaaagagtaacctgtgaacagaaatttctggtatgtcatctgactgccttcaccaaaatgttttccagtgaattataaaatgtaaattacccttatgccttcagccgtgcatgaactgaatctcattctagatgtgtgtctattgctgaaatcctaagctctattgctccattatttctattgctccaaaacttgttttctttttctctgtggccatttttgtactcctcttgctccctaagtcataaagtcctgacattctgcagctgtctggagcctcttgcttccccacaatacaccaatgactgccattgctacctttagtcccaaagcaggtgcgctttctctcactttccattctaagaccattatacctcttcccaggtcactatacttctgtctccactccagatgccctctgtagtgactccatcactgtttaacattgcattctctggatgaacagttccaactactttcatttttactattctttctttttacttttaggacttccctgatagctcagttggtaaagaatccgtctgcgatgccagagaccctggttctattcctaggtcagaaagatctgctggagaagggacaggctacccactgcagtattcttgggcttcccttgtggcttaactggtagagagtccgcctgcaatgcaggaggcctgggttcgatccctgggtggggaagatctcccggagaagggaagggctaccaactctagtatcctggactggagaattccatgaactgtatcgtccatggggtcacaaagagtcagacacgactgagcaactttcacttcactttctacttttaccaaaatatccatctgcaaatgctaaccattaacatttgctctgcctgatcagtaaaaccattatggtaagatgtgttttcaggcttcagtggtagctcagctggtaaagaatccatctgcaatgcaggagacccccgttcgattcctgagtcaggaagataccctggagcagggataggctacccactccagtattctcaggatttcctggagattcagatggcaaagaatccacaggaggcctgggttcgattcctgggttgggaagatcccctggaggaaggcatggcaacccattccagtattcttgcctggagaatccccagggacagaggagcctggtctacagtccataaggtcgcaaagagttggacacgactgagcgactaagcacacagcacacacaaggtgtgttttcaggtccttcaatctaaaccattgctgatacacgtggtttctaaatgaaacactaaaatatttaaaatcatccaaggccattggcctttttacaatattattagtcccaacaattagttttcatgttgtatctaactattccttttgttttgttcttaaatttaaaaccttggtttgtccttgaggaatatttattaagttaaccttttcatttagctacaaacattttttggaggaaggaggaaaagaaaataatgccttctttgccatgtatcctctcctatctctatttgcacctctatattttcttcctttttctattcccatttaatagcagttgttgatttgagtacaaggatagtgaaactactggtatgagaatatcatataactttttgaaatatttttctatacttggccattgaccattttcagtggtgattataagaccctgctggtttatttgaacaagacgaattttgtttagatgtaatgtttgttcacagacttctgatatgaactggtctctatctactccagtgatgtttcatacctcttctcagatttacactggagggaaggatgatgtgcacccctccagaggagctctcagcttcttgcttgcaggctttcccttagttcacctctgctttcctgaagcagcatcactgcctaccctcactgccccagcttgggttactctgaacatcaaacctcaaactcagcctctcctgcctcacctgtcgcccaaagcattttacttagtaatacactgcccaagggcaatgcacccctaccagtatttaaccacttccccttcccatgaattggccagtcactttcagctggaaatatttttgataggaatagtaatttggtagaaagaaatggtatttgaaggtggcatgttggacaaggtggcatgcaattcagtgtctttgggttagggagacagctgagtgattcagatcctggggctctgggtttgggaaaacaagagcaatggttggaagtaagaagggtcttattacttttttttcttggtgtactgtagtttatgaatcagagcctttataggccatgagaagaactcctaatactgtaccccctcattggtctcagttcttggaggtgatgggagtttacccattttcttgtctctttcttttaatggaaagttagaaaaaaatggagggtggctgtaactgaagctgctagataaaacgctgtattaaatgaggaggctttccttaggagcttatcttctcaaagtgcctttgaattataatcctttttactcaggcacaaataattttttctgaatttggtgttatttatgaacctgattactatgcatagcagatcatattttccaaagatggccacaaaaatatcttggcatctcccaagctctcttgcaacacgaccttgacattccctcatcaagaaggagagttgatttctccacccccttgaatctgggtaagacttgtccttcttgatggataatagcagaataacgctgttaaggtatagcctttcctgacctgtcacttttttcttcttgttttttgaaaactttctctaggaatgttcacactgagcctagctgctattctatgagaaacccaagctacaaggaaaaactacgtgtggttgtcccagaaagccagggagcgagttaggatcagctgtcaccatgagaatgagtcatctgaaatatccagtccagtggaactttcagatcatgatgccctggcagccatgtgatttcaattaatatgagagtcccaaagtaag

SEQ ID NO: 40413 - DNA, 870 bp, Bovine  19866880640014
  misc_feature (1)..(1): n is a, c, g, or t
ngaagtggtcaagaagcactgattaaggattcagattaattttcaggactactgctgagaattttgatttgttgcagactcttaacaaaatggtttaagctgcttctagtagttttccaaaacttgtgcccttacgtctcagattagttatctccgtcatgtagatctctgtttaatggagtcatatagacaccgtttaacgtggagtttgaatataaggaaagattgaactgaagtcttatgtgtgttgccattattgcactgtcaaggatattttcaggatggaagaatagcaccagttaagaagagcgctttaatggtaaggacaagtaaaagctagaatagaactctttcaaaatgtgtataaaaaaataacactttgtttcggatatcaatggtgcacttttaagatatgacaggtaaatgctgctgaaaactggaatgaccaaattggaatatctctaggcaaaaaggaaattgctaaacatagtataacaagctgcctatcattccaaccactcaagtgactcctgatagttgaccatattctttttcccaattccagttaattctctgcattgtagcttatgcattttctgtgatatgtccctggaacacctgaaactgtgccttttgtgacaccttctgctactaatttctcttatactcatcttaaacatgtttctttctccattcttgcctaactcgaatatgatggtgggtgtacttctttgattaagaatatgagctattcacttgaagcttccattagtgcttggagaattttctattgtttgaaaatattagccagaagtgagatattttaagtcaaatatcctgtgattgacagatcaccaaaccaagaataat

SEQ ID NO: 40414 - DNA, 1300 bp, Bovine  19866880715854
  misc_feature (1)..(1): n is a, c, g, or t
nggagaaagattattcaatccagctgtaccctgatccttattatagactcgagtttcaattccttttaattgatgatgcacagagaacctcatttaattatttgggaggataaaggagtaaaaacaagggagagaagattgatggaaggatgttagcaaagattcttcacctacataccaccattttaacatccgaaatgtaatttgcacatattcaacaaggaaacatgtttcagaaagtaatttaaatttaagctaaacagctggtctgcaacaaaagctatcctccaagcattttttttaaatgttaaatataagcttggaagaacagttcctaaaacatcccacagcatacactgttaatgaaaattatatgttgcagtgggtgtggtgatatatactcacccaatattgctccatataaagaaaaaggaaaccaaggtcaacaataataatttaaaaacattaaaacataagaattagtccagaaacctatgaatacccaggctaaaagttggacagtaaacgggagtattccttttaccagcagataagaataccctagaaatttctagaataccctagaaatctatattagaagcccctaactgtgagaggtcgtgactaggaaaacaaaaattacaattatatgaggtatgaattgccctgagatgtgtaaggtatgtgttatatcataattccttaaatgtttcaagtgaattaaaaaaagatcaattcgctactcactcagattagcaggaagacatatcagtcattttgggctttctgcaccctgttaagattgccagaatatttcgatagataaaaaactgaccttccagcctactagcgttttgagctgaaaaacgcctcggtctgtggctgccacaatcgccattcattctttggggacacatgctactgtaaagctctagtttctcactgcttgtccaagctgtcatgccatctgtgacccgagccaacaagctccatttgtggatgggcagcttcactcactttcaggcccagactggccacagaggggctttgcctgcccctaagggcatggctcagaattcacagcgttcccctcagattcctgaccctcggagttaccgcatctaaatgggttcaggactttctacctcccaggagaactatgatcttttcctcatcttactcctggggacaagcccaggcagacttttttttttctccttttgacactataaatttagattgatttgttctcctccctttttgtaaaaattccctggtggctcagatggtaaagagtctg

SEQ ID NO: 40415 - DNA, 1002 bp, Bovine  19866880760214
  misc_feature (1)..(1): n is a, c, g, or t
nctcacattcatacatgactactggaaaaaccatagctttgactagatagacctttgtcagcaaagtaatgcctctgctttttaatccactatctaggttgttcatagcttttcttccaaagagcaagcatcctaatttcatgtttgcagtcatcatctgcagtgattttggagcccaagaaaataaagtctgtcactgtttccattgtctccccatctatttgcgatgaagtgatgggaccagatgccatgatctttgttttttgaatgttgagctttaagttagatttctcactctcctctttccttttcatcaagaggctttttagtttctcttcactttctgctataagggtggtgtcatgtatttcctgaattgttataaaggaggagtagatgaaatctaaggtcctttccatctctaagtctatataatatactcactctataagcaatctggctaaagatcatctattgctgttgtttttcccataaatgactcttctaaactgtactggtatttctggaatacctctgtctgatacaaacagactgaatgatgaatttttgaccaacttttatattgttatgctaactaaagaaaggggcatagcaaaaagggctggctggtgatcctaatcttaaatagtaatggctgcaaatgatgaggggactcatagtatgtaataacaatactaaaaagtgtggtcagctcatcacttgaagagtaagaatcaagatgggatatctaatcacaatgatatattgtgattatatagaatgacatatatagaatgacagaaatatcaaacatgcatgctaacctaaacataagaaagaaagattaaagaacaatgaatagatcctggtgcaagatgtggttcagggtcataaaagggacttgatttgaatcagtaacttaatgattcataaatggtatatatttccaactaactgaattggaatcaagattgccaggagaaatatcaatacctcagatat

SEQ ID NO: 40416 - DNA, 914 bp, Bovine  19866880842331
  misc_feature (1)..(1): n is a, c, g, or t
ngtctgtatctgtaccaaaataaacccgaaagaattgttaaaacttgcaaacaaagcacaaaaaggaagctggtgctctttgttatagtgtataatagaaaactaaagagtttgaccagaaatcctctagctgtggctattcctgcacaactgcctccagaattacatttatactttttatacttttgttcatgttccagtaaaaaatacaatctattttatatggcttgctgttttctagtcttggatggcttgctcaggctaacatttttttaattgaataattcaagcatctgacataaaattataaacttgcactgacaaccagcaaaaaaaaagcagacatggcataaaatatttaaacataaaaccaatgaagcaaaatattgcagggcaagatatagtctcccaccccaactccaagcagcttagcctttctttgctgatttcttttttctctgtttctctttttggcacacaataaacactaaaaattaattcagaaactattgtgcatctttgaactcaaatttatttggcttctgtgtgctaatatgaagtttcacctataaaatgagaagtcagagttaataaagagctattgaactgtgcccaatgagagagacaaagctgaggctgatggttcttattacttgccactaacaccagggttgatctgaatgtctatgacagagcctttgagtgtggggaaatagtaatgtgttattcaggtacagatccagtctttttaatccagacttctgagagacagtctttatgaaagaccccactaaaaacagagtggaatcctcttcattttatgcctaacaagcacatacaagaacacacaggcatccattttacaccccacttttaagaccagggctttcctggtggctcagatggtaaagcat

SEQ ID NO: 40417 - DNA, 4183 bp, Bovine  19866880918795
  misc_feature (1)..(1): n is a, c, g, or t
ntaaaatttaaaaaaatagaaaggtaattaacttaacaactaaaagagaaataacgctgtctccaaagcacttaaataactgaaaccaaaatactgtgtcacctctagcatccttttctgctcttcccaagtccctgttcaaatgaaggatgtcacagaaattgctcttagaaatctctcttcttccatctatactgtcacagtaaatttgctctcttttgcaatctgaaggtttatagcatcctaggaagtaagagggaatagttattccttattttcaatcctgatagctgctgatgcatcagctatctcatctcatggttattctttcctttcacagtctattaacttgcagttccaggcccagaagtctgtaactaactgtagaggccaccacatgtgcagggatttaagtgttatctccctaagctcaatgtgttgtccaaaatctgtgggtagaatttcctctttcaattcaattttattttatctgttaaccttggaggaggagagttgactgagacttgtcttgctttttcaattattaatgtttttattctctctccacatgtttttcttttggtgtctactaactagttttaagggaaaagtaggttattcctttgatgattccctagctgtcattattgaaaaccatttactttccctggattttgcatgaaagctgagtcaaaaacagaagagttttacattggcaaagtgcacacaagatctatcatcttgtagtccgataattctttaaaggaactaaaagcacagtgttgttagttaaagctgagctttttcctacattcactcaggattttagaaatatattttatcttccttaacaatgataaaagcttcactgtgactaaaggagatagctacttgaagcaattaccagtctaggttcagtgtttgctgaagttttcccaaccctgtgtctaaaacctaatttgttcttattctatatgtagttagcttgtcctactgaaaaatagaacatttaacgtatcaagggaataataatcaattattttttagtaaaaagcaaaagtaattgggaaaaacacttacttgacatgaatttgtcttacttttatgagtttataaagctaatctcttttccctgcagtacagttattattattaaatttattttatgtcaattcctacattaacagacaattacattattataatataatctctgggtgtgtttttcaagagtttattttataactggaaactgaaatggaaatgctttcaattgcatatgcaaaaaattaggaaatgtgtactaacacaaaaatatttgaaaaaattacaaaagtccctcattcagggtgaacagagaagagatttggtatgcaaggcggcctacacctggatatcactgtctggaatttcacagaccctaaaataatcatttttactttgtaatatatagagtcaataggattactttcttgaatcattatccaaagaagaaaatgtaaacaacttactcctgtcaaatcagctcaacacagagcagcaaagcaagaaatgttctctgtaacaacccaaacggttaccttttctcaaagctaaaggataacaataatataataaagttttgtgttgcattattgttcattctgcctagcattagtgaaatgctgggcaagaattgggagttctgttttcattttttgtaggtaaaaccctcctgccctctatatcccaaaacaaatggctttagagtgtcaaatggcagtttcaagcagggaagagacgtgggagccagaaagaattgtgacttcagatacacagatctaaaactaagtatacttagcttagggaaaaaaaagtttttattcgtaggtgcaattccaaaacatgatatttattttgcttctttgttactcactggaagttgtatttctattcaaacatagctcaattataaatgctaaaaatatgaatacttggaactgggtttccccagtggctcagtggtaaaggattcacctgttaatgcaggagcctcaggttcaatccctgatctggaaaaatcccctggagaaggaaatggcaacccactccagtattcttgcctgggaaatcccatagacagaggagcctggcagggtaccgatcatgaggttgcaaagagtcggacaggacttagtgactaaacaacagcaacaaatcaatacttggaactagtgatatactgctatcttcttatgaacagtggcgctgccattaattctgtatcactgaatataaatgccatttgggcaaaaccactccaccattttttagggagaaatgactcaatttggttatgcttccttaatgagtccccagattgccccagcaagagtctgaaattatgggcataattctctttgggtacatacttgttttccaataatgaatccaagcagattaatgaataattaacaattctttggtggcataccaaagactctaccttagttcaggccttcttatttatcagataagaggaaaaattgctttgaaaattctaaacatcacagacttgtgaacctaaaataaaacccagcaaatttctctttggatgtgggaaaaaagttctcatctctctacagatgaatgaacttcccaggacagttcttctaagagagcttttattttctatttaaattttgtagccacagagaatttcagataggcctttaacttctctggtcagttttctgcatatacttctataaactgagttctcataggtcatgtctggatttatgcataggttgaaaaaggttctcacttctgtgctgacccttgacaggttctgtaacagtatcctaaccaaaaactctttggccaacagttgcagtcacttgagtgtttagccatttttgaagatatgaaacctgatataaaagagataactcattctcaaatcatacctatatttgagagagtaattattgcccatgtctcatttaaaacagaaatccattccctctgttacattatctttaggcaaaagctttatcaatctccacctcccatcaaaattaagtggatttaaacatatattggcttatttggcttttcctattaattcattctatttaacacgattaagcaacaggtgtataagttctggagatacacagtgaataaaacagataaaggggaaaataatggggaaacaaacacaatagatggataacaaaatactatgtgatttaatttcagatagagatagatacaaattatgacgtaaagcaaggtaatggaatgtatactgtatgtctgtgtgtgatctccttgaaaaagcataattcaagcaaagacctgaatgtgaaaagaaaccagtcatgcaccaatttgagagagttgtagtctaggccaaaggaacagcaaatacaaacagccaccaccacgatatcactttgctctaagatttaattaatttaaattcatatctatataaatatatagataaaaaatatataacacctatttctgtgatacatgtataagtagatgtatgtgtgtgtgctcaggcatgtctgactctttgtgatcctttgtactgtaggctaccaggcgcctctgtccacaggatttttcaggcaagaatattggagtgggttgccactttcttctccaggggatcttcctggcccagggatcaaacccacgtctcctgtattgcaggcagattgtttacctactgagccattggcaaaaacctatttctgtggtaacatcatctacatcagtaactgagctcaataaattgcataggattctgaaagtcaaactagtctctatctctctggtattgtcacaacactagtcaaaaggagtagggacatagtaccaagagaaatttgctttgtacatctcatatggtttttaaatgtgagtttttaaatagattgatggtaaaggcaggtgaccccttctttagcaactgttctttcatgacttcagattttgctctactattgatatctttccaaatctgtcatttgctgtctttaaaaatgaaaatccatgaggattcaacactattaatttattattattaaactggcacagtgtttcccttcagttaaaataaagcatttgtgtcagtttagaactctgacgctatcactgtgtaaataatagacctaccactcaagga

SEQ ID NO: 40418 - DNA, 1351 bp, Bovine  19866881220640
  misc_feature (1)..(1): n is a, c, g, or t
ntgggaaggactagaaatctcttcaagaaaattggagatatccaggggacattttgggcttcctaggaggtgccaatggtaaagaacccacctgccaatgcaggagacataggttcgatccatggatggggaagatcccctggaggaggtacatggcaattcactccagtattcttgcctggagaggagcctgacaggctacagtccattaggtcacaaagagtcagacatgattgcgtgaataaacaacaacaacaatgcaacttgtcgtacaaaaaagatcagtggtgcctgggaagggagtggaggggaccagacttggaggaagagagaaaagatacagggacacgagcaaacctttgctttttactctcttgttcttggtgacaactttatgtgtgagtacgtatatcaaacattaaattttacacattaagcatgtattatgcattatatgtcaattagaccccaataaaactgctttttaaaatacttaacaaaaagttccaatactaaggtcatgcttcagactaattaattaacatctctgggggtgatgggggtgagacccattcaagaattaatagattttaaagttcccccagtgattccaaagcatggccaaggctgagaaacactattatgcagaaaatctccagggaataataaaggaagaatgtgatcagctgtgcacaatgcactaaaaattataagtaatatggattaagaagaatctagaggatccaaatagggaagaagttcatgtgcagcttagaaagaagagagacagatcaaaaaaggccccaagtcaccgtgcaatctataacattagctcttctgagttcaactaatcctttattctgagaatcacacagaaaacctccaggcaagactctacaggggaggattctattgactctgtgacatggtgatagattacttagattttgtaacaaatttgcgaagtgggaaaacgtacacatatatatactttgtttctattttaagtgcccctggtgaactcttgaggaggaagaaaaatcatagtttaagactgaagcagttccttcagaacataatacaagttgccatagcatttattaatagttttcaatttaaaaaaatccctgtacacctgtggctgattcatgtcaatgtttggcaaaaccaccacaatattgtaaagtatttagcctccaattaaaataaaataattaattttaaaaaatcaaggcagaaagcaaatgtttttatttcccttcttttacactacaagtcaatcacatatacataaaagtccatacaaaacacaggtaccttctattttaaaaccttcagtttcaaagaagca

SEQ ID NO: 40419 - DNA, 794 bp, Bovine  19866881312173
  misc_feature (1)..(1): n is a, c, g, or t
ntctctgcttgctttgcccatttggcctggcatgctgtctactttattgggccctcagatacttgtgtcaaatttctgtcttatagtttaaacatctctgctatgtctgttctgttaatgtttgttctgtatcttcaaattgtgctttttgtcttttagtataccttgtagttttttctaaatagctggaaatgaaatactgggtaaaaagaactgctgtaatagccccttatttacttggtggtgagatttggggggatgtatattgctctatatggttcctaaggtgggatactttacctcttttctaatgtattgtttagaaacactgtttaaggtgaaatgcattagttttgacatattgtcttttgctttcactcacttcaatatgtttttttcatttcttttgagacttctcttatccactggttatcaagtttataatcttggtttagggttccagtatattggatttttcctgttatcttcctattattggtttctaattttatccttttgtggttagaaaacactgtattttttaacttgctggggtttatttttatggttcggtatatgatatatcttagtgaatgttccatgggcattggagaaaactgtagattattttttcaggtggagtgttctgtaaatgtcagttagatccatttattaatgatgcttttgagttcttctatatccttgttgatcttctgtctaattctattataatgtctgaaaatcaacctaaatcaaaaacatacaaagagctcctagttatttacccaattaat

SEQ ID NO: 40420 - DNA, 1516 bp, Bovine  19866881526906
  misc_feature (1)..(1): n is a, c, g, or t
nttacataaactgttggaatgaaaaatcagtttatccagcaaaatagtatattactttagtcagcaggcacaaaacacctttttcctacaaacactctgaaaactctgcttcttgtccttttaggaactctgacaaggaccttacatgaatcattcattttgtgaaaatacaatattctgtcagcagcgttagctagcccagttggattaggaaacagaatcagcattaaatggatggacacaggatgaaatagagtctgagaccatgggggttactttgaaagtggtagcctactgggctcagcagaattttagacttcatccacacaaggacagaggtgcctgtaaaattttcctagccaagacatatgttgaacaatactatttcaccagtgaaaatttacttccaaagttctttgtaataatatatgaaccttctagtgaagattcagatattgatatcttaagactctttcatagctccagtcctgagagtggactcctgactatttcaaatgttaacaatgccttaggttgtgacttcagtttaacacacacactttaggcatatgcatagaaaaagactggaaaggagtgcatgtaaatatcgacaatggatgggatgggggagttgtatgaaattataattttagaaatatttttcctctagttttttatattaagcatataattttgtaatcaggaaaaataacttatttgaaaataattttattattttcatggataacatagtattttctattttgatcttctcatccccagatcatgatcctagataccattcagactgtcttggtgactctctcaccttattatctccagttgtcttaactagcagtgtaagaatcctacacagtttcccttggatcacgcatagctttagggacactgaggcttcttgctattatttccttcctcttgtgcctttggcatatgatattaattgttcaaggcactgtttctcctgaccatatattctcctctaggttattccatttcactatgcctaaccagctggaattggcagcaggtgaaatcagcaaagcctaaactaatctggagatgtagagagtctagccatgcttggagtgcccatgaggcaggtcagctggtttctacttatatggaggagtaaagagcttattggaaaggagctcttccaaaagtaagaggggttaatatacagcaacttgatcgcaggacaagaattgttaaagcgaaaaagtggttttgaaagcagggtggcatttgctaggccctatttatttttgccacagccccatagctgaatcctaagaagcataaggaaacattctttatgagtaagctgcgttgacagaaatggctaatggtgttcccactggagcataagaatgaaatcctaatatttcacatttggaaactgtagagaagaaaacagtacagtgtatgccaatcatccctctggaactttccaaactaggagtaatttgaatagggatggagtttctgaatt

SEQ ID NO: 40421 - DNA, 1086 bp, Bovine  19866881542325
  misc_feature (1)..(1): n is a, c, g, or t
nttttctcctcttttctaatgagaaggtgaaaaggactcaatgaaatatctattcccatacagcttttgaatgaagccagaaccaaagcagattttctatggagcctttctcattaaattacaaggtcaaggaggtaattgctcacttaccttccatggtagctgaccacaaagactttgttgtttgtggcatactctgttgtagctggttagtgatttttttttccatctctgggaagagaaatccatcaaacccaagaagaaagggtgaaactcctcattctatttggagctcactttaagtagggggagggctaactaagttcaataaatcttaaccctgtctcactcaaacctggagagcttaaaaggtgtcagcacacaggctctcctctccaggaattctgattcaattggtttagggtggtatctgtctatttttaaagctaccttgaatggatacatgcccaggcatgtccaactcatttgtgaccccatggaccataggcctccaggctcctctgtccatggaattttccaggcaagaatactggagtgggttgccatgtcctccttcaggggatcttcctgacccagggattgaacctgagtctcctgcatctcctgcattggcaggtggatcctttaccactgccctgcctgagaagccccaaaagctaccttagtgaaagtcactcagttgtgtccaactctttgccaccccgtggactgtacagtccatggaattctccaggccagaatactggagcgggtagccattcctttctccaggggatcttcccaacctagggatcaaacccaggtcttctgcattgcaggcagattctttactatctgaactagtagttccgagttatctgagccatctgagttctctagtttgaactgaaaactctgagccatctgagtgctctggtttggggaacttcaaactagagaactaccatatacttaccaagggtttggggttgagcagttttgcatcagaagtaggaatttctttggtgcaaaagatgggaatgaatatgccagcttgagagaactgtaagcagtgatgcagaggca

SEQ ID NO: 40422 - DNA, 903 bp, Bovine  19866880359419
  misc_feature (1)..(1): n is a, c, g, or t
ncttaaggatatttttgaatggttatgacctttggatatggcaattgcatgattcatatccattttttacaccttcccatttttagtcctaaaatcaaaataccaatatcaaagtttttatcatatgctttgctctaaggcaatattaaaattattacaaagaaaaagaaccagtttctgtatggaaaactaaagcagagtattgaattaaaacctgatgcttctgtcccttggaaagtgtaatcattttagttcagcatcttaaacaggatgacagctacagcctaaatggaaatttctagattccctgtgaacctttgtgaatttcctcaagaagtgcttttctgaacactcttgaagcccttatccatttatgaaattctaagatttataggagctacctgagtgtttatttcatctgaatatggaatattaaaattataccatatgattagatttaagaacatgtaaaatctggatctgtaaatttagaaatatttttattcaccctaagtccttattggtccctcaatattttgtcccatgaccagatgttgatagcatgctagtatagtctctcatacttaaatgacatatttcgagggttttactatcattaaagatcatcttgtccttctacatacaggcagattcttaatcactggaccaccagggaagtcccagacttttgtacagttttacctgaggcaagaaacacttaagtgaaatatctcatcacttgtgaaagaatgcatttctctttatttccatccctcccctacattcttggttcatcctgaaagccattaaaattacactttcactatagaaaatacatcagtttagttcagtcgctcagtcgtgtccgactctttgcgaccccatgaatcacagcacgccagg

SEQ ID NO: 40423 - DNA, 4071 bp, Bovine  19866880369721
  misc_feature (1)..(1): n is a, c, g, or t
nacccttgtcagcaaagtggtatctctgctttttaatacactgtctaggtttgtcagagctcttcttccaggagcgagcatcttttaatttcatggctgcagtcactgtctacagtgattctgaagctcaagaaaataaaatcagtcacggtttcctctcttcccccatctatttgccatgaagtgatgggactgaatgtgtcatgatcttagttttttgaatgttgagttttaagacagttttttcactctcctctttcactttcatcaagaggctctttaattcctctttgctttctgccattagggtggtatcatctgcatatctgaggttgttgatatttctcccaggaaccttgattccagcttgtgatttatccagcttggcatttcacatgatgtattctgcatataagttaaataagcatggtgacaatatacagccttgacatactcctttcccaattttgaacccgtccattgttccttgtccagttataactgttgcctcttgacctgcatacaggtttctgaggaaacaggtaaggtgatctgctattcccaactctttatgagttttccacagtttgttgtggtccacgcagtcaaagactttagtgtagtcaatgaagcagaacagatgtttctctggaattcccttgcttttctatgatccaatggatgttggcaaggtcttacaaaggatttacaaatcgcttcctaaaggcctactccaacttgaagatgcattttgttctgtttgtacaatgacgtttaaaacttgtcattatttaaaatatgaatttgacaactttcaggtcatgccatctcccctccaagctcaccacaggcctcaccattgtttatggtcaaacacgcctgctgtttcaagtgtttatattatctgctgagcccctagaaacatttgagttcacagcctgccttggtcttgcaaacagtccctctgcagtacactctggttaaccaacagatccccacaccacctctgcccagcacttactctctgcttctcatttaaaaaacacgtctcatcccaatagctccttcctttctctgtttttctgttctcttccctcagaagcctgagggaaacatcaataaacaagaggatgtgtttctcttctctccctcagcttcttccccagggaaggaggaggagcaccaggtatcaagagagatccaggacttccctggcgctccagtggtcaaaactccatgcttccaatatagcggatgcaggtttaatccctggtctggaaaggaagtgagttaagagcatcaagaggagggaatgaaggaggaaacagacagagctggactccatcttaggccaggctgcgaacattaggctacaggcatggtcacccgcccagtggactctgaactttgtgcctggtgtctgtaggaatggcatacccatggaaaaccagacccctggataaaagggcctcaggacttgtacttggactctcccttgcctaaaagaatatgccaattatctctgtaacaaagtggtaaattccattatgtttatgaggatatgaccccaggcctattgataaatatccactgtttatctagtcttgtgacacatgaatcatgcgttaactttgatcctatctctcttttaccttgtccagactagtttcaaggaatctggggaggtgggtttgagcaaatacacttagggtatatgaggcttccctggtggctcagacggtaaagcgtctgcctgcaatgcgagagacccaggttcaatccctgggtcgggactatcccctggagaagaaaatggcaacccgctgcagtcctcttgcctggaaaatcccatggactgaggagcctggtaggctacagtccatggggtcacaaagagtcagacacgactgagcgacttcacttcatacttcactttactaaaatataggtaagcttagaaacagagatttggggaacctcaacatttgactcaagaattttcagagacaaaacttttacctgttctgatgaatcacaaataagttaaaccaagagttctcatcttctttgggtctcaacattgttacttttttgttgacaaacattcgatagagcctttcatctggaatagatcctgaaatagacattacattattttaaaagttttgcttctaaattatgtgcttctctgagtatctcgttttcctatcagagatattttgaaatctgatatcattattcacaaatgaaaacgttccaagttcatgcctgacagctgctgagcagttgttgtttagttgctcagtcgtgtcggactctttgtgaccccatggactatagcccgtcaggctccatctatttgtgagatttcccaggcaagtactggagtgggttgccatttccttctccagggggtcttcccgacccagggattgaacctgagtctcctacaagtgtcccggattggcagggggaatcttcactgctgagccaccggggaaacctgctgagcagttgcattcaaagaatgtttttcatgtcaagcatactactactactactactactactaagtcgcttcagtcgtgtccgactctgtgtgaccccacagacggcagcccatcaggctccaccatccttgggattctccaggcaagaaccctggagtgggttgccattccctcctccaatgcatgaaagtgaaaagtgaaagtgaagtcgctcagtcatgtctgactcttagcgaccccacggactgcagcccaccaggctcctccgtccatgggattttccaggcaagagtactggagtggggtgccattgccttctctgacgtcaagcatacataccttcaaaacctagaaaatatagaataaaaatctgttttctatgctcatagtcttattaaaatttttaacaatattgttttctactctattttttctatgtgtactcttgatctaacatatacattgtaaaatacacaggaaatgacagtagaaggggtgagattttaaaatgtacttaaaaataatagttttatgtatattatgcttttaaataaaaacagtgtgcttttaaataatttaatgacttttcaataactcttcctaattccccaaaggatagtataggtcaatgaaaataaacatgcaaattgtaattttaaatactataaaaggaaaaaaagtcaggatgctaagaaggcaattatcagtgggaggacaaggttactacttcatggagtgattaaggaagaaaacccaatgctgcagaagtataagagctagaagaggtctagcttctagagagaactcctagtgctgccaatgaaatgatggtggaatgtatgactgggataaaaaaagcaagacatgaaaatccagggcattagaaggttgatctacttagctgcagaaacactaagaacactgacaaaattggaaggcaagcaggtaagaaaactgaggtaatggaaagggcagtttactggttggcagttagcttcaagggtacctgaaaaggaaggacaggtggtggcagtggaaagcaaggagagcagggacttggcctccagcccttccgccctagagcctgtgagaggccaggagaaaactgcacaagacacaggagcctcgtgggccactgtcactgagagtggcacagcacagggagcattcagggactgatgatatgagtctgctaactaaaaagggctctagcatatggcaccccactccagtattcttacctggagggtcctgtggacagaggagcctggtgcgctgctatctatggggtcacacagagtcagacacgactaaagtgacttagctacagcagcatataccgagctggggtgagagtagatgctggagggtagagactgagtccagttaaggaaaatagaacaggatgagatgagagactggggataaaagggatgatgggaagcagtttgcctctggcagtgactaaggcataatgggggtttgtccttggtttgaaagtgtgaggatcaatcattttcttcagatatgatccccaacgttacagtgattaaaatattgg

SEQ ID NO: 40424 - DNA, 2175 bp, Bovine  19866880416733
  misc_feature (1)..(1): n is a, c, g, or t
naaacaactttcagaaacagcagtgacccccagataaaggtcgatgcagcttcccacagtaagtggtgaggacctcaccccgtgtgtgtcaccttccgacccctcagagcccttcgtaacctaaaggatctgggcagacggaatgaggccgaggtggaggctgaccgtggctgcccctctgcccactctgctgtgagtgtcatggggacagacctctcccttcactgctccctgactttctcactgcaccctgcttcggccaggcatgacctacctgcatgagccatttgaactgcctggagtctctgagtccagatggcatcctctttctacccccagagctgggtggtagggtggtgtaacccaggggctctacaatgaattaaggggtacttgattttgtaagtaggacctacctgccttgttgtgacaagtgagccacatcatctggatttctcatttgcttcaagctgtattctgccaatgatgcccagttttgtgtgttttccaggtcatcatgcatccgttaaaaccccggatctcaatcacaaaaggtgtcatctacatcgcagtcatctggaccatggcaacgttcttttcactcccacacgctatctgccagaaattatttaccttcaagtacaggtgagatggactagtagagagcagcctgggggcctggaggactttgacagatggaaacttgagcctcctctgaatctcagagttactagcaccaagttactgtgccaagctggtctctctgcttccttcccatcctgttgcttccaggcctgtgcctatcctctgaactttttttgttttgctttttttcctcatcctttcttctaaacactttacagctcttccttgttattctctgtccctttgtttgcaaggtcaaggcaagagcaatcagcttctgccactggtgacatatactcacccagactgaaattcagaatcacctagtccctttttaaaatgatgaggtttaagttctcttgcaccacctacaaacaaacctgtatatgtctaaatttctcaggcaggatgctgtccccacacacacctctcatttatcgtatgctttgtcttgtgctcttctagaaaggaaagcactcagtgttgaaatttaagtacttgtgcatgctgctagctcgttaaaggtgacctcccctgttagactgtgaggttggggggaactggctccatttctgattttgtcatcttgctgtccctagcatctaaatgactgtctccacatcacaagctctcagtacatatttgctgaatgaatgaatgaacgtagagtcatctttatcagttcatagttgttttagctgaagttctatagaaatacatcctgagataaaggaagatgcatgtgcccatgggttttaagaaagtgctcccaggggacttccctggtggtccggtggttaagaattctccttccaatgcaggggacatggattcgatccctggttggggaacaagatcccatgtgctgaggagcaactaagcccatactgcaactactgagcctgctctccacaactagacagcctgcatgcttcagctaagacgtgacacagctgaataaataaatgaagtgctggacttccctggtggtacagtggataagaatccacccaccagtgcaggggtcacaagttcgaccccaggtctgggaagattccacatgtcgtagagcaactaagcctgtgtgccacaactgctaaagcctgtgtgcccagagcccaggcttggcaacaagagaggcccccaccatgagaaacctgcacattgtagtaagagcagtccctgctcgctgcatctagagaaagcccatgcacagcaacaaagacccagtgcagcaacaacagaataattaattttcaaaataccaatagatttctacatacttaaaaaaaaaatcacccttagaaaaataaataagtgaagtgctcccaggggtggtagatactgggtggagaagcaggacagcaaatggggagagaccgagggagggcctggcctgcggggggtgctctgggacagactgtagctgcgtctgccagcttggaggcgacggagctgcgctctcatatcctaagaaactcctggtcacttctagctcttagtgaatctggagaaagtgtctgtagtggc

SEQ ID NO: 40425 - DNA, 1729 bp, Bovine  19866880500108
  misc_feature (1)..(1): n is a, c, g, or t
ncctctccctctcccacagtgcctgtacgactcagcgtgtttgctctaatgtcttcccccaccggaacatgaaatctgtgtggaaaggaccttgtgtgcccttctcagcactttgcacagtcccaagcacacagtaggtattttacaaatgcatgtatataccttctaccctgcactgtgtgctttccaaggaagaaaattttcttctacttttattttccaggagtcctagaagcatgtgtggtggtgacaagcccagactcttgagctacctgtgctgttttctagcttcccttctctgcaaaatgaggtgataataattcacccaactctcaggagtgatgtgaggatcataggagttgggacatataaagctatgtcagcatcagacacctgttaagaaccacctgagcgcttactctatcgtcatctcactgggaggtcatgtaacagtgctgggccagagctgatggagtgggaaatgctcagcaaaaggcctggcttacgagaggtggtgctcaatagatgctgagtcttacctcaaattccaggttagttaaattacatgtgcatcagtccacaagttcaagagtgctaggaagtgaagttgaaagtcgctcagtcacgtccaactctttgcggccccatggactatacagtccatggaattctccaggccagaatactggagtgggtagcctttcccttccccaggggatcttccccacccagagatcaaactggggtctcttgcattgcaggcagattatttaccagatgagctatgagggaattctctgtagcaacctactctttgttttcaaattccctcccactgcatagatgctggcattgtgctgacagtcccatttgttgcctttctgggatcctgagttctccccactatgttcttaggaagccacagggaaagacttccaggttccaaggtgaggcagagggtctgtgctgaccaggacaataaatgtttcagggaaaacccatactgaggggtggtttgaaacctggagatgtcctaagatatggcctcgggtcagatggcagatgcatagtaactggggtaggagggcatttgctcctgggctctgatctatgggggtgccacagactgccactgggacaacctgtcactgcaactctgtcctgcataaagagctgttgctttttaaacaggcgaaatcaattttaacaatttcagttaacccaacacaaccaaaattttatcatttcatcatgtgataattgtaagatatttgttagttatatagtttatgtttttgttcataccgattctatgaaattcaatgtatgttttatacttacggttcatctcaatttggactaccacatttcaagtgttctatagccaagtatggatacactctactatattagtgctgatctagaagactgcggttgtggctcttctgttatatttttaataggtgaaaatgctctcatttcactttgttgtcatttatttatgggcaagaccagaatggcagggacagggtgcagacacacccaccgccctctatctctctaagaagcttgaaagacaatcccagaagattaaagctagctctttctgccagcctggatggatggggctgaaaacagaaattacactgagtttcaagaaaataatgaaggatatatttcttacatactcatgggctaggactgtacatatgacaattattatacaata

SEQ ID NO: 40426 - DNA, 2131 bp, Bovine  19866880511468
  misc_feature (1)..(1): n is a, c, g, or t
ncatcaagtcctcacctgacagaaaaaaagggggagctctatggactcttcttttaagagcagtaatctcatcaccagggccccactcaccctcatcacctcatctaataattttacctcctaaaggtccccatccccaaatatcatcatattgggggttcatgcttcaacatatgagtggggggtcaatttaacccataatagatgcttttgaactgtggtgttggagaagactcttgagagtcccttggactgcaaggagatccaaccagtccattctaaaggagatcagccctgggtggtctttggaaggaatgatgctaaagctgaaactccagtactttggccacctcatgcgaagagttgactcattgggaaagactctgatgctgggaggggttgggggcaggaggagaaggggacgacagaggatgagatggctggatggcatcaccgactcgatggacatgagtttgggtgaactccaggagttggtgatggacagggagacctggcgtgctgcaattcatggggtcgcaaagagtcggacacgactgagcgactgaactgaactgaactgaaagaacctctaggaacctaaaggaaatcaacactaaatattcaagggctgatgctaaagctgaagctccaatattttgtctacttgatgcaaagagccgactcattggaaaagatcctgattctgggaaagactgagggcaggaagagaaggggatgacagaggatgagatggttggatgtcatcaccaactcattggatatgattttgagcaaacttggggaggaagtattcttcaagtatttgaaaattattatttgactaagcaaagaatatttgtggggaagaatatttgtggggatttccctggtggtccagtggttaaaacgcggcattcccaacgcaagagactgggttcaatctctggtcagggaactagatcctgcatgccacaactaagacctggcacagccagataaatattttttaaaaaagaatatttgctgccgctgccattgcctgacaccactgtgattgtcccaagaagtcaaaatgaaccaaactcagtcccgtgcacagagcaatgtgctcaagtccaagtaccagaggagatgcaatggtaaaagacactgcggctgtcagcaggaagtgcatcattcaacgttaacaaccccccatacacagaaagtacagcagagtaagtcgaggatgacagacacctgtgtgcatgccaccacctctgcccacagccagcatgaggctccagcatcctgcccagcagagcaggcaggcagcctccgctgtgcttcccatggtgacctcacacaggagtgcaaacttcaggacatcccagctcaaaagttcaggagagagatcaactggaactacagcacttaaggaagtggctcagctggtaaaggatctacctgcaatacgagagacccggcttcagtccctggattgggaagattccctggaggagagcatgacaacccactttcggtcttcttgccaggagaagccccatggacagaggagcctggtaggctacagtccacagggtcacaaagagttggacacaaacttaggactgagcacgcacacacaaaccttaagtatgtcaaagaagagtcaatcaacaatttgtgaatataagaaatatttaaaatagccacactactaacacaacattgtaaaacaactgtactccaataagaattttaaaattagctgcacaaagcagtgaggactaagtacccaatgaaaactaaatcccttttctaatgccagctgctagaaatggctcccctaagtatatttttgtgcttggttgtttctttatttagaaacctcagcttcctctttgattaaattttacaagggcttctattaattttaaagataaataattaatgctcatagttatcaaaacacttgcaattacatcaattgagtctcaacaggaagaatggatgtcatctacactttacacaaagagaagaaaaatgactcagggagataaagtgacttttccatatcagtggcagagcagggactcaaacagtgtgtgtctgacttgaaattcatgacaccaagcctccatgccaggta

SEQ ID NO: 40427 - DNA, 1908 bp, Bovine  19866880686185
  misc_feature (1)..(1): n is a, c, g, or t
ncattagatcctgtgtttctctctctggtctgactccccctttgcctttccttctttgagcagagtataccttgctattgctctaggtaatggaaaaacaaacaaagctaacaatcttgattactgctcattgtaaatcattatttatcacagacatgttactatctacaagtctttcctaattgcaccatctttttgggcttccctggtggctcagatgttaaagaatctgcctacaatgcaggagacctggtttgatccctgggtcagaaagaccccctggagaagggaatggctacccactccagtattcttgcctgaagagaaaggaggagcctggcaggctacagtccatggggttgcaaagagttagacacggactaactaacactttcactttatcaaaaaccctttaaggtgagttggagctctctttatacatcatgtttggagaaggcaatggcaccccactccagtactcttgcctggaaaatcccatggacgggaggagccttggtaggctgcagtccatggggtcgctaagagtcggacacgactgaacgacttcactttatacatcatgttaccactaacataatgtataaaggaaaaaaaaaaaattaaggttctaattggaccctttaaggctgtagacatgggaagcgttctagaacccatcactagtataacagcatgctgcctcagttcctccagggtgaccggtgtctacagagctgaagacaagcaactctaatctagtccagcaaaatgggtagctcacactgccctgatgaaccctaatgagttctccttcccaggccttcacattcatccatttcatccatgtcccagccagtcacaggtcagtggatgaaaaccacccagggtatctatggccaccacccttgggtcacccttgctgtgagttcctgtgttcctccagttttggtggagtccagcttcactggtcttccctgctaatttggcctccacttttacctaatgcacatggcttatgattttagacccaaatatgtcccttagaagtcttgactcattgtagtagactgatatactcatcaccaaatattctgatcctcctccctgagaggattataaaagcctgtcctgttgaactccagagtagctatggcccccttggccaacgggaagtgggcagaagtgacagtaagaacatggcttgccatctttcttcccctctgtctccttgacctgaaacattccctggagaggctacttcagaaaacacatttcccctggaaagcctggtttcagtacggagatatggaacaaattggcagctgactcgttttgggacataggagtgagaagtaagtctttattatcataaatgttgaaatttggtagtcttatttgttactgtgtgtagcatgtgctaagtcacttcagtcgtgtctgatctgtgcaaccctatggaccgtggtccaccaggctcctctgtccaagggattctccaggcaaaaatgctgaagtgggttgccatttcctcctctagaggatcctcccaacctagggatcgaacctgcatctcttatgcctcctgcactggcaagcaggttctttactgctagtgccacctgggaagcccaaagttatgggcttcccaaagttttccggtagtcccaaagttttccagtagtcatgaacaatgtgacatgactcactggagaagcggtcgaacccttcccagcccagggattgaacctgtgtctcctgcattggcaggcagattctgattcacatatccttggattcctaccactttcaccaacttcagacagatagacagactgacagcctgctaaatttaattctagccccaacataccatgatgttcagaggggaggatagacccaccaggcagg

SEQ ID NO: 40428 - DNA, 902 bp, Bovine  19866880735195
  misc_feature (1)..(1): n is a, c, g, or t
nacatatatatatatatatataaaaagcattcctcctatgtatatgaaaaggatctttagtgacggaaatctgaagtttcctccccttatcactcccattagtattaggcactgtttgtagttaaattcagagaaggcaatggcaccccactccagtactcttgcctggaaaatcccatgggcggaggaacctggtaggctgcagtccatggggtcgctaagagtcggacacgactgagcgacgtcactttcacttttcactttcatgcattggagaaggaaatggcaacccactccagtgttcttgcctggagaagcccagggacgggggagcctggtgggcggccgtctatggggtcacacagagtcggacacgactgaagcgacttagcagcagcagtagttaaatcaaaccagcctttcctaactgctggcaaatgatgaacattttttcctataaaatacagcaatattcaggtcagaagtttttaccgtctgcttcactagaatgtactgtttcagcttctgtcattggaatgttttcagtctcccctaaactttcatgttccattgagaggtccagttcttcgtcttggatctgatcaatcacagcaggcagaggctctggttcaaggtgcaaaatcaggtttcctttcacctctcaataaagaaatgcacaaacatgtttccattccaaaatgactaaaaagaacttgcacataaaattttaaagctcatcacagtttcaagtttaaaatatgagcacctctttcaaatgagaactcctttcaaaacaaaaactgcttcatcaagacaaatgtattttcccacaaagacatttaataagtaacattttagtgacatttaataacatttcaaagtaaacttgaaagtttactaaa

SEQ ID NO: 40429 - DNA, 895 bp, Bovine  19866880736777
  misc_feature (1)..(1): n is a, c, g, or t
nctgtgacagtttctcagtttgcctgtttttcatgaagaatagtgttttaaaatgcttaaaataacacaaatccacaaacgaaatggatgacatggatatacagctatcacaacattaaaagacaaatttgtatatgcttctttattagcacatttgggtgggatctaacagatggcccaacaacacagtaacttggatgatgaagaggacgaagtacttcaagacagatgagatttccatgggtgacagtcacaggtggtactaatatcactttagattcttgactacttacggacatggtttacaatgttaagttttagttggaagtagatagaaaataaagctgccctatgttttcttatcccagttcatggacttcctgacactctcatggagcccacattaggaagccctgccccaggggcaagagaaaaagcagaaatggctcagaaactccacaaagtcttgggagttctggcatgggatggcgtcctcaaaattactaacccaatttacaaagagctgctacataatgacacatgcagcaggctgtgattagctgcattttagccacatgatttattgttggctacagtcagatgcagttccttcactcctagtcaccctgaagggtacccattagtataaaaatgagtttgtgttgcttccataaccagaagaaacagggatttcctttgagaaccatggagggaacatgtttctaacttggggctatgaaatatgtgtttaagtcacttttgtttcaaagctatttgaataataacattttacctccaagcattcttttgagttgaaaagtaactgtttacagtctgtgataacttttctaacatgccaacaccatgtataattagcaccaataatagttcaaca

SEQ ID NO: 40430 - DNA, 663 bp, Bovine  19866880747869
  misc_feature (1)..(1): n is a, c, g, or t
ntacccactccagtattcttgggcttcccttgtggctcagctagtgaagaatccacctgcaatgcaggagacctgggttcaatccctgggtttggaagatcccctggagaagggaaaggctaccctctccagtattctggcctagagaattccatggactgaactgtataatccatggggtcgcaaagagtcagacacaactggatcaactttcacttgcactttcaaggcttatactcagagctatcttgatctttgaaactaactaagaagaaagttctattattattaacatgaagaaagcactctagcaggaccttatcatataacatgctttacggtattctttgtcatttaaattttaaggtaatacgatcatagtaaaaggatttgttcagaacatctttaaaggttaaattctcaatgtatattaaaatctcctacaatcttaagcacatgacacacacacacacacacacacacagtgtgcagaggcctttaccataatatgagtcttcacttttcccttctgaattatgaaagcacctcccattcctacaggcttatctccataatgtttttcaagagtctgcctcatacatgtcacaaagttaagttttccagttcttctttgactttcacctcaaggacctagagagaaca

SEQ ID NO: 40431 - DNA, 900 bp, Bovine  19866880767936
  misc_feature (1)..(1): n is a, c, g, or t
naccttgactgacccaccagcccaccagtgcctttattgtcaagactaaaaccactgcaagagtggcctaactctctctctcccatcaatgcatcttgaccattgccactagactcatctttatcatgacactctaaggatgaatggtatctctctattgcctacaaaataaatctgaaccaccaccatgatcctctccacaggctaactttacatgtttttgttcctcaatcccccttcatgaattttttcttctgccaaattgacctactcacttcccccagatacttcttgattttactcattctgcttcttctttggcaacatgtcctatcttctgtttctctgatccatttctgatccatttattgaaatccaatacatcctagagaagccatttctaacccaaccacctcttcaaatgctcagtaggatatgattgctgtttttactgagcaatttcctaaaattagggccttctcttgacatttctctcctatcatatgtgccagaaattctaataaggaatttcatttttaatagaccacagtcaccactaaaaaggaaataagtatcatatacagtttaaatgcacttttaaatcaaataaaatgtatttttatatgaagttttataaccctgttttatgcaatgaattgcatccttattcaatgctgcagactcagctaactacagccagacaggtcatcaggaccagtgtggtcaggcttgtgggactggggatgaagagacatcctgcccagttaggagattgcctaaatacagagggatacagaaaataaatgaatatattgacgatgatgatgggggaagggagactggggtaaacccatggtgattggttggaatggaaatatggtcgaacttgcaatttttttc

SEQ ID NO: 40432 - DNA, 1769 bp, Bovine  19866880825742
  misc_feature (1)..(1): n is a, c, g, or t
nctgaagtgtattcagaggagctgtacagtaaaagtttgtaagattcacagctcaatggggtaaaagctcttgagtgtcaagggattaaaaaaagcaaggagcactggctgtaatcactgagataacagtagtggagtgatatttgaaaaggattcatttccagagcaagccatgagtatcttcaaattaaaggaatataatttgaagtggttaactcaaggacctgtatgccttagtattgatgtgaattgggacattttgagttctaatgctaaagttccatcagaagatgaattaagatgacaaagacatttttacattttaatagatgtttatagaagcagtacttttctggctctggacattgtaagctcttctcaacaaataattatgcataagaactttacctgaaatggttacttgtgttgtaagaggatttgattaaattctgtttttaattgcaagaaaatcttgagcatctttttgtattataatatagcagttacatttatctacaccttccttaggtaattcagcagtccagggcagctatctcaaacttatgcactacatacaaagacatcacataaagtctaggagttggttgacaaaaagtggtgtatatgctatctttttgtccttctcttgttgaattcagaacccttcagtcgcaaccttattacagaggctgagctccagaagtgtttagtctccaaggtttaaatctgtgtaagtagattatattacttatattactgtgaatatatatatgtatatatagtctagaattataatcattttatcaaaactccattggaataaaacagtttggatagcctgtggagttcttataatgataccattagactaagacatgttatttttttttttaaggtaaatagctgttttctcctgcttcctctcttctttttgcttaccatgcctcttcctccccacacccctgaaacacacatttttggtgggaacttaatgtatacttcactgatatgtaggtgagatattattatatactcagtaatttctgttgaataaacatgttaactgttttgattttcctgtttttaatatcccattagggtctctgtttccccatcatggtacatttgaagtaataaagaatacagatattgatctagacaagaagatacctgaagattactgtccccttgatgtccagattcctagtgatttagaagggtctgcatatatcagggtatttgtctaagtatttttcaagtaatttcctattaatagcccagaagctaattagctaacatattttttgtgttattattttcacataggtttcaattcaaaaacaggctccagacataggtgaccttggcacagttaacctcttcaaacgacctttgcctaaatccaaaccaggtatagttctgttctctaacttctggtcttgtctgccctgactaaaagtaaatatagttaggaaaaataggtactttaaataagagcaattggaaatatgactttataatttgttaatcaattattagtgaatagctggtgcagtccttttgttttttcgccacaccatgcaccttgtaaaattttagttctctgaccaggaattgaacacaggccctcagtagtgagagtgcagaatcctcatgacaggatcacgaaggaattcctgtgcagtcttttttgaaaggttgaacttatttaccatttttctctgtgtagaagaagtaaaaaattctatattttggaaagggtatgctgt

SEQ ID NO: 40433 - DNA, 1076 bp, Bovine  19866880842509
  misc_feature (1)..(1): n is a, c, g, or t
ngtttaggaatatcccatgggaattattccttatcactcaattaatataatttagcaaagccatgaattacatgtattccttatctcactcaaaaacatgtattaagtgtctagttttccaggcatttttgttggagctgggaatacagagagacacccaaaactttcctactgtatcaaagcctacattacagtgggacaacagtcaaaattttaagtgcatacaggaaatattttaggtggagataagcgctatgaagaagagtagagtgcggaaaagtgagtgagtttgcaggcaggaaggaagatgagggacttttagctagggtggggcgaggatgctccggggaggtgatattggtgcagggaatggaacagaataagggagggagccaggcaagacctaggagaaccttctagacaatgggaacagcatgtgaaaaggtcttgaggcaggaatgaattaggtgtgttcaaaaaagaacaaaagaccagggtggctggagtgagctagggggtgaatacaaggagatgaggtcagagaggccgaggccaggacatggagtatagagtgacaaaaataacatggtgatgcccagcctgagaacaggagtactgcagattaggaaagcttctgaacagggacttacttcctctgaggaggtcacatggggaaggaaaggatgtaatgaggaagatgaatatatagggtgtagaatgaatttatcagaatcttgatttacaaaatgatccagtaaatctatggctgatgttgatcctaatttactttctgttactttgtgttaactttcaaagtgaagtagactaagaagtctcccaagctatactttaatacattcatttctttcttctctgtagaaaggaatagacaaggaattccccctactagttacagtctttgatgagaatctgagcaggtatcttgatgaaaatattcagaagtttacctggcatcccttcagcgttgacaaggaggacaaagagtttgtgaagtccaaccgaatgcatggtatgaaaaatcttttcctcttgtaaagtcaagtcataatcacatt

SEQ ID NO: 40434 - DNA, 2349 bp, Bovine  19866880882235
  misc_feature (1)..(1): n is a, c, g, or t
ngtcgatttcctttaggatcgactggttttatctccataccagcaataacaaaataaaacagattaaccatgggtaggagaacaggaagcaacaaccccatttcctgggtctgggaaggaatttttgaagtgaaggaagagtagctgagtgaagacgtggcatattgagttttatcctcaggctgcacgttgccctgaaagcttgcagtctctaaggatttctgagttcgggcccaaaccaagaagtttcttcacctggagttctttttatgatgattcacctgtgcttgaattcttaattttgatttacctttaaattgacaatatgaagcgatttttctcaagaagaatgcatagatatattgtatgagctctacatagcaaagaatatctagtgtgactttctcacttgaaatgaactttactacattaaaaattctcagaagaatactattaatgtaattgctcacactgtatttttctgacagttttgcaaaagaaaagtctggttttgttcttttccagaacaccaatttaatttttctatttttaaaataaattatttattttaattggaagctaattactttacaatattgtagtggtttttgccatacattcacatgaatcagccataggtgtacctgaggacaccagttttgaagcccaaattattatagaatatattcttctttacccttttacccttctcgttcagtttttccaggaagtgagatgctgttttcagagcgtcagtttgaaacacggtgattcttttctatttacaaacagtgcttttttttcagaaagattttctcagtgtcatccttgatctttggttctgtttcttaaagagccctcgtcaaccttgagctgtatcaaattctctcatccatatctattattttattttatttttttttatatgctgactttctgcacaaaaggtttctttttattcattaacataggcaaagttatttaagtcaataaatttttaaggatttttcacacgtcctgattctttccactgcctatcaccatagctcctccgaggttgtcatcttcaaggtagcccgttcaagaagttctgctcaatccacagctgtgatgcctgccacgttgttttagttgggcctcttagatcttcagtggagttcacttctaagtttgccacctgtaatcttcaaagacccaatttcctcaagcagtttactataggatcctgtttagggtcaggagatgggatctgtctagttcttaatgacaaccgtaagaaaaaaaagtattagttacttttgaagattctgtcaaactgaccagtataagaaactaaaaggatacttgtatcagtagaaataccaggtctaacatgcacaaagcaaaaaaaccaacgatgccagatactgaatttatatcgcactgtcttttgaacagccagcaggaacaaactgctgaatgcagataccatgcagtgcaacatatctattattttaataatcccccacacctgtatttttttttctgtttccctacatcttttcaggtttgtttctcatgttattgatttagcttattcagtatgtcagctctattctttgcagcttcagatgatggttccagtgttgctctgattaccttcctcatcttagaagtcatcatctactctgtctctgttggacttaactcgaatcctctcccacctccaatgcctatttctttgatttaattacccattgaaattcatgaaaagatgtaatcatggagacctgcctgcaggacttcctgtctctgactttgctaatggtatttccttgaaggaactgatcgattgttctttccatgatgcatcagaatgcaaggtaggttctcagcatcatctctctatccctctggccctctctcttcctgttcatctctggaagctgcaggcacagtatggatgtgctctgaactacagtgatacccagcaaagcctgagagagtggaatggtcctcatgttgtagctgcctccaaaaacagccttacagaaatgacttcacctttcactggctgggttaaatcttgagtttctgatccaggttgaggaataaagaggcacatgccctaatctcactgaagctggcagtaggtggagcagcctgcacattcatttactttcaacctgattcccttgcccctgatcttattagatgcttcttccaaatgcagacattgggttgattgcactggtttatgatgattagcaagttttgatttttttctgtgtctctgtagatacaggtattttttaaaaatatttttgatatggaccatttttaaagtctttattgaatttgttacaatat

SEQ ID NO: 40435 - DNA, 2621 bp, Bovine  19866880974981
  misc_feature (1)..(1): n is a, c, g, or t
ncagtcattcattaactcacagttctactggttcaaaatcttggaatagtgtggttgaattctctggttaggttttcacaaggctgatatatcagtgtgtcagctgaaatgtggtctcctctggagctcaggacattcttccaagctcatgttgttgtggctaaactcagttccctgtggtttggggactgaggccatcctcttttccttgcaggatgaaagtgaaagtcgctcagtcgtgtctgactctttgtgaccccatagacgatacaatacatggaattctccaggccagaatactggagtgggtagcctttctcttctccaagggatcttcccaacccagggatcaaacccaggtctcctgcattacaggtggattctttaccagctgagccacaagggaagcccaggaatactggactaggtagtctatcccttctcccactgaatcttccagacccaggaatcaagcctgcattgcagctggattctttaccaactcagctatcagggaggccctccatgacagattggagataccaaaaacagaatctatgccatagtcacaaatagattgagatgcactgggctagtgggtactgaggtctaaaaggtatattgtttagagtcatgctagaggctgtaaaaaataaaccctcatcaaatcagcagctcacaagatacaagtttatttcacactatcacaacctttcaatgtgagtatttctagtgacccatagattaagccagggatccatgctccttttacttggtgattccaccatctcctatgggctcagagtcctttgagtctgggcagaggatgaaagagttaaaacctccactttgcctgacatcaatataaccacacatctctgttttgtgtttgtgttgcataccttccctcccccaaatctttgcttttatcctatatgcatctttaatgtgactcttatagacaggatataattggttctttttaaaaactgaattctgaaaatctttataatttttgtgtttctcacatgtgcatttaatgtaatagctggtatgtttggcattaagtctaccactttattatttgttttatttgttccctctgttttttgttcctctgttttccctttctggctcccttttggattgtttgagtattatttcactactccattttaattgatctcgtgatttttgagtatatgtctttgcaaattttgttcgtggttgctgtagggaatacaataaacatgctagcctaaccaaaatatttcacaactcaggtggaatatagcaacctcccaccacgttggtcccttcactccctctcctttatattttaaaaagttaaccatatgtattacatctacatacaatgaaaatctcatcagtgttataatttttgctttcaactgtaatacacagtttcaagaattaaaaggcaaccagtctatcatgtttacccagatcttcaccatttctattgcttctacttcttcctgacattccaagttttcctttactaaagaattaactttggttttcctttcagagcaggtccatgccaatgtatggtgttggcttttttcatctgaaactatccttatttcacctttattcccaaagggcatttcccccagatatggaattctagattgacagttcttttctctcagcacttataaataatgtttctctttctactgaaggtctggttttttgttttttttttttttaaagagacagcctttatttgaaatatttttacactgaagaattcaaaatgtggtaagttctggaactgattgacctgtacttaaaaggaactgttgacaaatattcaccagaaataatctgaacaagcaagaaaatacggttaatactactgaaacctactaaaagaattccaggacatatggtttctatgacacaatgatacctcttaagcactgtcacagatatgaaactgactgctcttctagacacacagcagtatagttaacaacattcaatcacttttgttctttcttgactatataaaaattaaaataccaattaaaaaactaatacagtcttctctttaaatgttacagatacaatttccatattttcagtcaatagcagtgtggcttcagagatttttcattcacgagccaaacaacaatctgcgcaaagggaactgatagtctataggctcacagtgcaaatgaagagtttgggaatgcaacaactgacatttctaaaacaggaaacagacaaaattcttaggagacacacagtaagttcttctaagcagctggccacagaactagaacattggttaatttcactggtgatttcagtgggactccagatgtttccaaactcagcttgaacgctcaccttcagctttgtattttgcttttccagtttcactagtgacacaaacatgattcaaatccctgaagtattcattatagtcgagggcatatctcacaaggaacttttctggaatttcaaatccaacaaagtctggtctatatccaacactttgaggggtccttttcaccagcaagcttgcaaccttgcccatctttggattacgctgcttgaccaaagaaagcaaagtttgcattgttttg

SEQ ID NO: 40436 - DNA, 1145 bp, Bovine  19866881022335
  misc_feature (1)..(1): n is a, c, g, or t
ntatgtaagtaacaaaaggacacccaaccaagaaacaagaccactctgtgcactgaatgcccatcttctgtaacagttttccacgcacgggacccttctggttcaacattattattcttaaaactattactggggacacatatttatggatgtaaattaaggtgattcactcttttttttaagagagaaaacaaaataaaaactcctagaagccctcagcctttataatcagtaaagttctcaacagttttaacattttacatttttttcttttatttactctgtaaagcaaagaattgacaatcataatgtacaaaatataaagtagcccacaattataaaacttttgttccttacctcggtataatttttagtagcaacatttcgggagggctgctgtcttgtagatttaaaggctacaatgaaaaagatgatacatccattatgtttttcttaaaatagtttagaaaaatctgcatgcttctttagctgattatttcctaagttttatctgtaaaagctcatgatgactaattataaaaccacttccatttcttaaaatctgaagggagatggaattatatgtgtaattgtcagtctcaaatgatttttctgatttactcaaataaagtaataagcagtgttcataaagacatttatagtaaaaagtattttacagcaaaatacatggataaaatctgatcaccaaatagactgaattccaaataagtgaaagtaacctcctcaggtcttctcttagagttggcaagctctttcctcgtggctctactgtgttaggagccacttgttccagtaagagcttccttactctcctctactgtgttaaaaatattcagtatctaagtaattgtccagagggaattctagaaaaactatgttgtttcacaataactttcctagaaatccttacattttcacctttgtaaacctggttagaatcatgaagtttattcttcccaagactatgatattatgattttacagtaagaaacataatttggtcttcatccacatttctggcagagagcccctagccagtcagtgttagtcactcagttgtgtctgactctttgcaacctcatggactgtagcctgccaggttcctctgtccaggaattctccag

SEQ ID NO: 40437 - DNA, 3786 bp, Bovine  19866881062161
  misc_feature (1)..(1): n is a, c, g, or t
ncgctctccctaccttgtcctactcttcctcctacatctctgcgtgttccttcttggtcttctgggagggttctgtttcatttatctgtgtttgagtgttttcttgagctctgtccttggacctctttccttctcatcatatggacactgcaacctcatcctcaacatggcttccatgatcacctatatttgggtagtttctaatctctctcttcagtcctgacctgcgtatgtgtgaatgtgtatgtatatttatgtgtatatatgatctccctttctctctccctttcccctttcctcctctccttagttataacagttaaaatccaagagtattttacttggatttcccacagacaccttacattcaatatggcccaaccattcttagctcctccattcaatctgcttttgcatgctgtttggtgagactgactttagtcactcaagccacaggactaaagtccagaagttgtcctggactcctctaccacttcctgcaaacattttaccatgacatgtgaggcccttcacagccactggctgctctcaaatcctctccctcccagtcccagcctcaccagcacgcctcctgtgctgggctgcttgctgttttctgaacatgccactgctctgggcctgcagtcctacagccccatctgccaggaatgacctgtccccacttcttcactcagctccatatcctttagggctccagtcaggtgttatcatctcaagaaagcctgcccttgcccctccctgggatagaatccaagtgctttgtgcacttctttttagtactgcattcattgcaagggagtataagcttctgcagatttgcttgcctccccatttcgattctacatccctgaggatgaggactttaccctgtctttctgttactggcccctagcccagtttatgatgcacagaagtgcctctaactgagtgagtgagtgagtgcttgagagctgtatacaagatctgatggttcacagaggcctgaaactacctgtagcatctgggttttctgagtccatggacagtgcttccctcgtagtttacttctcagtacccttccttggaaatgtcccatcctgccagtatagtgtgtttaaaactgaaagtatgtctgaacaggcaaagcctctcagtagctcctctcaaagggaaccttgaaacactctgcatatgttcttttggactgggacagttttgcgtggttataatacacatgatccagtgtgttataatacatatggtccatgcctgtccatggccacttagaacatgactcagcctaactgcatccccactgcatttcctgtatcccaccatctacaagacgtgagctgatattggtgtcaaccactgaactataaccaaaatcctagcctctctggtgagagaaagagacaaggtcccaaagtccagctaaaaggaattgtctttaatactttcaacattctgtgatcacttttgctctaggcctgtgcacatgctttcctctttcacctgagacctctcccggatcctccacactcttaggaccttcccttagctgatgccttccttttcaggtctcagtttggagaggtctgcactcaaggaggtccatgtctggatcaggtgtccttcctgatgctctcacagcccctaggctgcctctgtcaggatgccacactctcctggaattgcctgctggactccatgtttccaattagactaaagcccctggaccaatagagaatgtgtctgtcagtttcacagatgtaactgcagtgcctagtgcatagtagacactcagtaagtaattataaaatgaacaagtgattttccttggtaagaaagtttctctcatatgattcatttttacaaagaaacatacccagaaacattctgggaaacctcagcgttgttgtggatggtcacagttgtgttttatatatatgtgatgtttaaacattaaaaaaaatgtgttttccatgctcattcacctctcacttatgactaggtaactcgtgcccaaaactctcgtcttgctcatcgtttttattccctgcagctctgttaaccatgtggcttggcagatgtggttggtaaactgtttttcttttaggcgcaatctctcttagcacacaatttcatatgtaaacaatgaaattggatcaatttatatttcatagattaaagaaaatatacatctttctagatttgttttagtctttatatctttgtcctacattaaaaatatctgagaaaatgcacataagagttggaaggtccacttgtgttttgtggtttatagaaagaaagcagtggaaagtaagtagttttatggtgacagaaatttgactctttacgcccttgtgtctataaatgaaatgctagagagggaaaatcaattttccaaaagactatgggtatactgccttctggtaatgcaacgatcaagcagttgccatttctagaaaagtaaattttgtgattctccagtgacctctgttataagtcagtatggtatcatgctatgtgaagctgttgaatgtttacttaagactaagttttctggataattttaatggttgcaaatattacaaaactagattttaacttgctaagtgtctcctcatacttgacttgatgattctgttttgatagaaacttgtggaatgtctggttgccatggatactggggcttaagaggagcctctgagtcctcttactgcattgtccttaaaagactgcacccatctgcagaaatgtagaaactctcttagcttctccaaattccctgggatggtggtttgttttgaatctggatgaagtttcctggggttgtttgtactgcaggttggatggtccctttgggtggagtgaaaggacacaggctactactgtggtttttctgagagctgtgccttctccattccaggaagatggggaaagtcaattaaagtttctcaagcatcactctgttccaggtcctgtaactaaactcttgctagacctcatctcattgccttgtctactagtcaagagcaaagactgagtctagtttaatactgtatactacacagtttatattgattgatacaaatgatttttgaatgaatgagtaactaaccctgcagaagtattaaaaaatggtatggacctaacagaagcagaagatattaagaagaggtggtaagaatacatggaagaactatacaaaaaagatcttcatgacccagataatcatgacagtgtgatcattcacttagagctagacgtcctggaatgagaagtcaagtgggccttaggaagcatcactatgcacaaagctagtggaggtgatggaattctagttgagccatttcaaatcctaaaagatgatgctgtgaaagtgctgcactcaatatgccagcaaatttggaaaattcagcagtggccacaggcctagaaaaggtcagctttcattccaatcccaaagaaagacaatgccaaagaatgctctaactactgcacggttgcattcatctcacatgctagaaaagtaatgctcaaaattctccaagccaggcttcaacaatatgtgaaccatgaacttccagatgttcaagctggatttagaaaaggcacagaaaccagagatcaaattgccaacatctgttggatcattgaaaaagcaagagagttccagaaaaatatctatttatgctttactgactatgccaaagctcttgactgcatggatcacaacaaactgtggaaaattctttaagagatgggaataccagaaca

SEQ ID NO: 40438 - DNA, 1117 bp, Bovine  19866881102950
  misc_feature (1)..(1): n is a, c, g, or t
ntggtaaagtcttctatgactttcttgccattaggtgagtgaatttctgcctcttctgtcagaaacagaaaaactcagattatccagccatgtcagaacatccactggagagaccaactgtgtgtggaggtatgtgcatcagattggtgaacccacacccattcatgaaaacttgaatttgtgacttgctgacatatttaaaaaaaaaaaaaaaaaaaaacttttttaaacagaaaccttttcaaggtgtacagctgcaccagagagcttacaagaagcattcataaaaagaaaaaaggcatttatagagagatcctcacagagacagaaagagataaaggacaaagttcatgcctctggatattctcaaaccaaaacaataacagagaaaactacaggtatctgttatcaaagagaattatgtatttacttagtggttttattcagtggcattatgtattttactcagtggcttgttttccactcaggttcctttgtgagtgacctaaagggtatgagtaaagttagggtgtcgcttcctgaagataaaaagactgcacaacccccatacgcacaaaagggcagtagggtatgtatatgtatatggatttacatatatatgatagacaaaggaatggcaacccactccatgtcccttgttcatagggttgcatagtcagatgcatagtcagtgactatacatgtatctgaagtatctgtctttaattccatacaaatttcttatagattataccttcaattagctgaaatgagaaagcagaaggaagacaaagcaaagcaagatgcacatgcccaaaacagagcaaggacaaaagaatttcataaggtaagcagcatcccatacatacccccaacttttcatgtctaaggcacatcggagcctgatactaataataactgatactatttcctccacagaaaacattagagaagcttcgagccagaaatatatgctgactttctgcacaaaaggtttctttttattcattaacataggcaaagttatttaagtcaataaatttttaaggatttttcacacgtcctgattctttcctctgccaatcaccatagctcctccaggccttgtcatcttcaa

SEQ ID NO: 40439 - DNA, 1017 bp, Bovine  19866881108243
  misc_feature (1)..(1): n is a, c, g, or t
naatagtgccataatagtggaatatgaggcagtgtggcttgcctgtggaggatcttttttgttaggggggtcatttctgaatcattcccagtcccttctaaacaacctgtgtttatcacatcctcatttgttggcacccagcttgacacacaattcaagcagcctggacgctgttggcttctgcacagtacagggctgcttccaagccagactgtgaatttcaagtgccgtggccaggaagaaactagtaattataactccatacatagcatcaggcttcacaacaagaaaatcatgatctcttaagcactttcttacggattagcatgttagtggctaagttgtgtctttgcgaccccagggactgcagcccgccaggctcctctgtccattggattttccaggcaagaatactggagtgggttgccctttccttccccagggactcttccagaccctgggattgaatctgtatctcctgcattggcaggtggattcccacctgggaagcccatggattaatatggttatccttaagaagtccaaggtgggggcaggtcaggtttgttgctcccatttaatggatgcaggaactgagattcggagaatttaggtaacttctaagatcacacagctcgtctccctatgcctattccagtgcatgtccctcatggagtgttgctctttcagcatctggcactacctggacttcaggcacttgggatttgggtcaggaagggccaaagtgcaagatggtaggggtggtgtcatcagtcagagcccggggtgtgtggcctcctccagctcagcagctgggttgggggtggagggacagggactgctttctatattggttttccgcatctgtgtgggtattgatttccttctcaaagggttccatctgccttccacctaattatgttaacaatcttcatcctagtcctttgaagacttttatccctgttctaaagaggtgcaggtttccagggttaccagaaatccagagatgaagccttt

SEQ ID NO: 40440 - DNA, 1158 bp, Bovine  19866881142373
  misc_feature (1)..(1): n is a, c, g, or t
ntttccacataaatccaattactttgtttaaaaaaaatctagaagataaaactcaaagaaaaaagcaaatcaaagagttatatcatgattcttgtttgatagtatgtaattcaaggaaatactactggtttgactttagtaacttctgggaatatatttaaatagcctatttatctaccaaaattttttttaaaaaattaacaagaaaccaaatctctggtgggaaagtaaaataaacacacaattctgtacattcaaaactgttaatgtgttcatatcttttgattcgggaattcttttcctttgttcctatggaaataattaaagatgtaggcaaagactttgctaaaatgatgctcattacagtgcaaaaaagtaataagaaacattagaaacagcctgtacatctcaacataaggaacaggctagttctggttcatcaatgtctttggaaacatatctatgaataattcactacactcaaagtgctctggaagaggattcagtaaggtttctaacactcactgcctgtaagtggcagcattataggctttgaaacatttttcttccttttgacctctgttctttgatttttcagaaatgagcttatctttgaacaacttagaaagggtttatgtactatagtatgagactggagaaaactaccttgttcctgcccagaggataatgttctgtcttcactcacagttgctcctgattcaactgtcagggctttactttcagcttcactgacagttgtaatcatttcaccctcctcttcagacacggatttaattgtccagagagatttttggcttcggatcttatttaataattttttaaaaagaatttttgaaggaatctggtgggtcttcactgctgagggaactaaaagaaaaggaaataaaatttattcagcacctattacaaataaagtaaattactctatctttacacttagttaccacaactaccactggttaaaacaaaagtacaactgtattttcctcagtatttacaattaaacgcaattttataaccaggtataaattttttcaacttaaataaggacaccaaaattcaattacagctgacccgtgaacatgcatgtgaattgcacgtgcatgcatgctaggtcactgcagtcattgtctgact

SEQ ID NO: 40441 - DNA, 965 bp, Bovine  19866881240861
  misc_feature (1)..(1): n is a, c, g, or t
nggaaggagggtaggaaaaaggaaaagacggggtacatcaagggagagaaatgaaagaaaaaaagtagaagaaaagtgaaggaaaataagaaaaaaatatgaaactgttgacagtttgagttttcccttactcagaaagtggtttaaatccttcggagtttctctttcaagccagccccctgtcagaacttgaaacaacatcttttctgcatgggatacaggttgtaggaaactgcaaagacacaaaggtacctgcttattaatagattcttttcctacttagggtgtgtgtgctgtgcgtctgtgtctttcccttagtagggctgtggcaaccacttctgagtttgcaaacaacgatgaattctctttctttctccccaaacacaggctctgcttttagtttgttttttcgctgtgatggcttcgtggggtggtgcagaggacagcaatgcagtcatttatcttcaggccattgatcagccaggggcaggggaagggagatgattagcttttgcatttctacgactgctttgtaaatttcaaaaaagaaaacaaaattcgtctcttctcctttcagccctcctgagcgcccgcggccccgctcttctctctcgggttcccgcccgccgcagctagccgctgtgcccaggccccaagccctgctccacgagaactgtgcttccccacaagagcggctttcttttctgtcaactcagcaggcacccgccaggcaggtccttctaacttcccttctgatgactcttctagtgatgctactgacaaaagatgaaatgaaaagccaaaacctaaggttcttagaagacaaaattctcaacggtgggatctataagtgtcaagcattagtgtgtgtgtgtatgtgtgtgtgtttatgtttagaagtgagcgtgtgtgtgtgtttaggagtgagtgtgtgtgtgtattatgtttaggagtgtgtgtgtgtg

SEQ ID NO: 40442 - DNA, 1233 bp, Bovine  19866881257850
  misc_feature (1)..(1): n is a, c, g, or t
ncatctacaaaataatagtgcactctgctctccttttccttccatttagctattaatggctacatgtatggcaaccagccaggcctaaccatgtgcaaaaaggatagagtctcctggcatctgattggcatgggcactgacacggacatgcatggagtttattttcaagggaacaccatccacctacgagggactcaccgggactccctggcgctgtttccccacgtctccacaacgggcattcatgcagccagaccgtgcaggtaaacttggcagggccagctcaggtgaccagattcctatcttcaggcaagtactcttagggtctttccccagaagaaattggttgaatttgggcacttctgcgtgtgcagaaggaaatatagccttgagtagaatcagagagtcctgactattgtatttcaaacacataatgtgaagaacagaggaaaagcatctaataagatccataaagcaaaagtaggagtcctctaagtgacctggcctcacaaatcctaggagaatgctctttatttatatccatgaacaattcagcccaagaaagagtatttttgtttgcttgtttattctctttaaacacagacttcattttagttgctgcttggaagcatcaaccagacatgagcagactggtggttgcttccaggttgtagatgtgaacttatctcccttctctagagattgatagtggtctcttgatgagtccaaacagggacttgcctattgtcattctctcgggtacccagaaagcaagctgtgttggatccggagtccatggagagcccgttgaagtgccagtacccatcccttctcttagagattaataagttaattaggtcactggggcattttaataaaagataaagggtaatatttggcaacatatactctcatgaaaaataagaatagtaaatgctgtggatattaaacatgtttctccaaaccaactttttcattggtctaaaaatgaaaccaatatgctactcaagataagtacttgcctgctctgtttcctttataaataggtatttacttctttccttcacactggaactgcattttagatgctactctctgtcactggttaagaatttgagatttgagggaaaaaaaaattcaaagagaaaagaagatagagctcttcaaagctactcttttctattaacaagtagtaaatatgacttacgtcacctctttacacgttaaacattt

SEQ ID NO: 40443 - DNA, 1156 bp, Bovine  19866881265761
  misc_feature (1)..(1): n is a, c, g, or t
ngtaaattctaatttctgattgtaaattttattctatttataattgcccatgtgtttttccctttttttgttgcttcccctacttggaaagcctttttcttcttcctcatctatcaaattcttacccatatttctaggctcagattagggaccccctcattaggtagcctttctgactgttccagtaaagtgacaaagctcaagaacatttatcattctgcctcaaattttattcattttgtaaatgtataactatgtttaactactagattccaggttccaggaaggtcttatcaattttttcaatcacctcttacctggttcataagtaggtaattaattaataaatatctgtcaataagatgccaaataggcattatacattttcctatgtttaatattaattgtaataaatataacacagacaaaaatccatccaatagcatgcactgaatgaacaccgttgactgtgtggtttaattgtgccattgtaaccatttccacactggcctcatcctttttaccttggaggtgatcactgacttggcaggttatcatccactttccaggattctcaactatcatttctattgtcaggaaggtggctgggaacaggttgacgacatcagtccgatgccctctgctgatgaaggtgttaccataaaaatagatggaatggatgtctatctcattccccatcccaaataggtgccaggacactgattcaccaacgcacatatcaggttcagggaagtttccaaagaggtatccattgagcgctgaaaaacagaaacaccggtgaaagacactcgcctgcagagcccagcagaaccagaaacgatggtaatacatactctagcacagctgaacaactagcacagatcactgggttgtaatatttttgtgcaggaaaaaacgtggcttctttgataaaatgcagtccccaaaggaatgaaaagcattagtctttttaagagaaaagcactcaataaaagtgatcagcaataggaacacagcctgagctgctctgtgaacacaatgagatcaggagtaaaccaaagtgctgtttataattcaggacagcttggccacctcctacttccacctctatttgcatatttaccatccccctggatctgttctgtgtaactagaaa

SEQ ID NO: 40444 - DNA, 839 bp, Bovine  19866881292209
  misc_feature (1)..(1): n is a, c, g, or t
naatgatttgaaagatgaaatatagaatatattgttcggatccttgccaaccatgggtttccaaatgccaaacatgcaacagccagtggggcctgggaaatgcgcatcttctaaatggggtgggtacccttggctttgcttcctgcaggaactgcctaaactggcctcctgctgcctcataacaccctgcacacccacaaattattacttcattagacacattgtagcaccactaaaattatatctgcaaaaaaaaaaaaagcttcattaaaggactagggctggcttaggaggaatgagtcataaagattaaagaaaagccattccacaatcttggcatttcttgagaaattccctgaggctgttcagcagaaaatttaatcgccctgctagctagctggattttttgtaactttcagagcctagagatccaatcttactcatctccttgtgggtctttccactgagcaggcagggtgaatttttttgtcaagttcagcggaaatttagagatgactgggtagtgagatagccaagatactggggtggggcaaggtgacctgaatataagctgcaccttgatctgcatccaggggagtgcaatcttaccttgtggcatgggcaggagaggtagggaggcagggaggcagaccctgagaacatcaagataaatgagcaaagggggctacagatgggattttaggacagtgtaactatttaggacagtgtaaccatacagtatcggagaaggcaatggcaccccactccagtactcttgcctggaaaattgtgtggacggaggagcctggtaggcctgcagtccatggggtcgctaagag

SEQ ID NO: 40445 - DNA, 1179 bp, Bovine  19866881797477
  misc_feature (1)..(1): n is a, c, g, or t
ntcataagtgtttatttcaatcataattatttattttacttatagaaataagtactttgaaaatcaccctcaggtacacaccatccagctccggaattggaatgtaagagaactccataaactcttcctttgtacacttgatattaactcttctttctcttctccccagggtaaacacctgaattggtcccttataccacagattagctgtgactgtttatgaattttacattatgaatacatattataccttacaatattaatggttagtaagttctccaggcatattaaaaaacttagtaaaattgaagtaaaacaatgtaaaggctgtgtgaaagttaagcagttactttttcttgatacattgatcaaacttttaagagtttagatttttaccctttttactttcaagaagaaacaaagtttctaacatccagtaagtcagttttttttcctcccaggtaaacctgatttttatcaagacagagaccccctaagggtctcaataagccgagaacaaagttttcttgggagccctctggaccgtgatccatttggtcatcttcacccagttgctcaggagaacatctgtggtgatgactctgataaagcaggtgagagaaaaaggaatcagaagtggaattactgtacacaagagtatgtgggcagaagataattattgtagcattgcttgtaatgcaaaatagtaaataacttcagtaaaactgcagttttgtgaaagtgttaaatgagaggagaaaagtctgttcgtgcatttgaaaactgtctgaaataagaatcaacatgttggtacaggttaacccttgttggagattgggtttcactgtctatttcttatgtttacatactgtaaaattttttcccataagaagcctgtattccatattcaaaaagttgaataaggaaagtgaagtttatttagataataagtaatttcacatctgtggcattctaaatgagctgttttatgtttagttttaaatgttggaaagtattaaagaacaagttacaaagaaaaaactttaaatgactaaaatctgccactcaaagacaactgatgttaattttcttgcttttgaatttatgcatgtttataacaggctgttttttatgtgtaatattgaccctacaaagcataggtccagtactgcttcatta

SEQ ID NO: 40446 - DNA, 1784 bp, Bovine  19866880350601
  misc_feature (1)..(1): n is a, c, g, or t
ntattcggcgcagagtttcggtgatgaggaagtggccccggctgacgtgtgggtcccaatcaacccttgccaaagccagcagcctctacaggagccccaatgtcacatccccaccctgatgtccccggagggggcaggacaggggagggcagctggctcccaggctggtttattgcatctgcaagtggaggagtgcttagttgctcagtcgtgtctgactcttgtgacccatagcctgtagcctgccaggctcctctgtccaggggattctccaggccagaatactggagtgggttgccatttccttctccaggggatcttcctgacccaaggattgaacccaggtctcctgcattgcagtcagactctttactgactgggctacaagggaagcctgcaagtggagaggaggaagggaacccacctcaagccaagcagcccctggcctggctgctccttgggtggtggtccctaagcttggtcaggagcttcttccaggaaggggagagggcaggagcatccgcaggcctggagctcgctctctagagagagcccggagtggtgccccttacctggtaagaggttccctggacagagaacattgagggggtgacttggcggattgtgtgcaggattcatcgggatcctttcaagcttcactaattaacatgagagaacctgttctcactaaggcatctgagaaggaatgggtacccaatggcctggaaccctgagctgggcaggaatatccccctcccacaggcaaaccctcgagtggggatgagttgctgattctgaaactcactcattcattacgacaccagctgcctctcaagtctttctttacctgttcatttagctgtggggctgcaagctagggcccatgggtgtcttttgtttagtctggagttgttttatcaaattagaatttgcagttcttcagacagtactggctcattccagtccacactccacagacacctgccatcacacttaatcatggttccagtcatctacatcacctgcctcttccctatagatagtttgaccccaaggaaccccctgaagcccaggcctgattcctaggtggtcccagtcagaccctccatccttcttgaggacagtttctgcctcacctcctacatctgtctggagagcacattaacttccttgaaccttttatagcttttactgcatttgagactcagaataactccctgagatgtcaaatggcatcatccccatttggacagctggagaacatgagtaagaagagtaactggcttgctttaggccacacaactggtcaatgaaagacagaggaggacccagagatttttatttcagatgtctttttttccaccagaccatcagttcagtttagttcagcctctcagttgtgtccgactcttggtgaccctatggacttcagtacaccaggcttccatgtccatcgtcaactcctggagcttgctcaaactcatgtccatcgggtgagtgataccatccaaccatctcatcctctgttgtccttctcttcctgacttcaatctttcccagcatcagggtcttttctaaagagtcagttcttcgcattaggtggccaaagtattgaagctttggcttcagcatgaatattattagcatgaatattattcaccttgcaatgaatattaggattgatttcctttaggattgactggtttgatctccttgcagtccaagggactctcaagagtcttctctaacaccacaatttcaaaacatcaattctttagcattca

SEQ ID NO: 40447 - DNA, 1780 bp, Bovine  19866880362604
  misc_feature (1)..(1): n is a, c, g, or t
nattcagggggctccctcgcccacacgagtcactgcaggccttatagcctttcattgctgggcatggcgtggggtgttcctggccggctcctcctcacacctcccgtcactcagtagctgctgctggccctgcagatgtggcccccagagcgggactggaggatatagctgagagaggctaaagttagggacagttagctgaggttcacgttttctcttttttttttttttgagagccaaagacccagcttggattctgctgctgcattcatggttataagctttccatgccttggttctgggggatttatctctgcgtgtgtatttttaaacattgtttcctgggtactgggcatgtgcctgtctgagccccaggcccatctgtccacagcccaccatccattctgtttgtctcttcctggacatctcctgaggtggtctccttggttcctagaactagggcccatcagctcttctcttctgccaggcagtgtagtttaaaaatggctaaagatggcagagggcaggagcttgatagataatcttttccttgttttccttgtttctgttttggaaatgaaaggggggtttaaatggtcatttgaattctcttttccaaataaaggtttacctttttccccccaactgttgattattttattaggatccccaagagcatgggggaagggaaggcctggagaatgagccgggcagagagcaagagattgacctggggtggggcctctaaccctacatctagaccacagaaaagggttgtcatctcccctaggtaactgagtggatgcccactgctctgaggaacagggcctgcgtgcagcctcctgccccaacctttaaaaggtgcagctctctatcctctcccagctcgaggagagtggtccattcagctgctttcattcgtattctatctgctgcccttgtctctccccctagtctgagcagaggagggtctgtggcaaaaagcaggacgagagaagcgttttccctggtcaaagctgtggcagctgcatgaggcgtgatgcgcatggccgatgcctctcgccgcgtttctatttctgatcatcatctcttccctattctggagccaggcctgagctgtgggccatctgttgctggaaagctgtccctcctttaccaggcctcagtccgctgggagttctgtcttcccccggcctcctcacgcagctcttgtgcctgtggggagaagccctgaggccaggtggggtttaacgcctcacctgaactgaagcccaggctccacacctttaaatcagtacctgagaatctgtgttacttaaagctccccgggcaccagtggaaacacctgggttacgattcagcagaaagagaatttagccagggattaggatcaccgcctgtcatcttggcctggttgctcagtggttgtgggtaagttaacctctccctgtgtttcagatatcttggtgaaatggaaattaaagtagtattgttttccactcgtcaggaattttcagatctgaagttacattgtttgaaaggatgctaggaatcccagagtattattggtaattacagtaattggcaattattggtaacagttgggagttaaggatgcccatggcaccccactccagtactcgtgtctggaaaatcccatggacggaggagcctggtgggctgcagtccatggggtcgctaagagttggtcacgactgagcgacttcactttcacgcattggagaaggaaatggcaacccactccagtgttcttgcctgg

SEQ ID NO: 40448 - DNA, 764 bp, Bovine  19866880406874
  misc_feature (1)..(1): n is a, c, g, or t
nttgtatgacatctctacctgcaagggaggccaggaaaacaaatatctggtgttccagactgtaatgggaggtggcaagagagaagaggagtaggaacggctcttgagtataaaaacaagaatgtctaccatggttcaccagggaacccacaagaagtcagattttggccaatagctgcctttggaagtagcaagtgtctaggtctcagcacaagctagatgcccacttggcaaggggtgttgccaaatggaatcctgcaggcaacagaactaaagtggcctgagagtcacactgggggtaatctaggaatcatgagtctaatggaaggatgtgtctcattttgattcaatagactctagaattggaccgagcagtcatttactatagcgtgtaagtgccggagcttagagttcatttctggttgcgtgcacattagggaggtaacagtaaaaccagctcaacaaagttgagttggctaataacccttagggcttggttttaggtggaacacttcaagtctttattttgattcatgatgtaaaagggacaggaccacttttgccttctttctctccatcatatattatttatgtatgtatctataccttctatgtccttgggattctggtcttcaacagaggaaaatgcttttatggttaatacagctcagtgcacttgaacctggggtcccactgaccagagccacctcttatgatgaccaggaaggactccaggtgcccagatgagggccacttgtgggagt

SEQ ID NO: 40449 - DNA, 770 bp, Bovine  19866880488216
  misc_feature (1)..(1): n is a, c, g, or t
nttgttagcagcaattacactccagtctgtcaggaggtgtagaatgactgtgggctcaatctcattctaaggaaatgctattaaggatctgtgtaacaaaagagccattacagagcacttgaaattatagtgctacctgcattagaaaagtctctgccgtctcccagagaggagatagagagagagtggcagatagacagcaggggagggagtcttctccccttgactcctctcggccccatgaaagttggagtgctctgggccttggcccaaagatggtgatatataataagagtggctcttcattgctacttcctgggtgacaggcatggagctggggctttacacatcccggagccaagttgctgagtgatgcgactccttcagggccttcctaggctgacagggacatgccagaaacatgtttcaaggacagaggggctgaggcatccagggatgggactaagagggctgagtatgacctgggaaaggcattcaggcgtcagccggccagaactatcctgagccaacctgcactcttggcaaaggcgtgcagggagaaatagcactgagcaagaggaatagaagaaagaagcttattttttaaagcatgcagtttggagcagaagagtgaggctggggacttccctggtggtccagggactaagaatccatcttacaaagcaggggacatgagttccatccctggttaggggctaagattccacatgccgtggggcaattaagcccacacaccgtgactggagaag

SEQ ID NO: 40450 - DNA, 1026 bp, Bovine  19866880517670
  misc_feature (1)..(1): n is a, c, g, or t
ntttccgcttcaacgtgtcctcagtggagaaaaacgaaaccaacctgttccgagcagaattccgggtctttcggatgcccaaccctgcctccaagcgcagcgagcagaggattgagctcttccaggtgaacctcttcccaggacagacaccacatcgggggtagaagtcagttcctttgccagattgagcctgcgctctgctcggagtgcagcaggcctgggtgtgaatcctgccttctctgagccttagtttctatacctgtgtctgtcattaagaacaggggtccctaacctctgggccacggaccggtacctcctgtcagatcagcggctggcggcattagattagaaataaagtgcacgataaaggtgatgcactcgaaacatcccaagaccacccccctcctttccgatccgtggaaaagttatcttccatgaaactggtccccggtgtcagagtttggggactgctgcttaagaggattaagacttaactgaggagctcgaaagagcatttcagaagtcttagttggctcctgttcccctccccatcctgctgcaccgtgacgctcaggtgccctgtcctggcctcgggacttactccttcctctgccccgtagatcctccagccgggtgagcacatagccaagcagcggtatatcgatggcaagaacctgcccacgcggggcactggcgagtggctgtctttcgacgtcacagacactgtgcgtgaatggctcttgcggagaggtaggttgactcaggatgaacattttggaaggaacctctggtcccttctttcttcatgacacagggaaggggatggcactaggggagacaacagatctgggttcaaagcccagcttagccattaacttgctgtgtgtccatcattccttcattcaactgacactgagtaaatgctccaagccaggcccttggggattcagcagtgaaccagacaggcagggtcccaggtctcatggggcttttgttcggtgagagagacacatagtaacaaataaa

SEQ ID NO: 40451 - DNA, 1698 bp, Bovine  19866880531781
  misc_feature (1)..(1): n is a, c, g, or t
ngagaccaaagagagatggcatgtaggaaacacttagcacctccccccctgtacccccaaattcccctgccaccccaagccacacacacagtcagtgctcagcaaacctgaaccaggaaggtggcgatggctgtagctgtcactgtcgttgtagttgttggcatgctactgacacgactcttctcccctaaagcctggaggtcctgggggtcccaagcttccagactggcccactgacctgggtttccacggagtctactccaccctcacctgctgtcctgtctctgagagccactgtccctccctactttccaaccagtgtaaccaaccagtgctcaactttagggggttcccaggggatgaagcccccttcactagcaggtcccccgttcccagtgtacacccttcttagtctgatcactgcggttcacaggctgatctgtagccctggggcctgggatcaccacccggctgctggcacccccaggtgaccgcccacagagctggagtgattactctgaggccacggggcaagcgtggatggctgcgccttcccgggggacaggctgtggcacacaggggtcgggggcgtgtgctgtcgtccagacccagcatgggagcagaggacgtgcggctgcctgcagtggtggggagagccgggaggtaatgaaagatagatagaaatggacatccaatttcccttatcgagcctctgagcgggagaggcctggggtgacattaattaacagataccaatcagccagcatgggtgtgtgtgtgtgtgtgtgtatgcacggacgtgtggactgcactgggggtgtgggtctcaaggcagacagactgggagggaagatgtaggaggtggatggggcgaaattaatagacaattgtattggaaggtggcagagaaggaaggcgagctgggcttctggaaaagaaggagaaaagacccgtacgaggttcatcactaggagaccatgagctctgcccctctgttcaccccacaaatacttactgagcacctactaagtgccaggccctgtgctgggcactggggacagaccggccagcttgaaccagggccaggccctgccttcatgagctcggtcaagagggaaagacacaccccagtgtctgtcttgtgaggtttagggctgtcagaaaagctaccccgagaggaagggctgaagatatgcaaagggggagtttggcccaaatgagagagagtccaggcggctttacaggagaggaagctttggggccgagctctgaaaggcaagtggggtgtgtctgcgtggacggctgtcacctctgggctcctgggagcatggtctcccccactgcccagcacctggcctgcggcagaggggctccacaaacattcccagcacagaggagggaacggacagacgccactgagcctcgagtcccgggtgatgagaaaacaggccaaaagaacagggctggaccctcttagtcctctgggcaggattccaggttgagctgcctttgctgatcctgtgtgagtcagagacaggcctgcagggcagggggtgtggtggaggtgtggtggcggggatgagtgcctccaggacgtagggtcagcacctgagggtgccctggggcctgtgcacacacccccggctaggatggtttggggagtactcagcccctgactctctttctccttcagaagga

SEQ ID NO: 40452 - DNA, 1564 bp, Bovine  19866880535318
  misc_feature (1)..(1): n is a, c, g, or t
nggtttttcaagctaccttttaattatccatttttctgggcactcggggagttattcagagctgagaattgatgtcgagaggcacctcctcgttactgccagccttgcacggaactggaccacgtcagggaggagcactttctaggtgaggagtgcatctttctttgggagacctggaagggttactgtaaagttttggctgctgcttggaatgatttgggaagaacagggcctcagacagcttggcaggagcctgaagctctgtttttttccagtccagcccttccttgtggatcgagctgtcagggaatcccacgaatgtctggcttctgcccctttgtatgtttttccagcatttgtcattgaattatttttatccatctctggctttttcacacacacaacctggggatttgtctgttcctcgatgttaaaggtgcgggggaggttgaaggcacagccctgagtctgttcctcctttttgtgacatcttggacctagactgcttggctgggtggcttgcactctggaaaacaattgtattttagaattttaaattcagtcctggggaatggggtacaatgaagccacaaatcttggaaatttgggtgctatttcacattaccttgttcttctgcccgcttacatttaaataataaattatagtctgggccctttcttttacctaattttttgggaccaatttccagaggttttgataccagttcagctaatacttttctgccttcttttggattatttttttatgaatgttggtagagactcaggactctgacttcccaccttttcatttttagtcagtcttcagaaatactgtttattttctttaaaaataaaccctctaatcattttctgtgtattaggcattgtgttagcacacacaacctggagatctgtctgttcctcgatgttacaggtgtgggggaggttgaaggcacagccctgagtctgttcctccttcttgtgacatcgtggacctaggctgcttggccaggtggcttccactctggaaaacaactgtattttagagctttacaatttagagttctaaaactgtattttagaactttaaagctgctgtggagcactgacaagtaagacagaattgccctgcccccggagcccgccggccaggggctgtctgactttagcctagcacaccccacttcgttgttgtttctgttgtttagtctccacgtcgcgctcgatccttttgtgagcccatggactgtagcctgctaggctcctcttcccaggcaagaatactggagtggggtgccattccctttccaggggatcttcctgacctagggattgaagtgggtctcctgcactgcagctagattctttaccactgagccaccagggaagctctgcagggcactgggtagggtctaaaagactttcaagacctgttgttggatgactaaaaggctaccatccagcggcaagaaggaaccacatccacgtggaacagttaggaagccgcgttgggcagcatagacaaagatttaagttgtacacaagcaagtaaagaagggga

SEQ ID NO: 40453 - DNA, 1413 bp, Bovine  19866880538167
  misc_feature (1)..(1): n is a, c, g, or t
ncgggggtggttggggaggtgtgtcatgccgggaacctggggagaagggctcgaaagagggcgaggagaaacaagacggggtgccctggggaacagcctctctctctctctccgggccccacgtgcgcacacgggcacctctcccttccccgagccccgctccgccgtcgctctcgcagaaatgtcctccagatgtgcgcggcctccctccccggccgagggttccgcggggagctgcgccagccagcgcggagtcagcagttggcccgagcccatttcccagatgggtgaggggagggtttttttgtttttttctttctcctccgccttcgttccttctctcagcctaagtttctaggtcttttctcaccaaaagtttcgggagggcaaaccacaatgccagcgccctttccaccccactgcccgctcacccccgaccaccccaccccgctccgacacgggataatctccgaattgatggctttccagggaatcggtgctgctccccgccatcccatcccactccgccccagcctgcctgaccctggatcctaggacattaacggaaagaacgttctctgcatccccagggctgtggttgatcagcttaagttgaggaaatgaagacacagacctgtttaagaggcttcactgcttgtgaggggtggaggtgatatttaacacgggctctctggtttgggaagacattatttttatttgcataagaaatgagggatcctaggtgtatggcaccctactccagtattcttgcctggaaaatcccatggacggaggagcctggtaggctgcagtccatggggtcgtgaagagtcggacacgactgagcgacttcactttcacttttcactttcatgcattggagaaggaaatggcaacccactccagtgttcttgcctggagaagcccagggaccggggagcctgatgggctgcggagtcggacacgactgaagcaacttagcagcagcagcagcaggtgtaaaaaggttaaagtaacttgcgtttgaattacttttaggtcatataatcagggggagtcaacactgagattgggacacaggaagtctgttgccagcatctattcacttaaatgtgctgtgcttagtcgctcagtcctttccaactccttgtgaccccgtggactgtagcccaccaggctcctctgtctatggggattctccaggcaagaatactgggaggggctgccatgccctcctccagtgcacttaaatattatgctctatttcctctggaattcagctatcatttgaaaaatatttttgacacttactatatgccaggcactgttctaggctctgtggaggcagcagtgaaaaaaaccaaccaaatcattcccttaaggactttacattctagaagtggaggtagaacc

SEQ ID NO: 40454 - DNA, 1502 bp, Bovine  19866880587062
  misc_feature (1)..(1): n is a, c, g, or t
ntgatcaattatcatgcatgttatagtggggtgagtgtgggtgttgagggtagcctaggttgggagaggccaggtcagcacattgactgattatttctagtcttctctctaggtgattttcaatcacctgtcatagctcatatatacacttaattatcaaataatttccttaaaaggcaatcagtaaccctgaaattgatttacagatgaagccagtttccatgttatttggttccaaatatatatttcaaagctctacatgatatacagaaccatacagagatcagaaaatatacaaagatcagatcttgtcatttgtgaatttggtgaattatactatttgaatcaccacttgaaggtgtattatcttacaagtcttatgtattctcaaaataaaggaggccttcagatacccaggtgtccaatttctctcttttttagctacctaatatattttgcattaatctccaccttgcctttcttagtcctcaaccactaagcattactctaaccagattcccagttgattatattttaaacgagtgtgcttgtgaaggttgcttataaagatagttgcacatcctgagctcctgcaggaaatcaaaagacagaattagacatgagcctccccctctgtgctcaccatgaaaatattaaataggctagaggcatgaagaaggcataagaacacacacctttgtagttgggcttttccgctagaacctgcagatccgtctacattttgtggaatatttttacaaatgtgtttattgactgagttttagaaaggtaggtgcacctgtggtttatcctatgttagctaccagtaggcttaggatttcctgcctcatgtgttaactagatgtcagggacctgtcatgctagtaagtgatggaaggccaccgggacctgaggaagtgcctagtgtgtggacagctctgtaattgacttgtcgacatatctagtttggtctcagaacaaaaatagacaaatttagaaagtctgctttatttctgtggttggtatgtctttattctttactctgaagtgctaaagaatattctcccaaactgcaaattttagcattccaacctgttgtaactgcattagaagttgtcaaatacaattaattctttctacccctaggaacagaacttttacacagagccacttcctatactggcagggggaaatatgaactttgctataattgccacttaaatgtcttgtacccttccaaatgcttggggtctcccaaagcttgattggaagatgactggtgaggtgtgaaagtctactggagagtggcaggcaggaatgagaatgtgtggagttggagagagaagcatagaattgagtagaggatgaagctgttctgatgatggagtcaaatccttggaaaagtggggaaagcctgtagctcagagaagcagcaccaatgtaccgacacacctggaggtagggcggattctgggatcaagagtccttggtaaaaaaaactt

SEQ ID NO: 40455 - DNA, 747 bp, Bovine  19866880628517
  misc_feature (1)..(1): n is a, c, g, or t
ngtgctgcctgctggaccgcacactgagaaccccgctatcatcaatggcctcactccagtctcacccagcacgcagattctcctgggtgcccgatctgctgtgtgtctcccctctgtgtcacccctctctggtgagacccctgcccccagaactccatacagaccctgtacatacaggaagagaggacttcaataaaataggagacatgaggaaattcggcctcagataaattggattgattatgaaatgaaagggcagcgggcagaagagttaattaacttgaatgtctgtgtcacttatttaatatatcccttcaatagtgagaggtgattttcatcctgtgactggcagctttggtcacagccgaggaagacaggccacgctggaaaaatctgctctcaatcaggtctgccacttctgatggtgggactgtggccaagctgctgacggaccagtttcccactctgaaaatggagggttataacgatgcttgcttctactagagctgtgaggcttagatgaagaaacattcgaaagtgcctactcagtaatgaggtgcatggctttcaaagtggcacagtggtaaaaaaaaatccttgcctgccattgcaggagatgcaagagatgcaggtgtgatccctgggtcaggaagatctcctggagtaggaaatggcaggggatttcctactctgcccgttggaaattcttggaatttcccatttcaagaaaaccttgcctgtagaatc

SEQ ID NO: 40456 - DNA, 2643 bp, Bovine  19866880634559
  misc_feature (1)..(1): n is a, c, g, or t
ntggaaataggtgaatgaactacgtttggacccctggggtaatctgccttctgggcctgtgcttatatgtggagtattttagcgagaaaacactcctttacccatgagagagttgagataggactgaatgagagaatgcacagcaaagtgattcacaaatggaaaggtgccacaaaaggcttaatattattaattggacagaaggagcgaaacttctctggcgcactttgagaaggagcagagagtgtccatcagcccccctgggttctcttgaagcctgcctgcccagtgggagtcgccggtctgttaggtagtaacagggtgggatgggctaagccggcatcttggtctccatctctctgataactgggtctgtctctcatttggtcctcaagttgggaaggaaaatggatctcaaccatctacttccagccccatcaaacccaatctcagggaaatcaggggagccaatgagcaagccacagtgaaggcggcgggtggaaggcaagctggaacgggtccccatggtggggctccatgctcacggtgactttgatctagctctcacactggcttgcataagcctgcagctgctcaaggtcccagagtacccacacatgacatggaatttcacagtgcagtggatgagataccgacataagaatgggcaacagcacagactccatcagaacactttggggtcaaattttggctctgcttcggtggtctcaggcaacttaattaacctctttgtgtcttatctgtttaatgggaatagtgacagtaccaacttccactggttattatgcagattaaatgagacaagtctggcacatagtaaggctcagtaaagtaatcatcattattaagaaaacagcatatgcaactagagattatcacactaagtgaagtcagtcagaaagagaaatgccatatgatatcacttatgtggaatctaaaatgttccacaaaatatgtgacacaaatgaaacagaaacagaatcagggacatagagaacagactaagtgttgccagtgggcagggggttggggaaaggaggggtttcaaggtactaaagtataacacaaataactatagtcaatatgctaagtcacttcagtcatgtccgactctgtgtgaccccatagacggcagcccaccaggctcccccatccttgggattctccaggcaagaacactggagtgggttgtcatttccttatccaatgcatgaaagtgaaaagtgaaagtgaagtcgctcagttgtatccaattcttagcgaccccatggactgcagcctaccaggctcctccatccatgggattttccaagcaagagtactggagtggggtgtcattgccttttctgactgtagtcaatattccatgataaaccataatggaaaatatttttttaaaaagaatgtatatacacatgcaactgaatcactttgctgaacagctgtaattaacacagcactgtaaatcaactatacttcagtttaaacaaataaaaattaaaaatatagcacagctgctagtttaattaggggagtcagtaactaccatacccagtgggattgcctcagagatattaactaaaggaagtttttaaaggttattcaaggaccctgtcctggatgccatcctctcatttttgccagtgatggagagcaagacagaaaaatgtatgcttatcaaagtgcaggaaaaccaaagctgcagatgaaggtacacgcttgcaacggcaggatattcaggatcttaaaaaggtggatccacaaaccaatctaacaagacaaaatggaatagtaatagtaattgtactgttcttcatgtagatccaaatataatcaaatcatatgagcatagggtagaaaaacagctttgcagcatgtattagaaatgcaaagagattttagattagagctgttttaaaactaatccaaaggatgtcttccaaagcccgcttactgaccaccagcacagaaaatggaaggggatgcctctcacttacctctgggctgatgatgggggattaggcaggagcaggaaggctactcaaggaatttgaaaggagaaggaccaggggtatgcttccaaaccagactctttgatgagtaaccaaatataagggttaaatctaaaggaacttaacaggattatgaatgggaaagaatcagaagaggttgggaaccaagtgcaaataggatctaagtgaaagtggaggggcatttgaagaggaaattatgagtgatgtccacaagcagcatagaacagatttgggctagtgtgagaacatactttctaagagttgagttttctgacaatggatgagcagcactgtgaggcagtagtattcaggaaaccattgggtttacctgatggggtaaattatataaatttcataaatcggatggggaatagggccgggccacagatttaagtccctgtcaattctgaatttctgtgattctatcatgaaaccatgaatacacagccttgttctgacagcaagcatagcatctatcatattaagggacatcgatccattatgtaacccagaagttaaagttcagtaaagccactcctaagctgccatgttgatagttagctagctccaacccaagagttcaaagaaa

SEQ ID NO: 40457 - DNA, 1881 bp, Bovine  19866880639257
  misc_feature (1)..(1): n is a, c, g, or t
natgtctgtgtgtgacccttatcttccttttaggagaggtcggcctcacaggagagggtcttcccccttctctctgttccctggcatcacccccagttaccttctggacttgattctgggcatttggtacaaggcccagtgattgagctgcagggaccctactggggagaacactgcatgtctcacttcccattctgccccccaggtgtagacccctggctggattcacccccatggaaacccttagggcagagtggagtggagagtgaataccacaggtgggcctgggggctcagcccaaagctgtctacaggtttaaaaccctgtgcttttatgatgaatatgaattttacatcttgccccacatataatcaatccatgatcacttccttatgaaaaatgctttagatggtttattagctaaattacttaattaccccttctctaagccctcggggggagagcagccttcctcaccccaaagctttgctcttgttgtcctgtgcctgctgagtgtgcaggcccagctccagcctcatgggatggaggagtctgacaccctgccctgcaaagccagtggccaggctgtattcccagggccagggggcagcatttggtgaggagggaggaaccaggcttcagagataagtctgttttaaaggggcctgaattccaagttcaagagcagatgggggagtcactgggcagctaattccctgagaccccatgtccaggctccagggagctggccagccatggagaagcagttacaacaatcaaaggctcttcagagaagtcacagttcggtcaggggtgtccactgtgctccagaagaaacaagatcagtgccaaggtctccggcctctttggcatgctatcccatgcactccccaaacaccatctttacaggaggcccccagcccagtggctttcaaagacctgcctatcattgcacgccacccccaaccaccctcccctccagaggactctgcagcaggactctgagggaagaaggaaatggaaggacagaagggaaaggggaagggcctctttccttatcttcagtggttgtctcttctccgaccccttaggctcaggaaggatgtgagggggaggtgctgggcttgagctgcggcagcttggaaggcaggggagtctttgtccatctagtctacctcccaatgctccttcaccagaggggactggagcctctgtcctaatgactctgccttccaacccccccaggctgatggacctggccaaggaaatgaccaaagaggctctgccaatcaaatgcctggaagcggtgatcctgggaatgtatccttcctctgagaggtctgggagggggtggccagctactcacacctccagggccatcttcctcctctggaagggccctcccggctccctttcccagaagtcacgaacttggccccagagtgaaggagtttgaggggggctcagtctcttgcacctcagttgctaacttccaaggcttactgggcagctctttttttttgagcagtggacacagtgaccctgttctccaaaccacaaatcacggctcatggtctcataaggctgctgtgctatttccaagaaccaaagagtccgggagaagcaggttggatgcccaactgttggcatttccaagacatgtggatctgtggagatggtggacatcccctgatctttaaatgtaaatctgcatattaaaaaaataataaaaagggtttctcagtctctcccccacccaaagggtagaactggacctatagctggatcaccagagtagttaggtaggacagacgaggcccctagagggggcacccaatatccccagttaaagcaaagttaggagactggcatgggccattt

SEQ ID NO: 40458 - DNA, 760 bp, Bovine  19866880643166
  misc_feature (1)..(1): n is a, c, g, or t
nattttaaaggcgtttgcctcgggcacttttaaatgatggtgtctcaattctgtaatcatctttcaagagctttctcttaaagggtcttttaggtaaacccagtccgtcaaccacacttatggactcaggaatcatttttcccaatatctgccctcctgcgtgtgcatacgtataggcgagtatacccacacacatggcagacatctgggcatgtttagaaagctgggaggacctgaaactggaaaggaagaccctaccggttggccataccaagttcacatcttgctaaggtaagagggtcccctatcaccgcttccctggatttctgctatacctaggctttgcttatctgcaggtattagaagggaagacttctcacactgaggcccaagtgatatgctgagtcccaacctcagatgcacaatcaagcctgttccttcccatctcacctaagtgttgtctgactgtcagacttcaagatgagtaagggcaccacggccacctgcttggagaatgcagtccccaggccacagctgactgtggctttagttacagactatttggagcaactcctacaaatccatctgtctcttttagttgcagagaacaccatgcctcttctctatacagtccccatcgcttgaaacagacatcctatggcatcgagccctctatttctttctaatcacataaaaatctaaggagccttaagatgtccctgggccagtgggttctcaccaaactggcttcgtctcctct

SEQ ID NO: 40459 - DNA, 2022 bp, Bovine  19866880668713
  misc_feature (1)..(1): n is a, c, g, or t
nagtcttggatatattgcctttatccggactgcagttgttttcctgtgataaacaatgtcaggactgtacattttggacagacacagcatgcaggatcagctcctcaaccacggattgggaattccacgccccttgcagtgggagcacagattcttaaccactggacttccaagggaagtcctgagttttcgtattttttatagtttgtatttggagtaaaaattatggctgggcttagagccttctcttggtgacacctgttaatgctgagacacagaacaatggagggatccgtccaggtcagaggcaggacctagggcccagcgctgtgaatggcctgctcccagctaggctctgctcatgggctgtggtagaaacggcacatgatacaatcaacgtcacaaccactggcgccagaaagcaacccctgcaaagttccctggtctttccctttgggggttagttgcaccataacatccctcccttcacctcttcttcaagttcaaggtcagtttctaggccccattctagtccaaggtagccctagaaaatcttcccctacccccaaacaacctctggttgccaggacagcctggaagctcagcttgtgagttctaattccatggggaattcccagagctacccacccacaagcagccctaagtgaattctcaggtggtccttccagaactggcgatgacatgggccccagccagacctccctcaagcattctgctctgttccaggcctcagtttctttatttacctgtaagtcactgttttgtgaatatttatttagtctcttgttgttccttccttagtagtaagggtgactaagtttaatgaggaagggcttagtagcttagagttgtgagttttattactggttttaacactaagtgaccctaaactattcatttaatctttttactggataagcatacttacacataaactggcctgttttgagagcttttaggttgtccttaaagcactttgatctccctggaagtgggtgctgagtaaataaaaggtactcttacgtgtacatccacaaaagcatcggtggattccagtgctgataaactctcataattcactcgaccaggggctgccctgtaaacagtgaaaagatgtaaagagaatccactgctggctgtacttttcatctgcatattggaggattcagtgacttggtagccacaggaatgaaaactagtgactcacaagagctctgcaaatagtgttatttttcatttccctgtggtgttgctattgttctcaattttatggatcacacaagttttcaccagacaaccttgttcttcccccgctgttttgaaaccatcccaagtatagcccagggctgtcgtctcccattgggtcagtgtgagctcagcccagctcctcaaatccctcggttcctctggtctgtctggagtccctgttggagctttgttgtgggagaggaaggcagagagcccacgccttgcccagacagtctgaggcctggccatggagcttgcagttccctagacactcagagttggacttggccagccattcctctgttgttacttttcagaggtaataagtgagattaattgcaggccaatctccagaagagaaggtagtcagggccaaatgcagtcacatgtttagaaacctgaggtgtgcctctgaacaaggccgactgagaatgatacaatccacgatgcaggtaccaagtgttcgcaacctctttttttcttaaaggggttgtatttgactcttataatacggatgatgttgttgttatttagtagctcagtcatgtccgaatattttacgacctcatggactgcagcccaccaggctcttctgtctgtgggattctccaggcaagaattactggagtgggttgccattcccttctccacaggatccttctgacccaaggatcgaacctgcgtctcctgttgcaggcagattctttaccactgagccacctgggaacccccccccccgaccccgcccagatg

SEQ ID NO: 40460 - DNA, 1129 bp, Bovine  19866880685805
  misc_feature (1)..(1): n is a, c, g, or t
ntgatgctaaagctgaaactccagtactttggccacctcatgcgaagagttgactcattggaaaagactctgatgctgggagggattgggggcaagaggagaaggggacgacagaggatgagatggctggatggcatcactgactcgatggacgtgagtctgggtgaactctgggagttggtgatggacagggaggcctggcgtgctgcagttcatggggttgcaaagagttggacacaactgagcgaccgatctgatctgatctgatctgaccatcctgtgaagctaagatagttctgatctggctgatagaaatttttgacacttaggacaagtttttctgggagtgaaaaagagcacttatggagttgattgaagagaaatggtacagtggagcctgaagtctatgtctaatacagtgcttctcaaccagcagtgcatagcagtggggaaagaggagggtagcgaccataagttttaaaaagcatgtcaagctataatataattttatgtatggagagtgataggaaatttatggctttcataaaacaaactgcagaaagtaaaatctttttggctggcagagcataggttataaaaggtcgagaaactgctgtaatcactcttttattgttaatagacaaaaaagagggatacaagatagtggcttagaagtgggcatgcagtgaaccataaaacccagaaagaggatacagtttagaaaatgcagtgaaaagtaataaaaatgattagtgggaggtacggattagtttggaagataaatataaagtaacagacatattcaggagcctttggagaacgaatagggaagatctttacaagagaaggatggatgatagttaaaactcgagctttagttcaaaggatgcaagggacatctgctttgtggtgatagtgagttgacgtctgaatcctcagaaactacgctgagtttccagtagctttagcctctaaaattagtagcattgtcagcttgggtgtctcatgtttgtctaaccatcagcatctaggtggcaaagctgtcattattcccactcacaggcaaacctctcttcacctgcagccctcttttggtctctaaaattatgctaatgtgaggctaaactct

SEQ ID NO: 40461 - DNA, 1627 bp, Bovine  19866880717105
  misc_feature (1)..(1): n is a, c, g, or t
nggtgtttaaatccccttttcttgtactgccgtccgctggcattttgcttctgggaaaacttccagaggagccctttttgcttctgggaaaacttccagaggagcccttctgggaaaggtaaaaattcagaagttctatataagaaaatggcaagccaagaacataacttggggagaaaggcagagaaccccaaatagcggcagatggacctcagaggctggtctgaaggctgttagagataagaacaaaatgaggcaaggaagagtagcagcggagccttctaaaggcggtcacttcaagggcgaggttgtctccatgattctgagatgatggccttcctcatttgggatgctaaaatggcttttctttctttctttttttaagaaaatggctcttcttttatgaaatgattgtcattctgggttcttccccaaccccagcccccattaaacttcttacttgacagaatagtcaactttgtattggttcccaaatttggtggtagtggggttgagtggggggtttgttctgtgagactgaaaaatggggaaccactggcctaggacccagaacccagactccaggcatccaccagctagaccacaggctttgtagggaacctgggcagcgagtgctggacacaggatgcaagcgctcctagctgatacttttcaagggagaggctcctgtgagagggggctccgtccacccaggcaagctcttcccccttaagctctgctctgtgatgttccaggggcagctgattggaaatcccagagaggggagagttctctgctttggccaagcgccatcctcaccctccctggattccacccctggcctcctgcaaggaggagtggggggagatgcatgtctcagctgcatgtctgagaagaaaggctcctgttacccgtcgtggtgacggcagttcagggccaggccactgtaccggccaccgcagccccagatgctcctgtgagaggatccagaggagaaaagcgctcaacccctagtgtcagcttgtgtcaaaagagaagaggggagcctgaaacagactggggactgccattcatgaaagagctcaaggcgtgtccgactctttgcggcccctcggactgtacagcgcatgggatgctccaggccagaacactggagtgggtagcctttcccttctccaggggggatctccccaacccagggatcgaacccaggtctccctcattgtgggcggattatttaccagctgagccacaagggaagcccaagaacactggagtgggtagcgtatcccttctccagcggatcctcccgacccaggaattgaacccaggtctcctgcattgcaggtggattctttaccaactgagctgtcagggaagccacatgaaagagcacaccttcttcatccccattccagcctttccagcctggaaagtggaaagaaagtgtgagtcactcagtccgtctgactctttacaaccccatagcccgtagcccaccaggctcctctgtccatgggattctccaggaaagaatactggagtgggttgccatttccttctccagggaatctttccagcccagggatcaaacctgggtctcccacattgcacgcagattctttac

SEQ ID NO: 40462 - DNA, 2566 bp, Bovine  19866880753991
  misc_feature (1)..(1): n is a, c, g, or t
ntctccgtgatgcctgttggatgaatgaatgaatgtttaaccttcaagcaacaagctctcaaaagagtattaatagaagatatttgcatacaaggagtatgttaattaaaattagttttatttattcattcatgcaaactcagcaagaaccccatttggctgctgttaatgtttagcgtgatttactgtaagtactagaaatataaaaaatgtgtttcttttcagaggaaagccacagttccttctggcttttcctcctccctccttccatttatctgaattagtaaagctttactttagttcaggtcttttcctgagacttgcaggctggttgcctggtaatttaattacttctgaatctaccgaaggcaaataccaagcaatctatggggaaagattatggagttccaggttatttattaagtaagccttggtagcccttggggtggcagtggtaacctcacccctcatacctaccccttgggggagggaaacccaagtagaaaagtctacattttggagtatgccagcagggggatggcagaacccttatacaaagactggccaagatggagggatgcttagctcctcctgaaactcaagggttcttcctggaggaacacagagtcataaacacagcagcttccttttctttccaggaaggagatgccccacccctcattgagcaggttgttgggggaagtgtaggtctggaggggaactgacttgattcatatcccagttctgcctctttcaaggtgggaatgttacagggcttccctctgcctcagtctcctcacctgtaaagtgggggtaagaatagtgtctccatttcataggattctatgaggatcagagaagctaacacatataaagtacttagaacaggtacttagaaagtgctcaggtataaaaggaactctgcaagaaactcatccacgagacccagctgatttagactgtgatattcattgccgccacttgtcccttggctgtttcctcacctctgtcccatctgcctgggggctttttgttgttcagtcactaagtcgtgtaccaccctttgccacctcatggactgtagcacgccaggcttccttgtccttcactatctcccaaagtttgctcaaattcatgtcctatgagttagtgctgctatctaaccgtctcatcctctgccgccctcttctccttttgccttcagtccttccccgcatcagggtcttttccattgagtcagctcttcacatcatgtgggaaagtattggagcttcagtttcagcattggttcttccaatgaatattcagggttgatttcctaggattgactggtttgctctccttgccgtccaaggcactctcaagaatcttctccaacaccacaatttgaaagcatcagttcttcagtgctcagacttctttatggttcagttatcacatccatacgtgactactggaaaaaccatagctttgattatatggcaaagtgatgtcattgctttttaatacacagtctggatttgtcatagtttttcttccaaggggtaagtgtcatttaatttcatggctgcagtcaccatctgcagtgatttcagagcccgagaaaataaaatctgtcactgattccactttttacccttctatttgtcatgaagtgatgggaccagatgtcatgatcttagattttaaatgttgagtttcaagccagctttttgactctcctctttcactttcatcaagaggctctttagtttgtctttgcttacagccattaaaatggtatcatctacatatatgaggttgttgatgttttcttctggcaatcctgacgtaagtatgcaaactgggaggctcaataactagctggtgaatactactcctgaatctgattccccagtggcaacagttcattcagaagaaaaattattagcagtattcaggatacttgagtatcaaatgtttgccattctgtctagtctacatgagtgtgtgcacactaagtcacttcagtcatgtccaacacttagcaaccccatgaaactgtagcctaccgggttcttctgtccatgggattctccaggcaagaatactggagttggttgccatgccctcctccagaggatcttcccaattcagggatcaaacctgcatttcttgtgtctcctgcactggcaggtggttctttcccactcataccacctgggaagcccttctatctggtctatatcccctacatgcaaaatagggacctgtataatgctccatggaagttaaacactctcggatggaactacttttatattaaacatgtagatagaaggaaaatactaaccaaataactttaagagaaaaattttgggttttttgtcacagttaaaatgtacatgtaccacaaactatgataggttcggggtctacaaatatcactagaacccagtctctgctcagtctatggacgacagagctggatgtgtaggtgagtagtctccagtgtgatgagtgcttttgttcactggacatgtagaatagattaagagcacagagaaggaatttctaaaacagctgg

SEQ ID NO: 40463 - DNA, 1153 bp, Bovine  19866880757029
  misc_feature (1)..(1): n is a, c, g, or t
ntttcccctgccagaccttggtcatgtcatgaagtttctttaccagctagaaatggattatctgttgagatttcatccctgcctgattcactacaacaaggctctgagtggggccaagcgaaggaggtataattcttaatcacctccagcacctggctgcttcttccaccgaaacccagccaactgctacccaactcagacttcttccctgcctctgcccagagttttgttctttataatagcccatctcatgggtaaacaccagaatcagttggaatacgggacagtcccaacaatcccccttttaaagatatgctctagaaaagaactccagctagtgcccctccttggaggctgaagtcttaaggcagacataggatcccttggacacttataatttcagccttcctgctggtctgcccaaagtgcgcatgagggcatggcagagcctgcagccagtgtttcggaacgattaactatgaacgcaacgggcaccccttctcatgtggtcagccaaatcacaagtgtattcccttcactcattatattgtagctgagacaattaagtattgtgactgtagcacagttaaaacttatgtaattaaggcaggtgaggatgagaagaaaaggactctgcttccgaaagctcagccttgaagttgaacaaaacagcaatacacattttcaccactagatggaaggcttcctggtttattcccccagctagtccaatctgaagtacagaaatgatccccgagcggccctcccacaaaccagtcctgcgaaatatccccatgcagactcatagaaggttaagggtagacaaaaatttggtgagatatttttggccaaacctttacagaagaagaaagagcccaagagatcggtagacctcaggtttacaaattctcccaggccaacttacttttgtattatcccaccctgcctcttgacagaagtcatccaaaaatcgacttaaaaagagataacaatatggggtgtcctcagtttctgaaaaatgtgtagagccatgtaatgatgtgtgcacttttttgtggggtatgtaatactgacagatagcatttaaataccagagacattactttgccaacaaaggtccgtctagtcaaggctatggtttttccagtggtca

SEQ ID NO: 40464 - DNA, 935 bp, Bovine  19866880787162
  misc_feature (1)..(1): n is a, c, g, or t
ntgcagttctgaaagcaaatcacatacgggctggcaatgtttacaggaaataaatgattaaaaaccctagtactagcattccccagaagctctttcatttggaaaattgcaaaaggaaatgaagagaagtgggaaatgttttgccaacaagaaagctaggggaaaaaatcctcttaagcatatgttgaaagagactttatattttacatctatatctttgtcaattacctcaattatgagtgagtgcaataaacatttaaatattagtgattagaaaactgatttgaaagaacattcccagtatctttgaaatgctctgatgtgattaatgtcaaaatgagacactaatttgcgtccactgtattggcaaaaggaaagttggattacactaagcaaggaccaggatgtggggacctgagaacttacgcatcgctggtgggagtaaataaacccacatgaagagtgatttgggagtgactagtaaatgtgagctgtgcacatccaaagtgaaaatgaaagtgttagtcactcaggtgtgtctgactctttgtgaccccacggactgtatgtaggccaccaggctcctctgtccatggaattctccaggcaagaatgctggagtgggttgccattcccttctccagggaatcttcccaacccaggtatctaacctgggtctcccacattgcaagcagattctttatcgtctgagtcaccagctcagccatcctagcaattcagcttctggttagatacgctaaagcaacagttctcaaagtctaatcccagaactgcttcgaggggatctacaaggtcaaaacttttttcaaaatgacattaagctgttacctgtctcttttcctgtcttagcatttgccctgatggtataaaaataaaagccacggtgcataaggctactgattacttagcatgga

SEQ ID NO: 40465 - DNA, 1010 bp, Bovine  19866880832606
  misc_feature (1)..(1): n is a, c, g, or t
nggttaagcttgcccttttccagctgccccagacatcctagttctcatcccacagttggatccctccctcacatattcttggaccggccttttcttcccacctccacactagctgcagggcgtggaccatatgaccacgtacacatcctgttcttgccatacagcttccctacctagaactgtttgtgggagagcagccctattgatactccagagcaagtttagagagaacgatgggaaaaccaggaaggcccaggcatgggcaaagcccatgaaactgacaaacacactaagaaatgtctttaatgtcaaatctagccctgttttctgtcccgctcaagaccaccttttccaagcaaggaacttaagccccattacagtctttgaacgctgctggggatcgcaacttcagaaccgaagcagctctggtcccaggccgaggcacctcaggagttaaccaggggtatttatttacaggttaaagaggccagctccagagtgcgcgctgtgctgaggagacgcggagcgtgagctaacaagacgctctctctagcggcattctgggcgattactcccgagcacccagccataccaaaatcaataaacaatttcagcgcagcccagggaactttgccacacttaataaaagtctccagctgcagttatggcttcatttcaccttaacgtcttctttaactgtcccttcttttcaagatcaattagaggtacatgcaaagagaataaagaaatccgcacgtgcagacgcccacacgctaacacacacatggccagcaaacaaggtcaaaactggtaatgagggcagatggactctcccctcgttgctctaattcccagctttagggtgagtgatgctggatatgtctaggcacatggttgggggagtggggttgggttttgggggagaaaggagagggagagaatggggggatttgtcccctagttcctaagtacatataactaatctagatacagaaagcgctcctactcta

SEQ ID NO: 40466 - DNA, 1077 bp, Bovine  19866880861007
  misc_feature (1)..(1): n is a, c, g, or t
nccttcttcctgggcaagccagagctttttatgcttttgtttctctggacctggaaaacagctctcacccccccgatatgctcgaaatgtcctctatagacttcaaagcccagctcaaatagtagatgctcaacatttgtcccaggagaagcatcagtaagttgggcaggtggccaggataaggagccagggttggctcctcttcctgagccattgccatcaagtcctcacaccccgccacccagctcctcatctccaggagtaccaggaagggaaatggtacaagtgcctggaaagggagagactttcttctgcgtgctgagcacaaaagcgggactttggggatacaccgtggcggaggtttagcctctcccattccatggtttaatgtataactggtcacctttcctgaatgtccgtttcttttatttgccagtaacacgttcaccttgttcggtctccttggttacaatgcacagttccagatcccctgcagatactttaccagcctggccacctaggcgtcattttgattgacagggactttgacaccttgtctccagccccaggagcctgatcaaggctagatttccaaatcccccagatacgcccccccaaaccaccctcacccaggggccagcttctaagagccttggatattctttgagggtaaaagccttgggagcagggcctacgtctcatacattggaggtgctcaaagaatgccggcagagttaaaccaaattgctgtcccttcttctgctaagtttccttcgttcgaagatggtttctgtctcctaggaaagattacactaaccgagaagcttgcccacctttccttcctctccttcagtgagcgtctaacataggtcagcacagagaggcctgtggtaaataagtcattccaggcagctgttttacagtgatgacctcacagtggggagggggcgagtcaagaagtcaatgtggtgacctcagatcttgctcgaagggaaataagcagaggcccctgacaaaggagagtggcagggaatctgctctgttgaaggcagtcggggaaggggccattggaagagg

SEQ ID NO: 40467 - DNA, 1053 bp, Bovine  19866880933354
  misc_feature (1)..(1): n is a, c, g, or t
ntatctctattaaataataacaacttgcccctctaaatattcaactcttacttctgtgatttttgtctagaagacattcagtatccaaggacacagttacctccataccacccagctccgtcttcccaggacatacattgctaatgagtaacacaataatttggggctcacttagctatggcctccgagtcttctttacacagtcctccaggcagctgtctccagttaatcagaactgacaggggagacaactattttcaacccttgttctagaacaggactatccaatagaacacattgtgatggacatgttctataaactgcacagttcaatacagcagtcagcggccacagatgatcattgtgcacttgaaatatgaccagtgtgactgaggaactggattgtaaactgtatttaacttaaattttgaaagccacatgaaggccgtggccatcttatcagacagcacagctctagagccttgaccagatctggctgaatcctatgagtacagacttatgcctgcctaagttcagtctaagcaaagtatctccagattaaatgagttttgaatgtctctagttctttcttttagcttctcggttttttctagaataggcagaagaattccttgaactaaaacagacccacgcatcaactctggtggcccttgctacaccttgtcttgactaaggatagggctgaccaaagggcagggcaggtcttaagaaactctataagccaattagagttcacacctggcagtttcttccttaaagggacggaatgatgatgactattcctgtcacaggctccctttgcttccctgtccatctacatttctccagctaacataacaaaaccagctttgataaaatgaagagaaagtggaaaatggcatttaattacacctgatttgcaacaaatgggtaacatgtcactactaaagaattttttttttttttaatgacaaggctcacagcacataaagacacagcaccagtcacaaaacagaggttcatcattgagagaggaggatcaggcaattaagg

SEQ ID NO: 40468 - DNA, 2500 bp, Bovine  19866880935623
  misc_feature (1)..(1): n is a, c, g, or t
nccgatgggaaagacagtaactttaagacttagggctggtctttgggaaatgtagccacaaggacgaaaagtgaaatgacacaggacgtggtaaccaaagtaagtggaaatcacggctccacaagtcagtttttgctgttgttcagttgctcagtcatgtccgactctttgtgaccccatggactgcagcatgccaggcctccctgtccttcaccatctccccgagcttgcccaaactcatgtccattgtgtcagtgatgccatccaaccatcttgtcctctgtcatcccttctcctgccttctatcttttccagcatcagggtctttcccagtgagtcggctctttgcatcagttggccaaagtactggagtttcagcttcaggatcagtccttccaatgaatcttcagggttgatttcctttagaattgactggtttgatctcactgcagtccaagggactctcaagagtcttttccagcaccacagttgaaaaagcatcaattctttggtgctcagccttctttatggtccaattctcacatccatacatgactactggaaaaaccatagctttgattatatggaccttggttggcaaagtcagggggcaaactttcatcagtgcttctaaaaacctttatttcagtccattttttaaaaaactagagatgatttacactgaatgatcagggtcttttacttctcctagaattttcttctccataataaagaaaccggtggagacttccttctggtcactcactagttgttctctctgcctttccgttgcatcctgtggtcccccacaggcccgcaatcacactgggactcacccaagtgagaagctacccacagggaaggtggtgcagtggtacctgccgctagaggtggccccctccactgctgaatgtgcgaggccctcccggggcctggcagggtactgtgtggggcagccttctggaaggctccggatccaacccagtgaccccctggtacagaaccgaggacactctggcacttctcaatatggcctcttgtgcgatgactgctgtgaaaccaggagaaagaggcctagcccccagtaaccagcggtggtgagggaagacgggacaaaaagtaaaaccaccagcagacccaccagaccagaaaagaaccgagcttatacaaaaggggttctatttcgtgtgcataaattatacctatgtctgcccgggctgtggcttcgacaacgaaaacggctttcagttacttctcaataaaggactaaaaagagaagggaaaaggcaggtatgatgttcacagatgcattttatttttgagagactgaatccatcaaagggagaacaaggagatcatgtatgccgggagaattctaaccaatggcaggcgcccccgtccctccctgctggctttcagccggctcactctgcaaagcagtgcatccccctttagcagacgggctggctcaggggacacaacttcttttccttgaaagtttttttttgttttgttttgttcagtaagattgcttcatatgatcaacatctcatttctgcgagggtcccggaggaccgcagtaaagacgggttttattctcacagatgcgctgttgcacaaatagcgtagtgcacggccttttcatgaacttgagatgaatgcctgccgctctccaggtttgaggatggcatggctgcagaacgagaggcacattctattacactaattagctggacgaccttgggcagcggggcaaggtgacatctgccggcttttctaagtcttaagattccacccctgagccacttaaccgccccaggcctcatttcctccacctccaaaccgaaggggccacctcgtgacctctcgggtccttcctcagctctgtgaatgacgctgaccctgcctctactggcccccaccgcccaccccccgagtctgttcccatgaaaactatttcctactctgacaacctcccaagccgcccctttcccacacctggtctgtgtgctcagtcgctaagtcgtgcctgactctttgcgaccccatggactgtagcccaccaggctcctctgtccacgggattctccaggtaagaacactggagtgggttgccacgcccttctccaggggaatcttcctgatccccacagctgtttaatccagccctaaaatttcaatcactgtcatgtgctggtttggagattcccaaagtcaatgcgtggggaaaacaaaaccaaagaggaaagtggggagggagcagaagggcagggaaagaggacaggaacagcggggaaaggaattgggggacccttctcccttatgcagtcattcctagagacaacaaagttcacacagactctcttcctactgaagacctgaagacattttcctccttggtccccccttccctttccctgtgtgctcagtcgcttcagccgtgtctgactctttgcaactctagggaccataccccacccggctcctctgtcggtgggat

SEQ ID NO: 40469 - DNA, 1832 bp, Bovine  19866880982077
  misc_feature (1)..(1): n is a, c, g, or t
nctgggttggaaaggtcccttggagaagggaaaggctacccactccagtattctggcctagagaattctattgagtgtgtagtccatggggtcacaaagagttgcactgtttactacacatgctcaaagtggaagcaggacaacatattaaaataaggtggctcaaaatcaatcacaagaaaagaaaaaaaacaagcaagactcaaagagattaagaacatgagcaggatccaagtaagatacatactttgaaatacagaattataagcaattgagcagggaggtttctgatcattcattcaataagcagatatatagaaaaggaaaaggaaacagtagtgatgtctgaaaaatgtctaggggggttattctggctaactttaactctggttttattaatactgtgtgaccatgacatacatgtgggaagaagtatccagtcaaaaagctaagagctgatattctggcccttttaaagtacagtgagatcccagccagctggacttgacaatggatttagaatgtgaaccagacttctgctgtctccacactcgtaccactccatgattgatggaacgatccccaggaggaggaaattaggacaacgttggatttctcagtacatctggcagaaaatctgggggcaagttttatggaacacaagactggatacaaaaccaacccttttaaaaggttaagttcacagcactgttctagaagacaacttagaattctgggaatcagccggttatgtcgatggtgactccttagtcctgtatctgttaccagtctggatctgcaaagacagatggatgcttagcctgattaacaagaaatgtctttgatccagctctttactttggcataaccagcataccacatgaagcctgaaaaacggagctgtgaactaaaaaagaagtgagcaaagggtgacctttacgaaagccaaaagagaactccctgacaccagttcattcaacaaggaagactgaacccagctcagaaggatttttatcaaataaagggaaaagtctgatgcctttgtgacaatacaggtacacacgagcacagctggcccttgtaaacttggaccaccatcacctagctttcacagcctgcagagacaagccaggaaaagttttcaaagtgaaagctaatgtgcagattgtctagggcaactgacacgccaatttccaagaacttctacactgaattgtggctgggttcaaacatagtgcacacaaacagcttacaaagtgtcacacatttagaattcctgccccatcacatcagttagggctcctttcgtttctcctctttttcctggggagcaaaacagcaggcagcttggaacagtcacgtccacagtttttctggcttcagtaacctgtctctgccccctttctcaattggccaagggaaacgggagatggttccagaactccaccttccttccttcctatcctcttctttttcatcatcctgtttttgttttaaaccttctctacctgttcttttcctttctttataaataatgatatttttataaaatagggagaatgctggggaaatcacaaggaaggagattttcttttcaagccacagggccaaagaggggaaaataaaatgtgtgtaacagtccagacttcttgctgcagtgtgtgtgtgtgtgtgtgtgtgttgtgtgtacactgcatctgaagagcccattctcaagctacctaccaaactatggaaacaactcttcactgcaacaggaactggtctcttattcatcaagtccgtggcaaggctacaacagtacctgcttctgttgtgtcatgacaagtcta

SEQ ID NO: 40470 - DNA, 1419 bp, Bovine  19866881141680
  misc_feature (1)..(1): n is a, c, g, or t
nctcgggaacccataggattgtggtcggaaagcctcattgaaatcattcgctaggctagatttcttctcattatgtagcatgtcaataattactgaaaaggagcaggatggtcgtaaaatattcttttaatcatgatactttacaggaaaagggttctgcctaatgttgaatgtcactggcgatagactgaaaacatttctggtcacatgcctttacccagtgtaatagagaattatgtcactgtatttggctgattgcttttatattccattttaatctctccgttggcttttcaggtatagctttttgaactatttttttagtggttgctctagggattagactatgcatccttatcactggctagatagtattatatcacttcacatgaaatgcgagacccttgtgacagaataaatccatttgtccctttattctctgtactagtaatgtcatactttaaaaaaattgcgtactttataaaccccgcaatacagttgccatttcacacggttgccacgtagagaaattaagaaaaaaaggtagtcttttatattcacccacatggccttcccaggtggcgctagcggtaaagaatccaagatgctttccctgggtcgagacgaattccctgggtcgagaagatcccctggaggaggaaataacgcctcactccagtattcttgcctggaaaattccatgaacagaggagcctgacagactacatagtccctagggctgcaaagagctggacttgactgagtaccagtatatatataataaatccttacctttataattgttcatttcctcctgtagatgcagatttccatctaagtgttgatacgaccaaaaccttggctttctctgcccaccaaagctgaattaaaaaatacagagacagggtttggaggaaatagaaagatggctttaatccacagccggtggcggggagaacactgcaggctagtgcctcacgatcttgtgccccccgccccccaccggcctccccctccccataggtagggctcacagtctgggcgaagggataagagacaaagtagtaagaatctaacattcttcttcttgccttgctgtagaacagccgtagctggcgtcaggttgcccggtaattgggtctggcagtcctggaaatgggtccgtttgtctccggtttattcccctgcagcctcctttctgaaacgcaaagagctacaaggggtggtctgaagagaaccggatgaaggcacaggatgtaattagcaggagttaaagggtgcagggtgtaacttacctagtcaggtagttgtgaagtaaacaaatttggttaccaactacagataagaaatagctagagtaaaaatttggagtgatgaggcctattcggtgttctttttattctatgttctcaggaaagg

SEQ ID NO: 40471 - DNA, 1586 bp, Bovine  19866881213760
  misc_feature (1)..(1): n is a, c, g, or t
nctgaaagaagagagcgactcatgcccatttgccaacgcttcagaagcctgggaggcttcgctctctgaactggagctctcctcagaggcagaggagagaagggtgggcccagtccctccccaatgccctgcccagactaacctgtggagctggtgatgggcacaaaggctgcagagttaaggctgctctggagtccgttcagctgcccttctgcggaggcccctctgaaacacaagtggcttggttagacctgaagacagaaaggcgaggtcaactacagcccttcaggggcactgcctcttgcttctggggttgcccccctcccagcttcttttaagacttctttcaagtacagatgtcatcttatcagaaaggacttgtactatcaacctatccccttcttctgaagtgttacatgttttaaaattgtccatttctccccactagaatacagcttcaagaaaatataggcttggatcatgactgtgtcccccaccccccactacctatcacaacgcctgcacctaataagcactcaacagataacttgtttactgaatgagtaaattaagttcctagtattgacttagacaaatcataagtaaagacgtcaaaaaaaaaaaaaaagttttatgtgcaacagtggttctcaacttgggggaggaaggaggggcggatttaggcctctatccccaccctccagtaagggacacttggtgatgctgagatatttgtggttgtcacaactgcggggcctgctggcatctagtgggtagaggctgggaatggtgctaagcctttcccacagtgcccctggaaagtgcccccaaagagtattctagtccaagatgtcagctgtgccaaggttgagaaaccacatatagaggtagctcccctcacaccaagttttgacaagagataggacagagtattttagattctccagcacaggttccccagccgcctgctttagaagttctttcactggcttgacgccttatagactatgccaggtcctcctgccacaggctcttacagctctgtcattctttcattgcatttaccaaaattatatatttttttcttttaaaatttttttccttgactgcatctcatggcatgcagaacttctgaggggtcaaacctgcatgccctgcagtggaagcatgaaggcttagccactggaccaccaggaaagcccctgccaaaaccatgggactatggggtagctgtgagcttaacatctgtcatccttgctagaacgtgagctccatgaagacagagatttcttcagtcctactcactgttatacacttaaaatttctagaagtaatctgacccattaccccataaatacacttatttgttgggcctggtctaccttgatttcagttgacatgtaaaaattttacctgggagagtcagtaaacaccctcttccaacaacacaagagaagactctatacatggacatcaccaaatggtcaatactgaaatcagattgattatattctttgcagctctacacagtcagcaaaaacaacaccaggagctgactgtggctcagatcatgaactccttattgc

SEQ ID NO: 40472 - DNA, 1618 bp, Bovine  19866881219598
  misc_feature (1)..(1): n is a, c, g, or t
ncttgggaccacgttatcagggcgggggacatatcaagaagggcaggtctggagggctgcgctgtttcggccagacctggaattgcagcctggctcttcaagtggatccccttgtcactgtgagcaattcgctcaacctctctggacctcaggggtcctcttccataaaaggtggatagggacccctaatttactgaggcgtcactgataaagagatcatgccagcgagccctgatcaaataccaacaaagcagctcccttcccttccaagtggctaagatctggcacttcccgaaatctactcacatggcccagggaccatgtgacactctccctccagcatccctgaaggccagggttcctgcctgcccacactcacataccaccaggccccttgagtctgggaacgcaggggcccagcccatggctgctcatgggcatgctgtaacagcagcggcaagagcagggcatggggggcccttcctggtcccacctgcttgcggggacccactcagaactgcagtaacacaggacagaaagccttctgaagacttatcaggctctaaatccaggctgcaaggatggtgctgggcagacggaaatatggtggcctttagagaaccagggcatgtgtaagtcagaggggtgctccagtgtgtctcagggctcaggaccccccagcccctctaggccctgaatactcacagcttaaccccctgccatgtattccctggggggaaacagaaaaactagtttcagacctcacccactccctcaagcaggcactcttggtcagtggaccacctgtgcaactgtacaggtgacccactgtccaatgcacagattttctcaaaggtatccaagctttcaccttgtatttattgaaggttcctccacacctggccctgtgctgcagattcacaaataaatgggactcaggcctttaaggggctcggggtgataggacacactcacgaagaggtgggaaggagggtgtaattctcaaggctgcctcctccttggcaaagtcatttctcaacaaaccagggattcagagaatgaagcgagcccccattgacgagatgcacccttggtctgcaaagccatgcgggtctagctagtcccatgtctgcaggctggcggtcctctcaccgctgaaagcaggctgtctgtgaccgactctctgagctgggcctctcgatgccaaaggtctgagcccgaagcaattgccagggaaccaccagtgcagagaccttctctgcggccagagagggctggggtctgagaatccggttgagatggagtctaggagagcctggcgcactctggcccccttttgggccgctgctgcgctgggcgctgtggaccacaagctctctccttcccattctcctgcagcttccccagcaattgcaacatggccaatgtaaccccagggcaagctgattacagcatatgcactaacgtggagatgctctggaatagatattccccccaactccccaaaccagaggagcccttgcctcctccggcatgactgcgcttcccggcatttccaggaagaggagccgccccctcatatgatctaagggacccactgcagccaccgcacaggctg

SEQ ID NO: 40473 - DNA, 1149 bp, Bovine  19866881251704
  misc_feature (1)..(1): n is a, c, g, or t
ntccaaacccaggaatcaaacaaacctgcctctcttatggctcctgcattggcaggtgggttctttaccactagcgccacctgggaagcagttatgaacgggttagtaccaattccagatgaaggctccagccttggggccagggcctccccttacaacttcatccctcgtaaacaattagcaacaagcttcactagaactcctgtcttagaaggctttgcctttccaagaagaactaggtaaggcaggaagggaaactgcaggaggaccaaagaaggtttagagaaatagagaagaaggcagtcaacggtacaagatttaatatggataaacaccggtaatacacttgtcagcaatgaccctagaatgagccagactgtaggagagctggtggaagggcagcgatgcagagagagatcggggtcaggacagatagcacatcaagcatgggcctccagctcaatggcatgataaacactgctttggggtaattctacaaaacccagccgagcaaggagcagccataattcctctttactctctcttactacaggcactgatggaattttatgcgcagcccaagggacttgctttgaaagcagactggaagggtgatgaggaaaggactggaagagtggtgaagaaggtgtcgaggcctcccgaaggctgtctgagccccacactgcgagggacagacgtgggaccatgtaggatgggttgcccctctgcactgaaggtcaacacctgtgttcagagcctgagtcgcacgcgcacactgcaggcgtcgtcgatggtcccctcgaccgcctcctttttctctctggttcagcaccccactcaggctgagtctcacctccacgtccagtccacgagggctggtttagtgagggtcccagacgatgcaccctagaagctcaggagggtagctccctgaattcttccctttttttccctgccctctgagcactgtttcctggtgtggtttctctttatacgccctccggaagagacatgcacgccagacaccctgctaagcaggtggtggccagcacagtaggcatcacatcactttgcttggcatctgacctcacctccctccccttcccatcgccctcccttcccaggccttatacttctccaagtaagtgt

SEQ ID NO: 40474 - DNA, 1479 bp, Bovine  19866881285218
  misc_feature (1)..(1): n is a, c, g, or t
ntaggtgacattagttgaatgtctgctttgtactggacactgtggtaagtactttatatgcattattgtctctgtacccttatgaagtagagactttttttaacagatgaagaaaatagctgaaagcataggccaccctgctgaggtcacacaaatggcaggtgatggcaccaggatgcaaacccagatctctctgactttatactctttcccttggtgtttttctgcctcttctcattccacacaggactctcacctctccttagactctagtgactgagcttaaggcctctgtagagttgtagccaagccatcagattgtttggtagtgaattcaggttcatcactgagcagccttcttaatccctggagatgcagtgagagtagatctgtttatcgtggtggcggtggcccccatcgactcaaagactgaataatgaattagaagtacaagaaatggatctggccatcttgtaaggttttccaggaatgtctttggcaattcttgatctggaactctttgtagattttggaacaccaagtgtctgtgtgtgtatgtatttcatgtaagtgacagcgtttatgagagaagacatggcaagagaactgagttctaatgcaacagagctgcagaggttccttgccttgcctaacccccttgaaagtgagattaacactggaactcttatctcctgctgattagaatataaatttcttgagattcattttatcagtatccaggaacaggagacaaaggtcatgccttaaaacatgtttgtggtcatggctaatgatttaatacctgctcaggaagtgccctttaaggatgattcttttcttgtttcttaattgaatatattctctagtatttattcagtgatgcaaatcatgtaattaagtacagatccagcactttgcgttttcatttatcttgagtgaaatagatcttgggtccagtgatttttttttttttattcaaggattgccttttgttccagcgacatatggtaaaacaagtcagctaggactcaccactacatttctctattccaattcagggccccatggtcaggggaatgaagggtccatgacagactgagttgatcccatcgtattctgatgagcctttgtatgtgaaggacacagagaacgttgttctcaagatgctgctgtgtagttcagagtacagtgtgaatacagctttagaaaaattaatcttcgtagcagtgatatgaagtgagtcttaacctttttggagtgagagattcctttgagaattgaatgtaaattacagtttttgtcctaaaaaaaatgtgcactcaaacttagaaatgtacattaattttagagagttcataaacatttcctccccctctagcttaactccttcatgatgcctggtggacccaaggtctccaagttgagaactcctgaaaacttttaggtagtatagatcactaatatcagtaattggccaaa

SEQ ID NO: 40475 - DNA, 1584 bp, Bovine  19866881310098
  misc_feature (1)..(1): n is a, c, g, or t
nctaggttgtttgtgagtatgattctcctgtatactgtttctgatgatttgatctcacggtatcttatttccctcttgggtttgtggtttttaagtgtgagctacccatcatctttgtgattttctctagtggaaattcttttggcacctagattggagtttcactcttccagaagagtgtgtgtttgcttctgccagtcatctggggtcaccacctaccttggtccactgtaaattaaattcctgcttgcagtattttggagcacccaagtagtataaatttgggccagaaacctctataagggacaacttgttaaatatttttaggttaaattaaaagtccttcctccatccagggctaaggccaagaaaggtatgttcccttgctgttatttctgcttggtttgtttatttggtattcacccttacactgcaagtgtagcacttccgaggtcctcactctgggagatctcagatctttctgccttgagcaggccctactctacctcctgcactcatcagagtcatcaagaaagagactcaaggagaccaagtctcagcagacacctgcagggtggaagatggcttctgttttacttgactcccaagttctgagctttcacatcccttttgacctctacagagtctttcgtttcttgcctctgctctgtgcatgtagaaagctatttttgaccctcaatgataaagctaaccccaaaagtactaggtaagttagcaggataaaaaattagcatataataatcaacagccttcatatataagaataaccaagtagaagacataatggcagagagaaccccacttactagcaacaaagattaaatatgtagggaataaccttaacaagaagcacactgaagctattcgaggaaaattttaaagccgtccttaaaaggcacacagatagactcgaagagtagaaatacaccccctgttcttggataagatgattcaacattgtaaagatgtcagttttccctgttagttaataaatgtaacatgatataaaaaataccaacacattatttttatggcgttacatgggttgatactaaagtttatatagaaaaacaaacatgtaagattaggaaaacactgaaaacttatgacgggactagctctccctgtgctgtaagttttccataattgaaacagtgtgggactgcgctcaagtagacaaacagaccagtggaacagaagagaaaagttcagaaagagacacaggtgcatgcagatcccgggctgaacccttaaccagagaaagaacgctattggcaaaagtggtgaaattcaatgaagtatgctgcttagttaatagggttgtgtcgatgttcattccctggttttgatactcgtgtcttgcctacgtaacattagaaactgggagaagggcatacgtcaattctttgtcctattcttgcaattttccttcagtccaaaattatttaaaaataaaacgtgtgttttttaagggtttgaatcccggacccgagaatatagagagaagactgagtcacaggtaacgtggcacactacaaaagggccactggccaccactgttgg

SEQ ID NO: 40476 - DNA, 1240 bp, Bovine  19866881396060
  misc_feature (1)..(1): n is a, c, g, or t
nctgcatttactttttactctaactgctggtggaggggcaaggggaagagtctcaaagcatgtaccgtcaccccagctgtctcattttggtattttggtcaagttccttgattttgctcctggttcaggccaccactttgtggaatggggaggagcagggagggtgtcttgggtctccgcagtcctgcccaccccccaccccgccacgccctgcacacaacaggtgacccgtactttcgccatttttctgggccggctgatcctccctagccatcgcctcccatgggtcacggtcctaagacccaggcgcagcaccctcaccgcacccaacccccaccccgccaccgtcgtgtgcgtcagggttcccagagtccagggaggcccacaaggggagaagccggcgcaccccgctatcgccggtgcaggtcacggggtggaagaggatgggtttttaagccttcacttgcagaggtcgtgatcctgacctttggatagcctcctctcaggaacacgcgcgctgggaggtctctgctcacccagtgggaagacctcggctgacagatgggggaaaccgaggtccacagagggcagtgatctgttggacgtccccacgcgaaatccaccactgaatccggtctaggaccctggacttccaggccatagtctagtttctagaccctgagcgccccagacaggcagtctccctaggaagtatccaacagctagccttccaagcccggaatctccgtggagtttgcgctcgctttggcacgttgcgaacacttcccacgcccccaccctccaggagctctgctccggcttcgcggctcccagagaggggataagaagggagcacacgcccaccggcgtcccggtcatgacttgggggtgaagaatggctgcgggaggcggaggccccggcggggacgcgctggccctttaagggggggacggagcgcatgcgcggcgcgggccagagtcgagccgggtgggcggcaggccggcagagtaccccgccgcctgcccgctcggttggcctaagcttcgccggagccgagacctgcgcggggatccgcgcgcgcgcgcagcaaactgctctcgggggactagcgtagccggccctcccagaggctttgcccctcggctccggcttcctccgcggacgtggctgcgcgagcctccaggcttgctctccccgccccgcggtcctgcctccagcccttagccaggggaggcgggg

SEQ ID NO: 40477 - DNA, 1371 bp, Bovine  19866881515086
  misc_feature (1)..(1): n is a, c, g, or t
naagttctttggatccttaaaggccaagaacagggttttctccatattgatcatatactgggaaatagaagaggcattgactctcttgtttcctactagtgaagtggagtggttaagagcatgggcttgggaatcagattggggttcgagttctaggtctgcaacttcctagctgcgtgactcaggacggatcacctgacctctctgcacacagggaataccagcactacctccttcgtgcactttgacatggggatgaaatgcaagtgggtgtgggatgcttttgatacgtccttgacatcagccatatgctcgctattcccttttgcctgatcttaagggaggccagtctcttaatttggatcctgtgattttaagatcatttctggcatgagaagtatatgtaatgaacaggtcttgggtgatccagacttctcttcattgcctgtggctccagacccctccttcagccttttaaaactggataaaaggaaggagctgatgtttttttatgtttatgtagacacagatacccacatcctctacatcacacctttgctgaggggctttctaaagtctgtgcggtttgctcctttacagttctcacggcttggttcataatgtcggggaaacagcctgttcccctctggcagtgacctatggtggactcggattcttcctagcttatgtgacatgggacagtttatcttcctgtctgtagatcccttctgtgtttgccactggctctgaaagatgaatacagcattcgtggttctgtagcaaaggtgtcctaaacctcagatgccaaggcccacagttgattggggcaggtcagaaagtccttatataagatgctatgtgcacgacttatgggagtgagccttcctgcagataacagctcagagatgttgctggtatcaccattggcaggaagcctagagttccttcagcagggactccctgactcagggctgggctccccggggatctgggctggagcgcccttactaaggagctcagcctcttaggattacacactcagtagtttttgaatctgccctgtgctgattcagcaacaatgtggggtcaggccactgcttaagacacctcagcctggattgctccactaacccagggccaaatggggcacggcccccccccacacaccccgcttcccatcacatgctcctcttccagcctgagcagataactgcatcgcagcaatggctcaggagtggctcctggtggacccgcaggtcactgcctccttttttgaccacctcatgcccacagtgcctcccaggggtggagaagaaccaggagtcactgcgtcccctgtgcccattttccttctcaccccccagctccacc

SEQ ID NO: 40478 - DNA, 789 bp, Bovine  19866881592433
  misc_feature (1)..(1): n is a, c, g, or t
ntagccaggtgaacgcaggtgaattttctgtagatggagtggactctgcagtgccgcgatctatttaaaaaattatcctaaagcaacagatcctattgagtctttctcttgttttcttttcttctgaacctcctttaggtagatgtggcctcatggatgagctggttcatgacttagcctcagccttggagcagacatctgagcagaataagcttggtgagctctgggaggagatggccctgagcccgcggcagcagaggcggcagcttcgcaaacggagaggccggaaacgccgttcagacttcactcacctggcagagcatacctgctgctacagtgaggcctctgagtccagtctggatgaggctctcaaggactgtcgagaaatggccccggtcaccaatttcagtgactctgatgacacaatggtagttaaacggcatccagctctcaacgccattgttaaaagtaagcagcattcttggcatgaatctgactcctttactgaaaatgcaccctgtcgaccgctcaggcgccggcgtaaggtgaagcgagtgacgtcagaggtggccgccagccttcagcagaagctcaaggtgtcagattggagctacgagagaggctgcaggttcaagtcggccaagaagcagcgtctgtcccgctggaaggagaatactccctggacctcatcaggtcacgggttgtgtgaatcagcagaaaacaggactttcctaacccaaacgggaaggaaagaaaggatggagtgtgaagcagataacaaaaacaggg

SEQ ID NO: 40479 - DNA, 1641 bp, Bovine  19866881619143
  misc_feature (1)..(1): n is a, c, g, or t
naaatggcaacccactccggtattcttgcctgagtaaatcccatgaacagaggagcctggcaggctacagtccatagggtcacaaagagtttcagacacgacttagtgactaaacaactactgtttctcacatgaggtccccttctccccagtggaggagaaatatgtccatagacatccaagtggaagcatagagtaagttttcccatggaaacgctgtatacaaaatggtttgggtttatgttatcacaactttaggcacatgaggggtaaataggcttttgttgtgattataatatcacttccttggaaaatacatttcaacttctggacaacccactcctaaatgagacaaacactgcttgtctagagcctgcatgttaacttgtacttgctgatctgatgattctttgctgttttcatagggagtacttgtattttaggaaatatttacataggaaggtaagtatatgttccctcggttctttctaagttaatcactgggctttaacattaagataacaggacctatctcataacgttgttaagaattaaataagatggtggatgtaaagtacatcttagtacagcgtcaggcatcacacttagggctaaataaacattaattattaatatagcagcattatttttacttagaaatacatggatcacagccttgtcatggtgaaggggcttgtgtaactcaatggaagctgtaagccatgccatgtagagacacccaagacatgggtcatggtggagagttctgacaaaatgtggtccactggaggagagaatggcaaaccattccagtattcttgctgtgagaacccccatgaacggtaggaagaggcaaaaaattatgacactgaaagataagccctccaggtgggaaggtgtacaatatgctactggggaagagtggatagcaattactaatagctccaggaagaacgaagaggctgagccaaagcagaaatgatgctcagttgtggatgtgtttggtggtaaaagtaaagtccagtgctgtaaaaaacagtattgcataggaacctggaatgttaggttcatgaatcacaaattccaagtggtcaagcaggagatggcaagagtgaacatcgacgtcttaggaatcagtgaactaaaatggacaggaatgggcgaatttaattcaaatgaccattatatctactactgtgggcaagaattccttagaagaaatggagtagccctcatagtcaacaaaaacatctgaaatgcagtacttggatgcaatctcaaaaacaacagaaggttcttgcttcagttccaagacaaacctttcagcctgacagtaatccactgtctatgttccatcctctaatgctgaagaagctgaagttgactggttctatgaagacttagatcttgagcttcttattgcaaaattcaggcttagattgaaggaagtagggaaagtaggggaaaaaagacctaaaccaaatcccttatgattatacagtggcggtgatgaatagattaaagggattagatctgccagacagtgcctgaagaactgtgggtggaggttcgtaccattgtacaagacgcaagaccaaaataatcgcaaagaaaaagaaaagaatgtaaggaggtaaaggg

SEQ ID NO: 40480 - DNA, 859 bp, Bovine  19866881742775
  misc_feature (1)..(1): n is a, c, g, or t
nttgggagtggggaagagagcaatggtttgacttttcttctttattggttaggcttgacacatggtgttctccctaacacctaccttattttgtttcagctcctataaaataagagccttccacgcccatggaagtaaataatttcatcctggagaaccccctttagcttgcctggaaggaaagccgggcctgttggatgtgtctgtaatgatttcaaatgaataggataatatttacttggttaattcatcttcatcaccttaaagggatatttgtcatttctagcagaggtcactgttctgccccccttcttctccctcccctatctctctcctctttttctaaattgtaatcataaataatgagtttcattcacagctccctgccagcgagctgctaattacgcaaagtactgcttgtaatttacacagtaataaactgtaaatttaaacattacggcactttaagttaataatttttctgctgtaacaaatagctcatttttcacctatcttttctcgtggccccattgccatggttgtgtctgtgaccaagaggcgtaggtgtaaagagtgaaaaataggaagaatacagtatgggaagccttttcatttagctccactcccacccaaaatctgacctccaagttaatttttctacagtcagttctgctaaaatgtgtaccctcatgtttaggctaatccacacacagatgagtacagataatagtgtttgcccagaaacaaatgtgtttgagtaacaggcttgacatttttgacattcatgcccatgacttacgctctttcatcttaacacgtcctcacacgcgtgtaactctgctcatgtactgtcagtacg

SEQ ID NO: 40481 - DNA, 995 bp, Bovine  19866882064269
  misc_feature (1)..(1): n is a, c, g, or t
ncttgataaatgcccccagctgtttgcccagccctggcaagatcagcttttctaactctactctttctgtaaaatcttgagcgttttccttttgtgggtcctcccttctatggaaaggtcattcctaacatggtggcttgaatccaagatagactttcactaaaccattgaaatagaaaactagtacctctacgttagagatgtggaaagtcttgaaatatagcaccagaccacagtcaaccttgtgaagtaatgatcaaaacagatcttaaagaaagaatatcactttcaggaaaagtttccaccgatcaaaataatggtcggaggcagggagaggaaaccacaaataaaggaaatacagagtcaccctcaccagcaaaatggataatggggattttacccattataaccctccttggtgatggcatgttacgtaggcctgctatatgatgtgatcttaatggtggtggaactcctagccacccatttaatcatcttctattccctaaatgggcttccctggtggctcagagggtaaagagtctgcctgcaatgcagagacctgggttcaatccctgggttgggaggatcccctggagaaggaaatggcaacccactccagtattcttgcctggaaaattccatggactgaggagcctggtaggctacagtccttggagtcgtgaagagtcggacactactgaacaacttcgctattccctaagtagagacttgccctagaagaaatctctcaaaataataaatgcagacatatttccacttacagagacactgtttgtttgcaatgtattattgaacagcatctttgaaaggcctgttcccctcagtgccaggatctttcttagacctcaggaaaatggaagaggcaaaaagagtagaaagaaatggagcaagtgaatcgaattctgggttaggaagtatgtatctaatatttgaggaactcttaggtactaactttgaatagtcccaaggaa

SEQ ID NO: 40482 - DNA, 1600 bp, Bovine  19866880348467
  misc_feature (1)..(1): n is a, c, g, or t
natggacagggaggcctggtgtgctgcagcccatggggtcgcaaagagttggacacgactgagcgactgagctgaactgatgccatgcagcctgtgagatcttagttccctgaccagggattgaagccagatcctggctgagtcctaaccactggaccaccaaggaactccctctccctctttttaattaaaatctctgcaaaatattggaaaatgtatcataagtggaaaactttttaacaccccaatccaactccaccatccagtgaaagagcctccccatccagcactttgtgcaaaaaaaatctatagattcatttcccacgacagtaaaaagtgctggccagcaggcttttaagaggctgcctaatatgctatcatgagtcccaggtggctcagatggtgaagaatctgctcgcaatgcaagagacctgggtttgttccttgggttgggaagatcccctggagaagggcacagcgaccccctctagtactcttggctggagaatcccagggacagaggagcctggcgggctacagtccatggggtcacagagtcagacacgactgagtgactaggcacactgttctatcatgaaggtaggctctccttttcttgggcttccctggtggctcagacggtaagaatccgtctgcgatgcaggagaccagggttctatccttgggtctggaagatcccctggagaaggaaatggcaacccactccagtatttgtgcctggaggatcccatggacagaggagccggatgggctactgttcttggggtgacagagtcggacacgactgagcgactaacactttcactttcacttagccaggcccctatttttctgctccctttccacaaaagccacacagggtagtgttcctgcctgcggtctgcccctccttgacccccacgcaggaacaaatgatgtggccagaccacaagctcgggaacgaaacgctgtggctccggcctgcagccccaggacttagctgatgtgcagcatggatcccatgggtcccaaatgtcaggtgggtccctccctggtctgcagaacgtggcttctcatgtctagtcggttctgcccaaaccaagcacagcgggtgcagggggagctgaagacgagggcgatttcaccctcagaatgaggaatctgtgcccccagccttcaaggggtcctggcctgatccttcctcttatgctctgcccttgaccacaactatgtggacggagtcacggcccccaaacccagaacaccaggtcccatgctgggcctcccagggaacgctggaaaatccacagggctgaagtcctgggccaacattccacagcctggcaccccggcaggccaacttggatggaaaaaacaggctccaggccctggatgggagaagcaggaggtggtctcccggccaagtcagcagcctggagggccagggagggaccatctggagtggggaggaagccaaggctgcctgtatgttccggctacacgttggatctgagctgctggacataatagctgtttacatgatatttgcgactgcaattattagcccaagattgaggcaatgactgggtgctggcggctt

SEQ ID NO: 40483 - DNA, 1211 bp, Bovine  19866880348468
  misc_feature (1)..(1): n is a, c, g, or t
nggtgttaaaaagttttcccttatgatacattttccatattttgcagagattttaattaaaaagagggagaggaagttcctggtggtccagtggttaggactcagccaggatctggcttcaatccctggtcagggaactaagatctcacaggctgcatggcatcagttcagctcagtcgctcagtcgtgtccaactctttgcgaccccatgggctgcagcacaccaggcctccctgtccatcaccaactcctggagcttactcaaactcatgtccatcaagtcattgatatcatccaaccatctcatcctctgtcgtccccttctcctcctgcctgcaatttttcccagcatcagggtcttttccagtgagtcagttcttagcatcaggtggccaaagtattggagcttcagcttcagcatcagtccttccaattcaagcatcagtccttccagtttaagactgatttcctttgggatggactggttggatttccttgcagtcatggctgggattaattaattaattaaagtataaaaaaaagaataaaagggtcagatacttgtaaaaagtatctcctgaggacctactcagcgccaagcacgggggattcggtgtcgagggggcaggcccaacaggcctggggtccgggagcaccggttaaggtcaggcagactgccccctcccagcaggtgcctccctctctgtcctcccgcagatgaggggctctgggacattctcatcaaagacatccccaaggaggtcacgtcctacacattcagcatggacatcctcaagccaggtgtgagctacgacttccggggtcatcgcagtcaatgactacggtttcgggacccccagcagcccctcccagtctgtaccaggtaccacctacagcgtgaggggtggggggtctggggaaggggcgagggaaggagaggcagcagccccagaggcactggtctggggacccagaaggcattgtcctctcagttctccgaagccaagatccctgggctggggcccgggtcagccttcaactccggaaggagctggggggcagaggtcttgggagttcctttccaaggactccagaagccctgggcagcgggcccagtgggcttgaggatgaatcagtgggaccaagatggtagcttaccgtgggcttatcacccaggaaataccgagggcatcaggtcatacactgtgtat

SEQ ID NO: 40484 - DNA, 1643 bp, Bovine  19866880361398
  misc_feature (1)..(1): n is a, c, g, or t
nttagtggtttgcaaagttgtgcaaacgatttgcatcctgctgtggctggcagacaccctctgtccccagctcctcgtgactttctccccaccccgctgtggagctgcctgggcttggctctctctgcctagtgaccattcctagcgaatgccgcttccaggggggctgccctggtggcgcagtggtaaagaatccacctgccgatgtaggaaatgcgggtttgatccctgggtcaggaagattcccctggaggaggaaatggcaacccactccagtatccttgccagggaaattacatagacaaaggagcctggtgggctaatccatgtggtcacaaagagtcggacacaaccgagcaactgagcatgctgcttccaggacgaggtgaagccagctgcatgctgcctgctctgtggcccaggcgatgctggccccacctccacccgcccggcaccccatgcagagagcccactaccttgtatacaggccattctttcggcagaaggagttcttgacagagagtcgtcggttgttgagttccagggcaggaaaactgctctcatccaaactcatcatctcgccatggcccagcgcaccagtcttggtactgttgcctggggagggcagagattgacatccatcacgcactccatccttttagaccgcgtggcccctttcccctatggctgggctgccccctctttcttttgttagggtttaaaccaaaactggagatggagattgtgagactgtgtgtaggaaccctaggagacccccacccccatcagagcggctgcttttccaggagagacctcccccacaccacctttgccgaaaagggagatggtcccgagaaagtcccatccaccagctcacctgcgtctgtcttcttagcatacttcttgctctggcctcggatgatgagcacaaagacgaggagcaggatgaagatgaggccaacaagtgcgatgaccaccaagaaccaccactcctcgtagaaggggttggctttctgggctggagcatggagtgggcgtcaggtccgtggtgctcagacctgtcctgcctccaagcctgtggctccagctaggaccctaccacctgctctcacattttacgggcaggtgagtctgcgccctcagaacgaggtagaatcttgggttggtagggatggtttcatctcaagggccagctctggtttatcagtaaaggggctgcctggagggctggtttgagaaagggctgaggccatttctagactgattgattagtgatgtctgctaaaaatacaggcggaagagtgagttgaggaggtttctcgactcctgagtgctgggattgattagtgatgtctgctaaagatacaggaggaagagtgagttgagggggtttctcgactcctgagtgctgggattgattagtgatgtctgctaaagatacaggaggaagagtgagttgagggggtttctcgactcctgagtgctgggattgattagtgatgtctgctaagcacacaggaggagcagggcctgtgcgcttgctattttttcttatttttccttgccacttacggcccaggggctaccttggtagatgtcaatgtgtgctagaaaggtgcttgcctggcctgtgctgtgcctgg

SEQ ID NO: 40485 - DNA, 1443 bp, Bovine  19866880471165
  misc_feature (1)..(1): n is a, c, g, or t
nttcctggggttagttcagcttgggaaggctggacatactgtattttattctggcatatttagcggagtcttttgtatgctctgggaacctccagccagcctttccaaacccaggtgagcgcacagccccacatccaggggctcgaaggtgggacgggggtttcttcggaagccccgtcctgccccgcccacacagagaggagcatgggggctcctgctaacccctcagccttgcccgagctgtgtccccagcctggcaccctttccccacatccctgggccctcccgtctctccctctgcatctctgctcaaacgtgacttccacagaaaagctccccaggctctgttcaatggccgccctccggcgccgagcccgtcagcctgcttctcctttccccgcacttttcaaccccgacgcccatgtctcaccaactcccagctacgcctttgttcgcgtcgtaatgtctctgagatgaggacgtgtcttacaaccgacagcatgtcataatttaattggcagccttttttctttcttagtggcgcataaaataatggggcatcttacatacaacccatggcattttagatgaaatgaaataaggtatctttatttgtttattggtttgtctgcctcccctcatgagaacgcacagttctggaatagcagggatctggctcttgggttcattctgtgcctctccagccccgagaacagtctgggcacacgttgccaaaagtgtcagatactcagtcgtgtccgagtctttaggacccccatagactgcacccctcctggctcctctgtccatgggattctctaggcaagaatactgcagtgggctgccatgccctcctccagggggtcttcccgacccagggatcgtggtaagcccaccccccaccaaatgtgtgtccaataaatcactgtcttccccgcgtgtgatctcaggacgggagtcagtgtgccccctcctcctccacagggccctccctcctgccagggttacagtcttctctctgctcatcctgtcatcccattatcccagattgcaccctggttttggggtgtcttttagctcagctgaactcaaaggagaaggatgggaaaagcggtcagggtgcaggaactctgagaggggctgggggttaagtagaagtggtcgcaggagacgaagcagaatggcccagaaaccaggcagagacacgtccaagttctagcagttctgacattacgacaatatggcattgtctgcaactctcacattatgggcaatttgagtctgtcacctgtcctgaaattacggtaatttggattcatttgtaaccttcaagttacggtaacacagggttgatttccagccctgagattacggtaatttttcctgtttgcttcctagggtgtctgcttatagccagactgactctctgctcaatggtgagag

SEQ ID NO: 40486 - DNA, 1006 bp, Bovine  19866880667119
  misc_feature (1)..(1): n is a, c, g, or t
naaggtgtacctaacccccatatcagacccccagcactcactggcagcccaaagtgttccctcgagctggagggaagcctgcagcaccagtgattctgcctgttacaaaggctgcaagaatcagggctggtccttgggcgatcattcattcattaagtgactactgtatgctgagaacacagccaggggcaaaaaccagtttgctctcagggagcatacagtctagaggataagacaatgttagatgaaattatttagtttcatagtgattgatcaagttacaagaatctgtaaaaaatactcaaaggggggatctgtgatctgggtgtccaggagggcttcctggaggaggggacatttaagctgatccccaaaagatgtgtaggagttactaggcaaagaggtgagggatggatttgctgggggaggaggtggcctgggtagagctcctggggcaaatgggcgggagcttgccatgcctgagggaccggcggaagagaaggtctcagccttaaggtgctcacagagctggtggggaagggggcaggatggtgagacacgagcctccctcacactcacttctatacacggaggcgagagtgcaatgctgtggagggtggggggtggaatcttctggaagacttcctgggtgagtagctctaaagcctgcatccaaagggccagggggatacccaggtggggagagagccctgttctggttgggagaggccggctgagcaggagaagtggggggtgcccaggcagggtcaggggtgagcgggcagggcagcgggactcttgccaggagcctggccccactctcgcgtcgctctctttctctgaaagggaggctggcggagcttctgcattattaatagtgacacatagtaaacattttggtaattgtcacagccagaggctctgagaggcagcgccagctgttgccagcgtgaaaaaagaaggcaacacgctcctgccagcccagcacacacccccaaacgctcgt

SEQ ID NO: 40487 - DNA, 1505 bp, Bovine  19866880712725
  misc_feature (1)..(1): n is a, c, g, or t
natttttttaaaaacacctttattttttatttatttggctgtttggggtggggggggtcttagtttcagcacatgggatcttcagttgcagcacgtgggatccagtttcctgacctgggattgagcctgggccccctgcattgggagcacagagtcccagccattgggccacgaggaagtgtttttgaacacattttcagggtctcagtcaatgctttggggaaggaggtggcgtgggtgacctaggcagatagaacagaagcagcatgctgaccacaggtggagtcctcagtcatcctgacagcctgtgctcaggcagccggaagaggcaagcttgttttcaaatatggtgaaattgatacctaaaacccaacgagtgaggctcttgtacaaacccagagaccatggcatcctggcaaacacccgagtgtgtatttctttgtaccccggaagttgcgatcggtcaacgaaatgggtgttgcctctcttcctgttgcccgtacacaagcccgtcttcagtttcagggatggaaaaacgtccctgacggtgtgaagtgcctgtctgtaacggtgcttgaggaatagctcaggaagcccgaggattaaaggtcgatgtttattgtgtgttttgtgggtgaggaaggtgggacagccacacctgtgagggatggggctgcgccaacgctcacacccacaccccctacactcggcatatttattggctggtgcttgtgctgacggttttggagccgtgtcctcagaccttccgcatgcactgtgattttattagtgcccagctttgtagagagttcttaaaaagtacctttgagcgattgttgagtaacatttccattttctttcactgagagaacatgtctggcattaaaaaaaaaaccaactttatggtttctcataaaggtgtaattttgcttcgttcttattcatttattttcatggtgaggagaataaaattgtttccctataagaatgattgtctattttttgccttgcacgttagtgatttttcacccaaccccactccctcccatggctccctaggaaaaattgaggcaatttaagaagaaaatgatgcaatcttagagcaggccatgtctggataaatacaatgatcgatgaccacaaccacttaatgtccttttggagagatgaataatcctttgattatatctaagaagagaaaacacatgaatttatgttctgggtcttaaataccttctccctcacccgccccctcctttttttttttactttgatttaacttgcctgaaattaatgaagcaaaaactcagggacagaggccagttttgtgaggctggacacttatacaatttaaggagacctttttaagaaaaagaatacaaaaatatcttacttttacatatttttctttctttacaaaagcatatgaccatgtgacataccgcccaagcaagacagatccctgaagcttaaactttattggcttcatggtaagtccatttctg

SEQ ID NO: 40488 - DNA, 883 bp, Bovine  19866880757194
  misc_feature (1)..(1): n is a, c, g, or t
ngaaggaaatccgaagaagcggggagaatgtatacgtagggctgagtcaccttggtgtatagaagaaactaacgtaagactggaaagcaaccataaactccaagaaaaattaattaaaaacaagaaataaaagtgtcagtcgctcagtcatgcccaactctttgtgaccccatggactgtagcccgccaggctcctctgtccacggggttccccaggcaggaagacaggagtgggttaccattttctcctccaggggatcttcctgatccaaggatcaaacccacatctcctgtgtctcctgcattgacaggcggattctttacccactgagccatcagggaagcccagtaaaggcgggagactttcctgctttcttctttgagtcttttgagaaggggccaggctcttctcttcgtggtcggcccaagcctcgtactggcagaaactccactatatcctgtacacctgctccctggctcctgaaaatacaagcccggaggactttttctctcattacaaatccatccagttggcccctgtccaggaggctccggaggtggcaggccataacgactcgcacggcccagggcaatggcaattgtacatcctttatggggaagtcaggccgcccggtcagcccccgggaaaaggttttcctgccgggcctcccaggccttgctgcgaaaggccccgacagaatgggaataaaatgtaaaaaatcaagtaaaatgaagggggaaagaaaggaagcgtataaaccaaaataattgcaacaatataaaagcctcatgtaggtgccataaagagcgatcggattgaaagctgctgatatagccgaatccataaaagtgtgctccacgttgtttatgacacgccgggccg

SEQ ID NO: 40489 - DNA, 660 bp, Bovine  19866880793206
  misc_feature (1)..(1): n is a, c, g, or t
nggcttatgaggcgtgagggcaaacacagccgctctttaaagagccttgctgcaatcaataccctcacccatttccacgcaggggccctgggccaaccgagaaacttcattattatgtgccatcgttacgtccctcggagaagcttaaaaagaaaaggtcgctgtttccaagtttgttctcctccatttgccaaacagatggtttcctggggtctgtggggccctttgtatcaaaggcagcccgcaccggcctgctggggctgactccagacagagcagcgccccacgccggaaccccgggagtcaccacattcagccgcccggctgcccaccccccagcctcctcagccatggtgaagtttgggaccaatctcttgtcggacatttacttatttatttatttaggccaggattcagaaactacccaactccgtggtaggtcgggcaggaaggaagggaaggctgtgggttgctggacatcacgagtagctccttcacactcactacttctgggcaaacacaggggatggtccgccgagccctcaagcccgccacagacacctctgagccttccgctgctcgtccctttttttaagggaatttgaactcacagtaaaatagaaaagtgacagaatcccactttttcttgcacagaaggca

SEQ ID NO: 40490 - DNA, 2934 bp, Bovine  19866880797988
  misc_feature (1)..(1): n is a, c, g, or t
ncagatttggtttgcccctccgtgggacagggcaaaagtagacctggtaggaaaaacttaactccagtaattctgctacaccaacctcgaagccttgctgagcagcaccgaatccaagttcatgaaagttccgtacccccggatccctcatgcatctcccccagctggccccacgctgacctggctcttgtttgtcctgactcagctctgtgcctttgcccgcagccccagcagccatcccaggagaagttctacagcatggctgcccagatcaagcttctcctggaaatccctgagaagatctggagctccatggaggcctcgcggtatctccacgccacccagctctacctgctctgctgctacctccacaagctgctgcagctggagtcttccagttcccgacacagccctgtcctctcccggttccccatactcatccggcaggtggcagctgccagccacttccggtaagtggtccgccagcaggaccttctctggtgatggccgagctgcaccgctctgattttatggagcgtgtcttctctctcctcgtgtactgggtggtcttctccgaagatgtcagaagctccctgtgacctttgccatcatctctttaggtcaaccatcctgcatgagagcaagatgctgctcaaatgccaagctgtgtctgaccaggctgtggccgaggccctgtgctctatcatgctcttggaagagagttctccgcgccaagccctaacagacttcctgctggccagaaaggcagcaatccagaaacttctcaaccagcctcaccacggtgggcgtggcttctctcccagatgtgatatggggatggagcaggaggagctgagggagtccagagcattctgtgtttctaactttaccaaaggacactgctaaaagagggtggtttcttctcgcaggtgctgggatcaaggctcagatttgctcactggtggagctgctggccaccactctgaaccaagcacatgctctcttctacactctaccagaggggctgctgccagaccccttgctgccgtgtggcctgctcttctccacgctggacagcatcaccagccagcaccctagcggtgagctcttagccagcctcttctgtttcctggttcattcgtttaccaggcacctgccagctgctacgctgggccctggggatacagcagtggattggacagatacagacccactttcgtggaggtcacagtctagaggtagaggcagatgttgaactcacgaatccacagtatctgcttaatagcaatcctggtcatcactctccaggccgagtgcagcttgacttggtagccgtgaatggagggaccacagttggacaagatatttagttgccctgcagcgtgtgggatctcagttccccagccagggattgtacccacgtcccctgcatcacaaggcaggttcttaaccactggaccaccagggaagccaggacgggatatttaaactgaaacctgaaggttgagtaagaggcaaagaagagagttccaggcaaaaaagaagagcaggtgcaaaggtcctgaggccaggaggatgttcgaacgtgaggaagtgaaaggaagcaggggcagttgaggtggggaggagcgtgaggaggtgcgtggctggtttctccctcatgaccagtgaactcagcacatgtgggcagaacagcagacagccttctaggaccttccggactcaggcctcctgcaccctgcgcttttactgggtggcatctgtcccaggtgggattagacgtacgtggcttttacgtggcagtggttccccgtggggtggagcggatgctgagagctcacttaagaggctgtcaccacgaaccaggtggcgagtgatgggggcagtagagacggggctcactggacaacgcggatgtgtgtttaggagatgggtgttgagggattggctgtggagggtgtggaagggaggtgtccaagtttaccagaaaaggagacttgttttcttgttgaagtatagttgacgtgcagcggcgtgtttctggggtatggcacagcgactcatacgttcttgttcaagttgtcatagtttattgtaagatagtgaacatagttccctgtgctcctagtaggaccttgtttatctgttttacatacagtagtttatatctgctcaccccagactcctcatttcccccctcttccccctgggtaaccacaggtttgttctctaagtccatttgattgtctgtttaaggttcactctgataccacccagtgttcgctgctctctttctgacatgcttcactctgtgtgaccatctctaggtccgtccatgttgctgcaaatggcgttagttcgttttttatggccgagtaatgttccgttgcatgtacagactgcagtttatccattcctctgtcagtggacatttaggttgcttccatgtcttgattgctgtaaatagtcatgcagtgaacactggggtccatgtatcatttcagactatggttttctccagaggtgtacccaggagtgcaattgctggatctgtttttagttttttaaggaacctccatactgttctccgtggtggccacattcatttacattcccacagacagagtaggagggttcgaaaaggagttggcttaaaagggccgatgacaactttacttttgaaaaccttgccttggaaacagctgcgaccttggagtgggactagagaggacgggcgactgtgggtccagaacagagcagtgagcagtccggctggagacacacccgccgtgtatttgcatggctgtcatgaggccttggaagtggatgatgtcataggtaggagctggtgcaggggaccgagcctcaggagagtccagaatcagagatgagaaaaaggaagaagggaaggggcaggatgtggtggcggacaga

SEQ ID NO: 40491 - DNA, 878 bp, Bovine  19866880806921
  misc_feature (1)..(1): n is a, c, g, or t
ntttgggcttcctttggccctctcgcccgaccccaccgatgtttgtgctgagcagcgtgtgaggatgcgtgtgggcaggaagcagggcaaaggacctgtcagggcggcctctgacggggtgttctgccgcagagacggacgcctggagctcagctggcgtcactcgttggcaaacaagacccgcaggcttgtgcaaagggaaaaccaggcctctcccttgcacaggcctgcactaggcctgagcctgcccccaggcggacaagaagaaaaggggcacaggttctcttttcttgccccagcgaggctggatcagacgccaaaggcccttgcgctggcatctcttccctagggatgaggtctgttgctagccttccctgcagtgggcaggtggccctcagaagcctgctcccccaaggggcagcctgaggccacggttccctttggggcagcgggagatcccaggaggggcagggctgggcagggggtggtgcagggggaagcgcagctcccagccttgcccagaccctgggggggggtgtgacctcaccgtcatccagggtccgctccaggattggagggtggctggggcccccgtcgccgatgcgcgtgaaggccagcacctggatctcatacagcacgtacttgcccaggcctgtgagctgggcgctgcgggaagagttcccttccaccagccagaaccgaggtggggcgtccgagtccttctccttgtatagcacctgtcagagcccagcgcagggtcagggccgtgggctgggttctggtcttgccagaacgtctcctgtctcctccccaggagctgggtggggggtggtgaggatgagtgggtggacccggggctccttgaaggggcttggtcc

SEQ ID NO: 40492 - DNA, 1225 bp, Bovine  19866880861107
  misc_feature (1)..(1): n is a, c, g, or t
ntagcagagacagatgatggtcaggggcaccaggaaccccagaatgaaggcatagatgatgaagcctgtgtaccaggccccagattcgcctggccagttgatggtgcaactgcttctcccccactggttgctccgaaggccagcatatatcatgatcggcaagatgaccagcagagagacaccccacacagccacgttgatcatcttggctgtccggggtctcctccacttggccgacttgatggggtggaccacagccaggtagcggtcgatgctcatgaccgtcagacagaagatgctggtgaactgattgatgccatccacggtcatgaccacccggcagatggccttgccaaagggccagtggaccagagccacctgcatggccaggaagggcagacccagcatgaagagttcatctgcgatggccaggttgaggatgtagatgttggtgatggtcttcatcttggcatagcggaggatgacgtaaatgaccagtgtgttgccacacaacccaatgatgcagaccacgaagtagatgaaggtgaggacgacgttgctggccaggtcgtagtacggctctgtctggtttgaaatgttggctgcccccacggagccattgaggtcgaacggagcggtcagccaaggttgggtctcattgagttcagacaccagatccatggctgccttctagtcttaggctagatccaacccgccagaggtcttattctcagcttcatgggtcccagaggcaaaggatccactgtgacatctgcaaggaagaaaagaagattgacttatctgccagaggttacttaagctgtcaccagcttcccgtgtttcggtttgctctctcagacgctcttcagttgaaaagtgtgttgtctttcacaccagtgtgagcactaccagctcattctcacacgcaggccattggagttgtttttccagtggcggggaagggtttgagtgaagtcatcccagtttatcttgtcatctttggtgacacacacgtgggagttgactctacctgcaagacagtggttcctaagaagcgggctgatctgaacgtagagaggacagagcctggagaagccctaccttagaaaagtctgacacctgcgttcctggtctttcccccttgaggaaatctatgctgacttgacagctgctttggagtctttctattgtgaaaatcccatagtggaaaaatgccagactttag

SEQ ID NO: 40493 - DNA, 1513 bp, Bovine  19866880994033
  misc_feature (1)..(1): n is a, c, g, or t
ngatccacgtgtgagcagctcccggggcagcgggaaccgccagcacccccgcctcatgtggccacagggagcgggaggggctgggccttctgggcgggccttggggtcgggccagccccgcgctcagccacctctcagcgccctcacggccgctagccgcctccaggagaaccaagaaggggtgtgtgttccaacacactctgtagagggttttaaatcctctcgagccctgccactcccgtgcttttatttagtgctgctgctgctaagtcgcttcagtcgtgtccgactctgtgcgaccctgcagacggcagcccaccaggctcccgtcctgggagtctccaggcgagagtgctggagtgggctgccactgcagttgcgttttttaattgaagtctagtctacagtgtggtgttagtttcaagtgtgcagtaacatgattcagttatgccaattctgatttcagaaaattctgaaagtaagtttcagattatttttcattataggttccactgtgctgcatacagttgcctgtgcaatactaggttcttcttgcttacctgcttcctgtacagcactgtgtatatgttaatgtcaaactctttgaagtcatgctctggggctctagacttccttggagacaggcctgtccagggagtaaggtcggcctggtgaaggggctgtaggtgccacctcccatccagccagaaatgctgttttttttaatatatatatatattttttttttttaataaacatgctgagacatatagacatttatatttatatactaggactcagttaagaggttttcaagtagagtccagcttttcttaataaaggtgaggtgactacgaagccccagagaaatgcttctgttgcaggtgtaatgaagacatcagaaacgggatcagcagcctgctgatgtacgtgacgagcacgaaggggctggcggggatccgagacgccgtgtgggggttactcgccaacgagtcgatccatcacagctgggatgtggtctgccggcggctcctggacaagccgctcttgttctgggaggacctgatgcagcagctgttccttgaccggctgcaggtgaggtgcgaagtccacaggccagctgcctgctagccagtcctgcccggtgccaccttttgactgtctggatagatttccaccacttcctataagtatgttctttccctgctgacttattcccggggtgactcttctgaataatgagctgtaaaaatgaacagagtctgctgctgcgtaagagaccaggcccccgtcgggaggctggggaatgcgtccgcccccatcagtgacgacgctcccctctgccgccgccactgggccatctctctgagcgtcggggagaacactggatgctgggggtagtctgccactcggtgctctaggttgagatttcctggaagcacgtgggatttgaactcttctcccctctctttcagactctgaccaaagaaggcttcgactccatctccagcag

SEQ ID NO: 40494 - DNA, 1524 bp, Bovine  19866881025644
  misc_feature (1)..(1): n is a, c, g, or t
ntgtccttcccctctgccagcacagggaccctctcccagagaagctcaggggtctccacgtgctgctgggcgttcgtgtagcaaccactgtttgtgaaaacgcgtgacggagggcggctgtgaatgccgtgtcccttttcagtgggtgtttatcgtattcatcacagcagcggcttctcgctcttgacagacagccacaggtgtgtgagacgcatcgatggtatcggcgggcagggtgtggggcgcacgtgtgctgtctggacccccgtgctggggacccctggcttggccctttgggtcccgggagcaggctgggcttgctaagccacgctggaggggcctctgattttgtcctgagtcctgggaaggcgaggatggttcgggatggaagagctcacctgagttctgtgagaggggaaaaaaagtggatcctgcgtttgcctccctctcctgcctctttcctttcttcctctatccctcgtctctgcccctccttccacacacgcgtgttaaatgttactggggattcatagagggacaggccccttctcggccttccaggagctcctgagttcaattggagaagccagaagcaagggcggtgggacttccggtggtccagtggttaagattcctctccttccgatgcaggggacgtgggttcggtccctgttcggggaactgagatcccatgtgctgcagggcaactaagccggtgcgccccggcaaagacccggcacagccaaaatttaaaagaggggaagttggtgccttcagggtggggttccgtttctcacttgcccctgaacctgcaaagtctattttcagttgtcttatctactggggatctatttgaaatttcacttaaagaggttgacacctctgatgctgaatccacttacttgctgtataagcgttaaggggaggtcagagaggtgcctatgggcttcccaggcggctccgtggtagagactctgcctgctaatgcaggagacgcagatttgcagtttcgatccctgggtcgggaagatcccctggaggaggaaatggctacccaccccagttttcttgcctggagaatcccgtggacagaggagcctgctgggcttcagtccatgctcaggactgagcatgtgtgcgtgcacacacactcacacacacacacacacacacacttacccaggagctcagagttggtgacaggcccagaccggcacccacgtctgctcctctcctcgcgacgtgtccaggcccctcccctcttcccgggtgggtggctcaggccggaggcttgggggctggcctgggagggggtctctgctcccgggaggagggtcgagtccctgggaaggcagaggccatcgatccatgttcagctgagagcttcacacttaacttgcagcttcttttctgggagggtcatttactgacaattacgggtttaaagtgggtccagtttagtaagtggtttctataaagagcagagccgggtccccagggagcgagagccgggcggaggcaggg

SEQ ID NO: 40495 - DNA, 627 bp, Bovine  19866881045901
  misc_feature (1)..(1): n is a, c, g, or t
ncacagagttttctaagctgaatgggggtggacaagagaagcaattaaagtttgatccatttaggaagctattagtgacccagaggggtgatgaaattttgatgatgtgataatccgaagaggaggaaatattactggccgcagtgcaacccattcggggagttcagcttctggggtggacatggagactctcaggggcctgctggagccacgaccccggatccctcacacctagactcctctgtgggagggggctgtgttgcccagagtctgagccgtggcacctgcctgcctgggcttgtccccgggtaaggtaagccagttctgagtctggtccaggtgtcctatttcctgcttcgaaccacaaggggcggttcagaatgtgcctccagagggtccagatgggataatgtgggcccataaggggcctgagacacagaagtctccctgaattcattttcccgtcatttactgcttgggtaaccctggataaggtacacagcctccctgggcctcggtttttccatctgtcaagtggagatacagctgtcctgagctcactgggttgtaacagggtttaatgagacacgctaagctcttaggacagagctccgtgcgtggtaaaca

SEQ ID NO: 40496 - DNA, 776 bp, Bovine  19866881082895
  misc_feature (1)..(1): n is a, c, g, or t
nccaccccagccagagaaggaggtgccaagctgtggtttcagcttatgccccaggtgccgcacccacagccccgatacagggctgtgctgtgtagttgtggtcgagcgaaccgccaggggccaggtgcccagtgcacccacctctgccagctgctgtgggatgccccccctccccctgccccccgccagtgtgggaggggcgccctcacggctggggattggccactgcactcaagggggctggggtacccatgaaggagggagcccccagggtgtggagggggtgggctgctgcatgtgcagagggctgacggctaagggctccgtggcctcctgaaagagggatcagtgccaggcctcggctctccctgctggccgagcagatgcggaggtgcggatgatccccaaagcacaggttacaccggaaggaccgaggtgagcaagcttagcagctgtggctccccgctgaatgcttcacgtaggtcgtctttcagcagcctcaccctgggtatccccatttcacaggtgaggagcctgaggccagcggagaggccgggacgcctgcctgtggagagctccagagccagctccaaggtcggagctcaccctgccctcccggcttctctctgctgcctctgcatttctcctggtgtgtttaccttcccgatttagccagcttttgtttggtttgatatgaaaatgagtttgcccagaatgcacagcagcagaaaggaagggggctcggggcggacctgactgagtggcaggaaggagca

SEQ ID NO: 40497 - DNA, 734 bp, Bovine  19866881547698
  misc_feature (1)..(1): n is a, c, g, or t
ncacagaaggcaagaaactgccagcacaaccacatgggaagccattctcagtgctgttggctatgaaagtgggcctcctccagggtctggctgatgtggaagtaagggccttggcacagcatggactgctcggcacaggctggggatgctgtgggctggactggcgacgaggtggtttaagctgctttcaagcccactggccctgtctaggttactgatgctgttgctattggtgctcccaccattaacactgctagaagactatgtgtcccaggagttatgaaagacagggtttctactattcctttggtggtcttcttcaatgctttccttctccttttcctgcagcaaaggtactcacccaccgcagctggcagaggggagtaacaaggccccaggagaagaggggacagacagtgctgtgtttctgtggttgccacgcccactccctcaggccgcagctctcactgtatggcagtacccctctcactgtaagtggtacccttacttccagcatctgctccacatccacccccacagccactgtgatacccaggcttagagtctttattgtttccactgaaaggaactagggttctttagagaactggctgatttcaagtttggggcaggattagaaaaacctgcatatcttcaactaccaaaataacaaagactactggacctacttggatcacatcaaaagtactcaggagtcaacctgaagaagctcc

SEQ ID NO: 40498 - DNA, 992 bp, Bovine  19866882052086
  misc_feature (1)..(1): n is a, c, g, or t
naagcccgcaccccaaaattagagagtagcccccactcaccgcaaccagaaaaagtccatgtccagcattgaagtcccagcacagccaacaataaataaatatattaattaaaagaaaaaggctgaggagccagggccagctccaagccccctttgcatgccccttcatcctgcccagcccaggaagaggggcaagagaggggaggtcagggttggaaaccagctctcatcacgtgcccaggcccctgagtcgtgtaatagccacttcctgcccatgtctcttggaagccttctgcctaatccagttaacacctcctgtgatccgattactgtgtgtaagaaaccccagatctgatcagaggcatcacgtgggtggcacaggttggcgggggggggagtgctgcagagaagaggttcaactgtggctgccatctgccccctccccaggcctctggtccttccgagctgggtgtcccgcctctggcaggcctgggaggtgtcggggagcaggggacctgagccaccaccgtcctccccaggtgcctgaaaagcagatgctgtccagccccctgtagccccctggccttggaggggaagccttctattcctgctcacccaccatcctcgttcccttgggtggagcttgcctgctttgcgaggaggaaagttgcgattgtggccacaagtgtggccaggggctggggcaccttggagagcggaggcgtttgggtcccggccctcatggatgctcctgcaggctgtggagggacccacagagccccgccttcgccccaggtgacacgcaccctggcggaggacggatggagccacccacctgctgagggacgacctggaggaggcgcccattctgtgcctgggggaggggggagggcaggagaggggctggtcgtgcaggacgccaggatcctgagagctcaagggagcccgcctgggcctctcactgtccaccctagaatgagcatgttgcccag

SEQ ID NO: 40499 - DNA, 904 bp, Bovine  19866880390352
  misc_feature (1)..(1): n is a, c, g, or t
nttccaccctgctgcagagcccccagccccacttcaagtgcctgtgttgctgggtggctgcctggtgaatctgggttctctctcctgtgttctcagtcttctactgagctggcaccaggaagcgggtgccccagtaagggggccaaggttacaccctgttagatacctcagacctgggtggctgcttccagtgagtctggccagggcctgtcctgctgagcatcctccatttgacgtccaagaagaactcacagagtttgatttggcggggagatgggtgtaggttttctacttggcagccaggaaccctcgactcacaacacaggagcttcctggttcctctggtgatacgtgattagggaaaggaggtgagctgaggccagtccaggaaatggcaacccactccagtgttcttgcctggagaatcccagggaaggggacgcctggtgggctgccgtctctggggtcgcacagagtcggacacgactgaagcaacttagcagcagcagtagcagcagcacccttgcctgtgaagtgtcttctgaaaacagtatctacgggggatccttgcgggtgctttctgcattgcaggtgcttgtttcagcttctgctctaatctatgatgctattatgcccattttacagatgaggaaactgaggctcagtgaaggaaagtgccctgggccagaggctagtgtgtggaggggctgggctctaaccccggaacccagagcaaactctgcactgaagttgccccatttctctgggataaaatggttttcatgtgttcattcagtcgttcaacaagcgttcactgagcagatcttattctaggcactggggaaacagcaaggcataaaacaggagcttacgttataattgggaaggcagacaccaaatgcat

SEQ ID NO: 40500 - DNA, 3787 bp, Bovine  19866880425786
  misc_feature (1)..(1): n is a, c, g, or t
nctgagcctggatctggtgactagagaggtctgtgactctccagaggttagtgggagtctttgaccaagaaatgaaactagtaagtacttgagaggccttctgaagtttctggatccagcctgggctgagagtaagtgttgatgaagtcaaaagcccaacaggaagttgtcaagagtctttgcatcctggctgtgctgggaacatgtggctgcaaggctttgggggtggggaggtctctggattccaggttggggtgctcacagaagattttccagtactggctacaagttggacaacatggccaagaggttaggcccgtggttttctggaggttccagggagaggagggtgtctgaattccagcaagttgtttgccctccatgaagtatattattgacttgtggtggctctagacagaatcaggattgagttgtgtctgggaccttttagttcctgtccccattttttcccccaaactgtttctgatcatttccagaagatatcaggttataagcatggggtgggggcttggggaagatggatattgtattggacacgggaggaggtgtgtgagatatcctgctctttaggaagtcaccatgctgtctttactgaagatttttatacttatggtgcaggaagttgatatctaatttcactcagctgttcaagttgtacaaagtattaaagctttcagggtgctttcatgtacacccagagttctcaaaccaaaggtgtagtgcaagggggtagtttatgagtggattacaagggtctatgagctcctggaaataatcagaaaaactgtatgtgtattgttggggccaggggtagggagggaagcagccacaaagaggaggagtggatcctgtccaaggatggttcagagcagtctgtgactctattgtcattcatatgcaaaatggtatgagaatctacatttttctgatgtagagttgatttcataacatacgattttaaaaaggatagtgaccccctgagaggttaacagctactagattaaagcaggccctcctattatctattaggaaaaactagaaatgggagattttccctcttctccccacatctggtgttagtgcacacttcaaggtgtctcacacactagcctgcctgtccaagctcagtctccatgcccctcccacccattcggggccacaccattctgaagagtatagatctagggttgaggctcatgtgagcctgggtagtggaccatttggaccaggaagtcaggggttttgagttcccagagtatggtctagaattgggaggtacaagtgggtacttcctagatacccttggactcctcagcccaaggggagggacacaactagagatcagagtggtcccctctgtctggatttgaggcaatatggatattcaacactggtttggaaagtagtccctatgaggaagttgaaggtctcagaagagttagccccaagttaaggctgaagaagaaagctgtctattgtgaagaggcagtggaacctaaattgtttttatttctagtctggttcttttgccacataatctacaaaaagtgtgctataatagggtctctatgacctagattcagctcacctgcctattactatatccgtatcttgggttatgtagaacatagatttaagggaagaaagaaactcattcactctgtggcatctcttctctggtatgtcttggatgtacttaactaaagaatgaacacttcaagttttctgtaaggtttgggtaattggttttaagctgtataaaatgtgggaagtttaatcaccttaatttgcagaaagcgatatgtctctgggacgagtggaaagttcatagaactttcctaaattgaatcttgtttaacttgactttggaggtactcaatatttaatacatgagacaaagggagtatttttcataaaacaaataagcatccctctaataggcatattctgatggtttagcttttttttttttaattagtttatttggttgcaccaggtcttagttgcatcacacaggatctttcgcttttccttgtggcatgcaggatctctagttgcataatgagaactcttatttgcagcttgtgggatctagatccctgaccagggatcaaacccggcccctctgcattgggagcacagagtcttagctactgagctaccagggaagtcctctgatggtttaagttttaattataatatttagagagaatccgtacttatgttgctattttgacattttttacatcaagctgagttgtgcttgaatgggcttatggtcaggtatatcagtaagaataaaagatatcagatttcaaactttatttagtaatataagtattataaaggactgagaggcaaaaatcatacctccttttcccacatacttctcttccaattatatcctatgtaaactttcctgcctactccactctatcccaagatgcaggcttgtgtccacaaaacctgtggtttcctggctccaccccagagagacaactgcaggagattcctattgagtcagcctggcaaatggagggtgggcaaggtttttgagacttgcggggaaagagaagagaaacacaacattctctggtggtccagtgataaagagactgcgcttccagtgcaggtggcaagtcttcaatcccttgttggggaagttcctcatgacttgtggccaaagaaaaaaaaagagaaacagtcagcagtgtgcttacccttccaagtcaaagtggtacttgcttctgcttgtcactgctcagtgaaagatggtttggactgtgcagtcaagaatgtaggcaggaagaagggctgaggtgtaaagggcccgacccctctaaggaggcagtctctaaagggatagccttagatgagggtagacaccaagtgggagggaaagatggggtttcctaacctcgggggctttagttcactgaacggggagtcccctcaccccttaccctccctgttaggtttcctgaaagcccacagccctccctgtcaactgcatttggataagaaaatgctactctttgagcacagcctccatctcttctgaacatcaatgggcaaaccaccagtggaggagctgagtcatgggcacatgctgtaggcctgggaagtgagggggaccccactccactgggtgatgacgtaatcttccagacccctatacctacacttggggttcctcctttgtggcttccccaacttattccacatcctcagagagtgtgtatttctgtgtgggaggaaaggatgttttccctccatatacgtacacatcaaggattggtatttttctgtgtccaagtcaagggtcttttatatgggtatttcatgggtccctgggtgtggtggtgtgaggagttagaaagcttagaaatggaaaatatttaacgaccagagtagcaaatgaatacaacttccccatttgcattttccctttcactctgactcatcttcccctctccccacactattattgcccctccactggccccacccattggcacaccctgtctgatctaggaagggataacatctgcttggacccaagctagaatgagaggtagaatgaaggtatgttaggtctcaacagagtagaagggtggtctgaacatttgagggtcctgaagccaaaaggcgaaacaggagttttagagacataatctttgagtctaggagggaatcagaatctaggagagaagccttggggaaagcagactgggtcttgtcatcataccagcctaccagtgccgga

SEQ ID NO: 40501 - DNA, 876 bp, Bovine  19866880627230
  misc_feature (1)..(1): n is a, c, g, or t
nccaagtgtggccttcaacaggacgctaaggccctgcccgtccttcccagaactcagataaccagaccccacccaccccagcacctgcctgcacgcgaccttgaccctccctcctcctcctcccccgatagatactaccctcccgctgcccttcagctttcctcctgagtgaccccgttccagccctgagagttgagctcagccccaggcctctccatctcccccaccccatgacccctgccccctgctccccctgcagtacccacccagctgtggctccccccgagccaggccacacacagcaggagcaacagcagagatgagacagtggccgacttcatgatctcccgcctgtggagcccttgactcgcgacctcggcttttattcccgggaggacctcccacccagctccttctccatgactcacagcttccctttcccaccccacctccactgggcacacacacaaggaggaaagaagggactgagggaggcaccttccctcagcagggaggaagcagaaccgaatctccatgcagctgccctggggccccgaaccccgtgtccccagagctgagcgtcctgacccctaaaccgggggttctacagcccttacctcagtaatgactttccagttcaagaaaggagtgttgtgtttgaaatcctgaaggaagaaggaaagatgagtgggccacagggaaagaggattcagagggtggagtgtggcagcctgttgtgaaagtttcaagatcacgtgcaagaacgagttttggcgcctgggtgtagtttggggttagatgaagataatcctccaggagactgagggtgttacattgctgatgggactggtgataagacttgggggagatgatgca

SEQ ID NO: 40502 - DNA, 1871 bp, Bovine  19866880634324
  misc_feature (1)..(1): n is a, c, g, or t
ncttcttggtggtacctactgttgttattcccattttacagacgtagaaagtgaggactggagaggacacaccgtgggcatgtgatcgctccaggaatagcacttaggcttgactggaagagatgtggaggcaggaatggtcacgcgaataaataccagggtggccaaaaagttcctttgagtttttccataggtggaaaaacgaatagatatagaaactaattgtggaatgaatgaatggatctttctgaatgccaaccccaggctgccattcagtggcccagggcagcaggaagaaaggggaagttggatgatgggacacatctttcacgtgtcccacatttttcattttcccacgaggcccatctagttccataaaggactcagctcacattaagagcagaaatgaacatctaggcaggaaggccatcaaggtcaaccaccacagttgacacttgcagagcatttacctgtgccaggcacaggcctcagggctttgcaagtattagttcattaaatccttcccacagccattttaatatggggaaatgaggtgtggagagaccaagtgacttgccccaggccacagggatcggacctcagatagcctggatccagagcttgtgtagaactactacactctattgtttctcaagaaacagcccagtgagttgccatgtcgatggctaatgtatgccaggccctggctgcagcctttgcacaagacccctgtaagttggggccgtttatcatcactcccattttgcacatgggtgaaactgaggcccagtgacttgtactaacttgcacattgaataaatggcagggcagaggggtcatgcacctaccagatgggcctctatgactcgctactgctgctgggctaaaatcccaacacttggcggactccaaggctcctcgggtgccgcccctctccaccctcacttcatgcttgctcccagcactcttcaggccccagcccacaggctgctctcactctcagaggactctcctagcaccacagtctttgctcacctcctctttatgctcacacccagaggcaggtttctgggtcctgtaccatcatggctgagctgaggctcccacctggcctgccctctctgattctcagcatccttatctggtaattggtgagaattagcggaggtgatgatccgtgcaatgcttgactttcagccaacttggttaacatggacttctgtgtctcagcctttaggctttaactttcccgagctggacctttctgttcccaggctccataccctccgccccccacaaccactctgcataccaccactaccccctctatgaccctccccacatggctcatgatttactcctggtgaatttcagaagggcaggggcattttgtttaccgccctagacagtgtctggtgcatagaaggtgcttaggaaacctttgtttaatgaataagcatgaggacaaatctcagaggtgaactaacttgtcctgagcttcagctggaaagtaataaggccacaattcagacctgactctggccatcgccagcactgtgccctcccattacacttgggtttttcaaaaacgttgggaaattacaaaatgaacaaacagaaacaacccagaaatgatatccccacctcacttttctgggatttttcacacctctaaatatatcagacaatttggtaagcaaaccaggtgacccagaacgtactttctgcatggcttaaaataacacaaacaagaataaagagtttaaaagtgagaaacagtggcacagaatatagctttaaaaatacttggagggggcatttgatattccttcctccctcccttctcctccttccgctcctccctccaaata

SEQ ID NO: 40503 - DNA, 2456 bp, Bovine  19866880656918
  misc_feature (1)..(1): n is a, c, g, or t
ntgaccccgctaccctctgtctctgacgtcatcttctactccgccccttgcgaccccccgcccccaccccgccttgctgctgtcgaggcccgtgctgtttccagctccttcccacctcagagccttggtccttcctcacctctgcttggaacactcttcccctaggtgaccccagggctgacttcctctcctcctgcagctcttggctctaacgtcagcttcatcaggccctctgtccactcaggacaaactgcctccaccgtcccttacttgacctcctttaccagtttttttttttcctcacagcagttgtcactacctgacattatactcttctttatatggttcctccattcacctcttgtccttccaaccctggaaaacaagctccctcaaggtgagaacactgtcgcgtgcaccactgcgtctccagcaccttcacctgtgcctggcacctcagcgttgttgtagttgctcagtcgtgtccgactctttgtgactccatggcctgtagcccgccaggctcctctgtctcatgggatttcccaggcaagactactggagtggtttgccattcccttctccaggggatcttcccaacccaggggtcgaacccggggctcttgcactgcaggaagatcctttaccatctgagccactcagggaagccctttgtcaccttgcaggtgctcaataaatatttgtcaggtgaataaataagtaccagtgctagagccctgctgtatgcggggtccacttctacctccacaagcatgtatataccaagttctgttattaacctgcattttacaaactgggagactgaggctgggagagggccattcccttgcctagggtcacgcagccagcctcaggtgggtctggaattctgcccgaatggcaggtaacttgtctgctaaatgaaaaggatgaggataggggctctttcgggaccacagtgggggatttttggctgagggctgctcttcaggtcctgaccttcagttctagatagggtgaatttccagaatctccccagcccaactttgccaggcaagaggaatcaagggtggggctggcccggggcagagggagaggaagccagggacaccagacacctttgcggtctgggcctttgtgccagcacttcctgggctgtgaaattcccctgcaaaaaataactctcttgctgttccggtcccttctgtcaggggtggcaggcagaggcacagtaaggacaggccttaggcaccacacaggggcacctgcaaactgatgttcgctgagcacctactatgggcttgtgccattctaagcactttactattaactcatttaattcttcctacaagatgggtgttaacattattcccattttacaggggggataaactgaggcacaggatgggtaacttgcctcaatcgctagctagaggagaggagcggccggctctgtagtttaccacttgtggtccatcctgcctcatccagcccctccttcagtcctctgccccacaccatcaattaagattcttacagcctgtgacctgtcagaggtctctttttacccttcctcattcactctggaaccagaacaggatttgagtgagacagatctgggttctacctggaccagaggttttgcctctaggctcatttctgaatcggtaagacagggtccagcggcctcaaattctggtgtggggggcctctgtatctgcaggtggagacaccaggggctaggccttgcctctctgctgagtggtgccaggcatgtaactatttgtctccatctcatggtgtaactgagaattaaatgaacatttgggtttgctggtggctcagacggcaatgcacgagaggggggtttgatccctgggtcaggaagatcccctggaaaaggaaatggcaagctactccagtattcttgcctgggaaatccaatgggtagaggagcctggtgggctacagtccctggggttgcagagtcagacacaactgagcgactaatacttcagaccttggcacagactctggtacgtacttggtcctcactatatgacttactttttttctcccctgattttttttctgccataatagtaacctttattgaatatttactctgtgcaggccctgtttcaagtagccacctttattaattccttgaatccttacagagtggttctcacagtgaggtccctggacattcagcagagcatcacctgggaacttgctggcagtgcacgacctcagcagactcatggcaagtgggctgagtctcaaactgagggtggagtccagctttctgctttttaagagtcctccaggagattctgatgcagctaaagttcgagaaaactcacttctaacaatcctaaaagaccggtgctattgtttttcttggccactctgtgaggcatgcagaatctttgttccctgacctgggctccaac

SEQ ID NO: 40504 - DNA, 1520 bp, Bovine  19866880834953
  misc_feature (1)..(1): n is a, c, g, or t
ntactgtacatcagaaggtttatactagtgagaaaccctctgagtgtcaggaatgtggaaaggcttttagagtacatgtacatcttatacaacatcagaaaattcacactaatgaccctatgaatgtaaagcatgtgcaaaatttttagtcatgcctcatacattgtacaacatagaatccatactggtgagagaccctatgggtgtaaggaatgtgggaaggcctttagttctgactcttaccttgttcaacatcagagaattcatactggtgagaaatcttatgaatgtaacaaatgtgacaaagcctttactgtgtatggacaacttattggacatcagagcattcatacaggtgagaaaccctttgaatgtaaggaaatgtggaaagacttttagacttaattcattccttactgaatatcagaggatacacactgttgagaaaccttttaaatgtaaaaaatacaggaagacttttagacataaaggcctttagacataaaggccttagagcacatcagagaaaccacatggctatcaaaccctaagaatttaaggaatttagaaagtcctttatgtatggttcaaacgttgtttaacatcagagaatttgtgctggtgagaatcttttgaatataaaatatgttggtaggcttttagaaaatattctcatcttttattagagaattcatgatatttaattcagaaaaggtaagaaagccttcacttgtcattcctgtgtttaaattatcagaatatcatcatcatactggtggccaattcagagaaagtgggaaacattattaatgctcataatattgacagcatttatgacatattctaatacgattgaataagtgaatttaaaagccttccaattgcttttaaatcatttggaacgtcaggtaattcatcttaatttttaaaaaccagttggaaaagactcttgagagttccttggactgcaaggagatccaaccagtccatcctaaaggaaatcagtcctgaatattcattggaaagactgacactggagcagaaactccaatactttggccacctgatacgaagaactgactcattggaaaaaggccctggtgctgggaaagattgaaggcaggagaagaggacaacagaggatgatatggttggatggcatcactgactctaaggacatgagtttgggtaagctccgggagttggtgatggacaaggaagcatggcatgctgcagtccttggggtcatgaagagttggacgtgactgaagaaactgagggccgaagaattgatgcttttgaactgtggtgatggagaagactcttgagggtcccttggactgcaaggagatccaaccagtccatcctaaaggagatcagtcctgggtgttcattggaaggactgatgctgaagctgaaactccaatactttggccaccctcatgcaaagagttgactcattgggaaaagaccctgatgctgggagggattgggggcagaaggagaaggggacaacagag

SEQ ID NO: 40505 - DNA, 1622 bp, Bovine  19866880862379
  misc_feature (1)..(1): n is a, c, g, or t
naaatatggtggctaggggatggattgggaagcaaagatggctaagggtggcctctgtcctcctgctccctaggctgttatccaaaatcccttcagcaatggtggcagcccggctgctgaggctgtcagtggggaggcccggtttgcctatttcccagcgtccagtgtgggagataccacggctgtgtccgtacagaccacagaccagagcttgcaggctggaggtaaaggaaggaaggggccagggcggaaggcaggggaggcaacaggcctagcagggagggaagctccccccccaacccctagccagttctgactctgcccccagttttagtgctaacccccactttccctgcaggccagttctatgtcatgatgacgccccaggacgtgcttcagacaggaacgcagaggacaattgcacctcggacacacccctactccccgtatgtgcaggagacctggtcccaggaataggggacgctgggagggcctgtcgtgggcacccaaaaagaggaggttttcccgggatgggaaccaggcagttgaatacacagcaggcagttggtgtattttttggtcagcttttgcttttctagtttaagtaaagaaaataccattttctccctctctttgtctctgcatatcgatttgtcttgcagagatcatttttaagtctgactccttaataaatgtttggacacacaggctggaggtaacatgtacccatttttttccatactcttctaggaaaatcgacgggacgagaacgccacgggatgagagaaggagagctcagcataatgaaggtaaggtcaggcaggagctgctaggcctcatgggctcaaccccagctgggtgtttggagtcacagatcagtggccgggttattgatccaagtactcgagaggtgttggttgaatgctgggaaggcagaagcagagaggctacttgtcagcagcagatataggcaggaggcatgagctgtggtatatttgtcttcctggctggtgactctaaagtaatgaccagcagtttaaatggcgagtttcacattcatgtgtggattttctgctcctctgggaaagttgggctgctctggtgcagctggacctgccttcccatgtggcagctggtttgctcaagccccccaccccgctgcttgcctggcttccagaagtagctcagatctgagagaaagtacatctgaaatgaaattgcaggcagtctgtgtctctggctcaggccggcgcatgaacatgtccagggaacacttccacccaaatagctgtcatttggcagatacttcctgaaggaggattctaggctgggcagtatgtgccctgtgctaggtatggaacctagcgtggagtgtttaggaaactcgggttggctcaaggtagtgtgtgactgaacactgactggaggagcaggtgatatttccccagggaggtggcctttgggagtgcctgtccagcagagggaagcacaggaagtcagggtggagaagggttgctccgggggtgctggttttggttgtagcagaggttccttgtggagtgcttgggagggccaaggagggccttgaatgtcaagggtgaggccttgagagtcctcactgt

SEQ ID NO: 40506 - DNA, 1953 bp, Bovine  19866880949776
  misc_feature (1)..(1): n is a, c, g, or t
nggggtgtttgttttttgtttttttttttgcccgccatgcacacaccttgtgaaattttattttcccaactagagattgaacccaggccctctgggcacttggcagtgagagcatggagtcccagccactggactgccagggaattccctaaaataattattaatattcaggaacatttattggttgcttactttgtattaggcttagtgcttcaaacatgatgtgcattagtttactgtatactactcataactctcaaaaataggaaacttcttgcttgggaacactcttttacagatttggaaccaaaaaagtaagagtacttccattagtaggggctgttatcctgtactggtagtatgtgaattcgaaaatatttacttttccactgggcttcattattctcatcagaaatgtggatcacaacactaccccctagaattcatctgggccaaggcacatgtggtaaacgtaagttccctattttctgaaggagactgtctgtagcaataggcaagtattcaattgctttattagagacggcttccttgaccatcctatttaaagtttcagtccccctcctgggtactccccatgtctctttcaggctatattctttttcctattacattgcatttaaaatgttctgcttgtttattgtttatcttccattctctataagctcattagggcaaggatttttatcgttttgttcactgcggtgtccccagtacctagagaagtacctggcacgctaatattcgctaagtgaatgaggctaaacttgaaaagagattaacagggagctagctggcacctagcgagtgctcagtaagagggagccccgcctaaccccagatttgttttcctcttagggataaagagacttgcacggttaaataaatcctgttcaatagctaaactgatgttactcaaagcttctaactctccaagttctaagcagcagcctcgcgatgctctgatccttcgtttcccaccatgcgttacttttaccgagtctcggaagttagaaccatgtcccaggaagagccccgggatgtcgttggtttgtttccggaaaccaggctctaggaaggtgggactgagagctgggagccgacaccggcagctattaattggccacgatatgggattgacggttacactgactaatgggaacaaagaactgccgaagagggcccgcccacagaaggaacaggaggaggtggcggcatccgcgtccgtcgcggccggacactgctcagggcggcggactggctacacatgaagcttacctttgacctctccccgtctgcctccggccttgacttgtgacattaggctcttttgggctcccctggcccagctacccagatcccagaccccaaccatgttcccggtgaaggtgaaagtggagaaatcaggtgaggatcccaaggttgggggcaggtaagggagccccattaaacaggattatcgcggtaaggtggactgcgtgacttctccctgcagcccatatgactaccgctgtcaggcatcgatcgagcgattctggccaccttgataccctcccgaactgtgttcaggataggtttgaggctatggtggtgggctggcagtgtggtgcagtcccacatggggaacccgaactgtgtgactccaagaaggactcttttcttggctctgcctccatttccccctttctggcagtggtcttgagtcaagcattatgctgatcacctgaagtacaggaaagcttttaatctttgcactcactgtatcccaataatcctaggggattaataattcctatttcctaggaagtaggaaatatagatagggaaactgaagctgagagagaggaagtcattctggttttgggccaagctgatgggaacccagggctagcatgttatgggtggtgggagagaccggaatccagaccaagtaaa

SEQ ID NO: 40507 - DNA, 1104 bp, Bovine  19866880961536
  misc_feature (1)..(1): n is a, c, g, or t
nctgtgccacgtctttggctgtttctgttggtccttcacactgctccttgcccactgaagagtcggggtggtaaggagctaaaaattcaaaggcctgaaaatggtctcttcctgctttgctgatagtacactgattcacttcttctcaagccacctcttccatctatttctcttttgaattctttgcttctacaattgggacaccctggggttggagagctctcacctttctccccactgaattctcgggggctagcacatggcatatacgcagtgagtacttgcttagtgaatctaggaataaaggacttttgcgttttagcttcctttctgtagtcttatactcccttccctcatggtaaggactagaagaggctgtgcatgtgcagagagcggagactggaatcacgcgagggatacagaatgcttaactgcagccagcctcagctcaacaccctgttcaggccacctgactgagtcttcccagccgttctgtaaggtgttattaatatgattatgcttagtccactgcaggggaaactgaggcagagggagaccatacagcaaggaagagggactgctgagaaaagaatccagtagtttaactatacagactgctttgtatactcaagtatactgctgtttgaagatggatgaatattcagcagtttgatgagcagtgtcatctaatggttaggagcacagacccatgttagacggcctgggttcgaatctagctcggccgtctgggcagcttgcaagccctctgtgatatggagagaacccccggggatgctgcgcagaggactctagtgagacctcaatgcacagtgggcactgtgtaagcagtgggtatttgtgatttcttctggaggctaaaggtgctgggaaggggctgagatgctggataaggaagtggggcaggcctaccctgggtggacggtcctggtggcaggttggtcttcatgtggagcagataccagcgtcggagactttgttggtcctggaggaacagaaggtcctggcgaagagaggcagccctcgggaggagcagctccggagcctggagggaggaggacggatagtcacctggggcggaggttg

SEQ ID NO: 40508 - DNA, 1569 bp, Bovine  19866881000731
  misc_feature (1)..(1): n is a, c, g, or t
nccctccatcagagcctgctagagccctggactcagagccccaggccgcaggaacgcggagctcgtctctccccactgtgggggcgccataggacgtcacgaagagtcagaactgtctccacagtccagtagtcacaagctcactctcctctccacctcccatgttggtgccagtggaagttccgtgcagagcatgaagaggcagtcctgtctctccctgccagagaggtgccacggagggcaggtggggaacccatgctcccacctggtcaagcacctcttccccctgagtggaggccaggcgtggagcctgggctcagttcccagccggcagagttggtgtgccacctctccgtcctctactggagcagtgtcacagggagccagcctggaaacaagaggattaaagaggtcaaaatctcctagcttgatacccaagtttctcagattcagtataaaatcgtcatcccaagaagtaagatctcagactgaatgaaaaaagacagtttgtagataccagcactgaggtgacataaatactggaattatctgacaaggatttttaaagcagccatcataaaactattctagttagcaattatacacatgctgaaacaaacgaaaaaaatgaaaagtctcagcaaagaaatagaaactttattcttctttgaagatccaaatggaaactgtgtaagtgaaaaatacagtgattgaaattaaagaaaaaatagtttactggagggggctcaatagcaaaatttagggatgaggggaaagaattggtgaactgcagtgtagaatacttaaaattaaaaattacctaatctgaataataaagagaaaaataaataaatagatgaaaagaacagagtcgtaggggcctatggtactattatcaaaggtctaaattttctgtcttcagagtcctggaaggatttgagaaagagagcaggataaaaaaaattgcttgaagaaatggtgactgtatactcctcaaatttggcaaaagacatcaacttaaagattaaagaaattgaatgagccagaagtgggataaacccaaagaaattcacactaagacacatcatagtgaaacttctgaaaactaagggcagagaaaaaagtcttgaaagcagcaagaaattacactttagttatgggaaaaaacaatttcaatgactttggatttctcattaaactgtgaaggccaaaaacaagtggtgaaagttttgtgtgaagaaaggaaataacaatcagctcagaatcttacatgctgtgaaaatatccttcagtagtgaaggaaaatcaagacatactcaaagggaagaaaaccaagagaatctttagccagcaaacttacctaagaaaatgagcaaagtatgttttctacatagaaaggaaaaactagaagaaggagccttgggatattaggtagaagaaaagaaaactgtaagtaaaggtaacagtcaatacaatatactttccttctcttgatgtttataaacttgatggtagaagccaaatttataacactgtctgatgccattctaaatttgtgaggaagaaata

SEQ ID NO: 40509 - DNA, 1560 bp, Bovine  19866881150347
  misc_feature (1)..(1): n is a, c, g, or t
naatgaggaaatgtcataaaccacagggagacaaaatgaaaaccctcacccagtggatgagttggatttaagagacccactgctcttctttgccccttaagctcggcactggagaacttgccctggttctgtttcattgttcccctttttgagccccctactccccaaaacacagtaacccaggttggcaaatccagtctcatatggccgcacctaagctcccatttcctctctctgcagctggctgtccggctcgcctcctccagtaccctgccagggaggcgcccccgctctgcagccttttatcaaaggctctgcgcacagctgaggaggagaaatacaaaatcaaagggtcgatgcacgcattgagagcggtgagcatcacggcgcagacccgccacctttcgctggtcttatggaagaaccccaccacgtgaaatacattgtagggccggaaacaggccaggaaattgaacagcgtcgcaacaaccagcgccacagctctcgagtgcttccgggtcaccacttgcgactgggagagaaggattcacaccaaacgccagtaacagaagatggtgacccccatggggatgaaaaagaagaggaggcacagttccagccgcaccggaagcaccaagcgcagctgctcttgggtgaagttgtcatagcagacagggcggctgttggcctcccgcgacgagttggttggtaagtactggacaatgatcacaacgctacagtgtccaaaggacaagagctggatggccacggcagcgatcactccgtacacgggccggcggttcagcttgtactgcacggggaaagccacgctgcggtagcgctccacgctgatgcccaccagcagccacgtgctgcagtagatgccacagtagaagccgaaacctgtgagggcacagagcgtgttctccaggggccaggcgaaattatgcgcagcctcaaccatcttgaagagcagcagcagcagcagcagcaggaggaggtcggccagcgtcaggctgagcaggaggatgtggatgggtgcggggtggggctggcgcacgcgccccacgaaggcccacagcgccaggaggttggcagggagaccgaagaggaaagatagaaagtagacaaggagaagtcccaggttttggggacttggggccatccttcctgaagagacaaaagatgctgtctgaattctgagtttcctagccccaaaccaaggtgaatcagactctgtgtctcccctctgtgtttcactaagggattattgcctaccctgcagaccgaacactattcttcttcctgtgtgtcagggagaaagaacttgtccttcttcacaacaaaattgtgcttttttgcttcacaacaaaattacttctttagaatctacacaacagaattacccaagaaaattacttctttagaatcttcctcttctccatttccgccctgcaaattgagagagagagaaagagtcttaagaattttgatgtctcagaatctcccacaggaaaagttcgaggtctccaagtccccagtagaaagggggacttccct

SEQ ID NO: 40510 - DNA, 1375 bp, Bovine  19866881177269
  misc_feature (1)..(1): n is a, c, g, or t
nccctggggctgaggtggtgtgggctgcctcccccagactcacctgcgttgacctggcaaggagacccacacaaagaaccaagatgtggctgagagatgccattgtcctggggaataccaaaggtcaggaaatgcgtgccctcagtctcccaccactggggcctgaacccaagcggttaagtcagagacagtccagggacttaattccaaaagcatctatcatccggcttggtcaccctgagaaacagaggcgccccctgcttcatcaggaaacagcgtcaccaaaacaacccacacaaagagggtcacccagcagcaaggacggggtgaggcacacacagcccacaaggatctcccgcaggccggggcctccctcactgtaggccccaggttccccgcacctaccctggcaggggagagcagatgcctcaccccacccaggtggagagacagacactgccagggacgagacagccaggaaacgcccaagggccacctgcccacacaccacggccttgctgtgtccgtaatagcccggctctcctgccctcggccgctggcccgctctctgcctgaccctgggtataaatatctcccacttcaccctggaggaatttgcctcgcacaggccaccatggcaacagccttcctccccccacttgggggtcatgcacaaccctgcccggggtgaggccgggctgccacactgccaccagctgcccccgtgggaaaggccaccccttctcctcttctggaagcaatgagaacagggaaaacatcccctggcctgcctctggatgacatctttcaccagcggacagcaccaggcgagtgacatgaggcttgggccggtggggctgagatagaagacagatgccaggggtggggacgatgcacgcatgcgcacatgcatacagacgcacagtggggctgcaatggggatgacgcccgctccccaaacttctggttggagcaaggcacggggtggagacacaggcacacattagtccccatctgggcctccggtgccctcaatcagtgaggcaaccgacctacacacatgagtgtgcgaaacccacacccagccagtgtgcacgcgccacagcaggggcagggaggagctgcacccacacttccacccctgagggaaccccaacgtcccaaccacactcccttcctcttgggtctggcttgcctgggaagcggctcctgctcccaaaataggcggcccagccaggccaggggtgaggccctggaggggaggggcgggggacagctcaccccagtcagactgtcccctgccgaaagaaggcccccaaacgtccggctgtgccccggggccgagcactttgcaccccctggcccagagctggct

SEQ ID NO: 40511 - DNA, 1265 bp, Bovine  19866881181682
  misc_feature (1)..(1): n is a, c, g, or t
ntttggatcttgactcaacagatccatgttgggcccaggattctgtctcagatgaggccaaggctgcaggtctggggccatgctgagcagcaaagatctaaggtgtgttttgaatcatttttcatcatttcggcttcaactgcttaggactccttccctgaaccatcttctgattgggtgtaaattggaattttccagggccccaggggccattggcctagagagtcagggagatatcccagaccttgggcttccaaagagcatggcaggtgagtcccgaggggccatcagtacatgccaccatcacgggccgtgtgcattggtgccctccttccccaagaccggggctggcctcatcgtcctgtatgaagtccctcactgaatcctcccacccaccatctggtggctcagacagtaaagaatctacctgcaatgcaggagatgcaggttcgatccctgggtcaggaagatcccctgtagaaggaaatggcaacccactccagtattcttgcctgggaaatcccacggacagaggagcctggcaggccacagtctacagggtcgcaaagagttggacatgacttaacaacgaaaaaacaacccaccttctgccgtagaggctcttcttatccccatttagcaggtggggaaactgaggctcagggaggtaagattacaaggcgaaggtcacagagttgcgacctggatttgaacccagccaaacctgtgtgattgttgtttttattcttggcatgattcactatactctgccgtcagccagagcctgtgggttcctgttggtaattagcatttttacgggtattagcaaagtgatctagcagaattcaattcaggagacatgtctgagcgactctttggtgtaggtcacgatgctgggtgggtggccacccacagacgtcgatgatggagccctgccctggtgagttgggtgacggtggaggagttgtaaaaaagacacccccgaatactgtggcttaacaaagtctgggtcagtcccgtctcccaaatctgtgctcaggtgaagggttagggggtaggaagtttcctggatgccctttgggcacccaggttctttccatcttgtggctcagcccttgctcatgatgctgtcttccctagcatggtggagcctgggctcaggcacgcccaggtcccagaagagcctctattttttgttttttttttttttaacattatctaccacgttatactgcttcccagtatatgtgggaggcttatattta

SEQ ID NO: 40512 - DNA, 758 bp, Bovine  19866881207462
  misc_feature (1)..(1): n is a, c, g, or t
ntgcacctccctcctaatgagatgtccggaaggcagggctggcttctctctcttattctgagtcacgtgcccggggcatggaggagtttcacaggctagaaggacagtggcctcgcagagagaagccgaggatacctcccaggcaaagggcagagcaggcctgctccccgactgaggctgtgccatcaactgatgtacctcccttctccatcagacagtgctgccaccatcagcaggcgtgcggccttgggagtggggttctgcctggccatcttccttctggccatctggggagtcaagcttcagcggaggtgagtgcctcctaccacctgcctcctttgctttgcctcccacatcccagtgagtgggtccctggtcactcagccttgcagcccccagcatgctgggtcctcagggagctctccccaggcccttcgtcctctctgatcacgtctttatttctcagttggaagaggattcagagacagcagggccttcaagaaagttccagtggacagagcttctttgtgaggaatttaaaggtaggagggcagaaagagggaatgcagggcaggtcttgacgtcaagaaagaagcaaactggaaaatcaactatgtgtcagttaaaaaataaaaaagaactttcctggcagtccagtggttaagacttcgccttccaatgcagggcatgttgggttccaacaggtagctaggatcccacatgtcacaggaccaacaaaccaaaacataagacaaaag

SEQ ID NO: 40513 - DNA, 1395 bp, Bovine  19866881222967
  misc_feature (1)..(1): n is a, c, g, or t
ntggagggctaggggcacatcatcaactttacctaccctgcattgcttcctgcgtggtgaggagctcatgtatgactacaagtcaccactgacgatgccagcaacaagatgccgtgtaactatggtacctagtgctgctgaagctgtggctacctgccacaacccctgttgccaacttggccctagcctggggacttcctcatccctcccagagcatctcaccccaccatcatattcagggttggatgtgggcacgcaggtggcaagggctctgcctccccacctccaggccacccagcaattacccccttcctaccctggggccccagaatatagacactgcccaaaggtttctaaatcccttcttacctatgttaggagagtgggatcccaggtggcaaccagaccctcccccaccaaagtctatcagtgttaaaaacaaaaaacaagaacataaaccaattccacactcacggttttagcttcatattaattattcacataaggaaggatagattatttttaataattgtgaaagagagtagagaagtagtaaaaggaatttggaaggtaaaatacttagggcttaacaatgtggctcagatacgaagaaaagaaattagttaaaggtcacaccaagatttctgatttgtgtccctgagtaaacgttggtgccattcactaagatttggaacactggaagggcatggggtgagggtgggtgactttgattataaattgctttaagataaccaaaaagaatgtcaaatagtcaagtggactatgtggtcaaattcagaaaggtctgagtgacataattcatgactcgcctgcacataggtgtaaactgaagctgtatagataagattacctggagagagagggtgcagaataagaaaagtgggtccaatgcggacccttagagaactgctacatttagtatctagatgaaggaagatcagcctgcaaagagggaaaataagtaatcagaggaggaggaaatcatgaaaatgctgtgcaatgaaagccaagactaaatgattccccaaaggcagttgtgaatactatggacaagcaccaggtggaaaagaaaaaaatcagaaaagaccaactccaaaagtctgaatttgtaatatatacaataaatcatctactatgttgggacatacttagaaaattttgataactatttcatatcattgaatccaaccccagaaaaccagtttctgtccctgctcttatggcaatatggtaatgctttaaaaattcaagtttctactcaataagtaactaatagctacatattaagtcgattatttcacctgtacagctacattatttactaccataaactgactcagcagccaccaaactacagaaacctacccacattta

SEQ ID NO: 40514 - DNA, 1047 bp, Bovine  19866881257042
  misc_feature (1)..(1): n is a, c, g, or t
ncgacctaaattcttcccgttccccacgccccaggcccttatccaggccgataggtcctccccaaccctcagcctctaccaaggacctgcccagtaagcaagcccctcacgctcagtccctccctgacccacccaaggctgctcccgcagcgcctgggcgctgtcagcccctcagttccccaagccccgcctctcccccttgatgtcgctcacaaccccgcctcttcctgggcccacagctgtccatccacacgctggaggacccgcgagacccgagacacgtgcttgtcatgaagggcgcccccgagcgcgtgctggagcgctgtagctccatcctcatcaagggccaggagctgccactggatgagcaatggcgcgaggccttccagactgcctacctcagcctgggaggcctgggcgaacgcgtcttgggtgagaccccataccctgcccaatcttctgggccagccccaaccctgacctttcccatccttgttcgacagttgacctgccccaatctacacactcaactttgactttccctatctcggtcctgatccctgtcgtcaatgcctacctccacccaacctgtccttacctggatcttacctctcttgactcaacctgtgatctcttgattttccccaactcttgccccccctccaccccgatgaccagtccttgttttctttctcgtctgcctttcagcatcctcctccagacctttcgacttcctccagtctctgcctcaactcaaggttttccccaatccttgttctgacctctgaccccctcccaagtgttgtcttgcttccttaagcttccataacccttgcctcgatcttccactttgcttggtgtgtgacctctggcaagaagtgtcccttctccaaacctgtttcctcatttggaatatgaggatgctagtaactcctagagtggttgtggggataaattccaacacagtcgtctttcagtgtccataggggacggcttccaagacacctaccacattccccccacacccttattaccccacagatacca

SEQ ID NO: 40515 - DNA, 792 bp, Bovine  19866881326797
  misc_feature (1)..(1): n is a, c, g, or t
ntcgcaccagtcgctggcagctctccacaatcaccgcttctgctggggactggtacgagcaaacaccatctcagggtgggtccgcagtgcctcgaccagatctgatgggtccatgtccttcagctgcatgccattaatcacacaggcacgggcatccctagaaagggacgtgggaggacatcactggggcctcagtccatgtggggtgtgggaagaactacaaggaggacataaggggacttacttccggttaacctggtccacgggcacacggaggcgggcagcgatgtcctccactgtctcactgccttctgaaatgatgcccacgctggctgcaatggccttggctgtgatggggtggtcacctgtcaccatgatcacctgaaggaggaaccagcagacccctgactccttcagattaacccacctgtccctgtctgccccagtggacattcctcagccacagtgatcagtttaaggatgaacatgtaactgaatgtggaataacggccaaagatgcattctttttttggtgtgatggctaaacaggtgggatgttattgagttggagctgctgggtggtggtcatctttgtccaccaaaatggaggactgcttgagaataaagccagcagagagaaaagtagagctgagacgtggagaaaggcaaattcctaaagacactgaactcctggatccagctttacccaaaccttcattccccagaacttttcagttcttgaaccaatgtgttcctttgtgcttcaagctgttttcaggtgagtttctgtca

SEQ ID NO: 40516 - DNA, 949 bp, Bovine  19866881390267
  misc_feature (1)..(1): n is a, c, g, or t
nagcagagggtgggcggcaagggaagaagccgacctgctgggcaacgtgactgcgttcttggatgtgaccacaacaccgacccagggaggaaaggatgagacagggatgccctgggctctgcctctccataccccatacctcataccctggcccctttctctccaaggattctaggcttttcacctcgatgttcaccaagaccctgagaccctagcatgcagcccttccctgagcccaaggaggctgactcccagcccctaggtgtgtctgtaatgtagcaatcagggttgggcctcgcttcccacccgcactcaagttctggcagatttggggtggagtgggaagccatggcctgtgggaaaacaggggcttactggtattctaggagtgagaactaggagatcaaccagacttggggctggggtgacacagaggcaggctcggtgactctgcctgactccacttaccctgtgggatgcagtcaaagcaaggctgaacctgggaagatcctcctgctgagggtcccattaactgaactttggggactctctctgccaatgaggatcctcctatgcctctcttcccaacctgcccaaccactggacactggacacttgggaaacacaaactcaccaaggcagtttaaatgggggaaagggagagagctgggagagagggacagtagactctagattagcatttacagcataaatcatgtaaagccaaaattacccttgaaaatcaggaaggtgccaaatggaaataatcataagcccggcacggccagttgttttttgttttaacttttaattttatattggagtatagccaatgaacaacactgtggtagtttcaagtggacagcaaagggactcagccatatgtatacatgtaaccattctcctccaaactgccttcctgtccaggctgctacataacattgagcag

SEQ ID NO: 40517 - DNA, 726 bp, Bovine  19866881579512
  misc_feature (1)..(1): n is a, c, g, or t
nggtggtggggcccgcggcgtgcgccccacctgcccgccgccctcctcaccacacggagaggacctcgagcaacctccgggcatgcggcagcctcccctcgtccacgcagaagaagcccgacgtgccattggcgcccgccgtccgcacgtccagctccgagaagtccaacgccctgggcagggcagcggtcagacctgtccccccgccctcccagccccccaccaggggcaccctgggtacctgaggaagcccatctcctcgcagctgagccccgccaccctggcattggagcgcgaggagcaaagcaggcgccacgtgccctctgtctggtcgaacaccgtgagccgagcatccgccgggccgacctgcactgcagggcaacaagaggagcgcctgggtcgccttcccgcccgagccctcccggccgcttctctgctcgtgccagtctagtcctgagtcctggcaggcccgatcggagcaccccgggctccgcacatttgtgactgcctctggaagggctcaggactcaagctggaccaaagattggggatcctaagactctggctgcatcgccatggggaaactgggcaaggtgggggaggggcgttccttttgccaccgggattcctaaactggttgcccaagagctggaagctagatttgtcaaggtccatctttgcctgcaggagggggaatggggggcagcagtataaaccaattaaagg

SEQ ID NO: 40518 - DNA, 1524 bp, Bovine  19866881703771
  misc_feature (1)..(1): n is a, c, g, or t
ntgtctttctaaagcataaacctaatatgtaccttcgttgatttggccttatttactgggtcattgcaaaccagcccctttcttgtgactcctaatccatattctttgctatttcttcatagcacttcatgtgctacaaagctatatagccttataacaagttatacaacttacttgtttattatgattaccatcttttgctttctctaaaatataacatctgtgaggctgcctaccatcttgtaagcattacatgttctctgttgatgggatgaacaaaccagaccatcagacaagcacctatggtcctcacctgacaatcaagaccttacatcagccagccccttgtggagagagatccccatttccttccctggagccccagacattgctgggatttgccagcaaggctcttgttgaggtcccttccctctcctgctcattgtcacccaacttttaaccttccaaacctatcaactaaaccaaaatctagctaactaaaatatattgtctccacaggacactcttacttcatgttgttgagatgacttatacaaacagtcaatttttgtgacattaacttccttacttgtaggaaaaggatatgtgttctgtaatgttctggtgtcatctcattagatcaaacttgttaattgtgtcacttaaatcctgatagactcttttacctgatatctgaggtttagtatctcctatatggttttaatgaaagtgcacatctgacctagtcaccctgcccagcttccagccctgctgtggcaccctagtgccctccagagaacaaccactgaaacagtctttcagccaccaagactatgcttggatgcctactgaccgcttgaccatcctcttatgatgctcttcagctcctgacttcccctgttggaatcaggctaaactaaagagggaaaggttttggtttataagcattctccttgccagtaatatttccaaacttagcctttgcattactagctcttcattatcttttgggtctcagcttacagatccctttctgccagaagccttctctagtccccctgatgtccctcttctgagctccctactgccagcctcagtcaccctgcctgggcttcccccatcccggccctgatcactctggctgtcactctggtgatgagtatgttctttcctgctctggaccaggagctcccgtagggcctgtggtctttaggtgtgcccctagcattgcccaggacagggcccggcccagaggagatcatcagtggtaagtgttttgctgaatgaacaaatgaaaaggaccccacatctcccagagggttccccaggctcttcggcagaatttcttgggtgctcagagcacccacaggcacataccttgccctgagtgccccagtcccccttgacacacaccctcatctctcccacagctgtggcccccccagagtgccactattctgcgtccagccttcgtccctcacgtgctgcaaagagcaggtgagggggccaaggtcatcatccctg

SEQ ID NO: 40519 - DNA, 1288 bp, Bovine  19866880214049
  misc_feature (1)..(1): n is a, c, g, or t
natcttgattccgcttatgcttcttctagcccagcgtttctcatgatgtactctgcatataagttaaataagcagggtgacaatatacagccttgacgtactccttttcctatttggaaccagtctgttgttccatgtccagttctaactgttgcttcctgacctgcatacagatttctcaagaggcaggtcaggtggtctggtattcccatctcttgaagaattttccacagtttattgtgatccacacagtcaaaggctttggcatagtcaataaagcagaaatatatgtttttctggaactctcttgctttttcgatgacccagcggatgttggcaatttgatctctggttcttctgccttttctaaaaccagcttgaacatctggaagttcacagttcacgtattgctgaagcctggcttggagaattttgagcatgtgagatgagtgcaattgtgcagtagtttgagcattcttggaatacacttttactaatctgcaaaaaatttttttctaaggcatatccataaagattttataatataaggaggcatattgctcattaagaaggggttctacaagaaaagcacttattaagttagcaactctgagaaggaccaggtcagagatgaattaaatgcccaacttcagaagggatgggaaggtttaaaaaaagaaaagcttaagaaaacacttactgttaatatggacatttcttcatcatctagtgtatttgacagaaattaaccttttcaaagttttacccatgatactttcaataatttaattagtataaatttatctccatattttgtcaaaatagtgttttcaccttttaataataacaagtgttccacacactgcactccagtgccctcaaccagaggatactttgccagaggggacatgtaaaaattcttctcaaaatctcaccaaagctaatacactgatttttttccaagcaaggctttattggggcccctgctgcagcgagtggagaaggcgatggcaccccactccagtactcttgcctggcgaatcccatggacgaaggagcctggtaggctgcagtccatggggtcactaggagtcggacacaactgagcgacttcactttcacttttcactttcatgcattggagaaggaaatggcaacccactcgggtgttcttgcctggagaatcccggggacgggggaccctggtgggctgccatctactggggtctcacagagtcagacacgactgaagcaacttagcagcagcagcagctgcagcaagaaagag

SEQ ID NO: 40520 - DNA, 4282 bp, Bovine  19866880859780
  misc_feature (1)..(1): n is a, c, g, or t
ngatgcttctggcaccccatgcagatcccatcacagcacaaacacatctgacctctggctccagtaagcagtagatgcgaatcgcttgcagctgcctcctccccatgctggcctcagcctgagggatatgagccactcccccccaaggttacaagtcactctggcccccacaaacctgagcaatgactaaatgacaaggcatgacaaaggtaccccctgcctcatgctgggacagctctgatacgattcatgctccagagctcccggagggatcaggctaagagggtgcccagaagaaatcacatcctcattggctcctccctcgccccactccatcctgcttctctgagagcacccccaaagaagaagcgctctctcaggctctctttcttccgcatactatttagctaggatgcctgtgtcttccaaagtcctgtgcagtttagatgtgctccgttgagcttctgtccagcctctcaacactaagttccagtgacccgagcatgtttttagttgacaaaaccaaccctgctctctgagattagcccctcttcacccactgcaggctgatcttccctgtctagggcctgccaggtgaatagctgtttccagttactaacaagaataatacagtcaaagcaacactagattttcttctaagagctaaaaagagttccttttcaagcaacacttgcaacccccctctcttgcattctaaaatgcaaaagacaaacaaaacaatagaagatgcctcaacccagcaattctattatcagttcttagacagctctttctccctccctcccccatcccaaattggtctttatctcccccttatgtattctctacacagctggaaagaccactgaatctaggaagaaaatgggcaaaaccatccagcttcgttgcaacaaaatggcacttcctccctggatatccacgtgtcagctcttttgccatttctaaaagattgctcaggctgtgactccctgctggacactccatcctgttcttggaatcttgatgtgggtgggaaggacctctcgatcgtagggaccagattttcaatctgctcagcagaacagaatcctataatttgggggcatggagctacaccaggaaaatatcactggcttagaccacctgggtcacagtgagggatgcaatgatcgctcagggggaaaggggaggatgactctacgcccacccactctaagcatgcagtgggcaaagcgcatcgcttctgatagcaaataagagaataactgttgaccatctcaatgaaagcaatgtgtctgggtcgaaatgggcttggtaagatcttttctctctaaagcccaagattactgatgactccgtcttccgaagagattacatttgtagcagatgttgctgaggacctgcctaagggctttttcccacaccacaggaaatcattcagctgcaagcagaggaaaccggaaatgcaggggcgtagtacagtcacaccaactgatggggctgggaagagataaaaaaaggcctggctctctagtctgctgtcagatcccctgaaccatgctcaagaagttcctgctcagggagtccccattgggtggaataaagctcccaggctcccaacaaggcaacctgctcatctgtgcaccctttattgactcatttactttcccagattattactgcttcctgagatcacctatagagaaactgcttgcatccaaatcttctcattgggtctgagttgcgggaacacaaatgaacgatctatccattttatccatccatcccctatccatccacccatgctattcaattcccttttaggtcccggttactgtacttgcatgggttgcagagggggcagtcaggcaagtacaaagctaaataagatactcttcctccccccagggatctctcagtctacctgaaataaacaatcatacgatggggcagtgctagaacagacagagacaaattgctatatgaacacaggggagagaagagctaactaagctagggcatcaagggaagcctcagtggggagacagagtgtctaccagctgtgtaggatcagtagtaccctggaaagatgccttactggaagagggagggtccagggttggcttaaaaggtaaacgcttacattgctattgctaagtcacttcagtcgtgtccgactctgtgcgaccccatagacagcagcccaccaggctcccccgtccctgggattctccaggcaagaacactggagtgggttgccatttccttctccaatgcatgaaagtgaaaagtgaaagtgaagtcactcagtcgtgtccgaccctcagcgaccccatggactgcagccttccaggctcctccatccatgggattttccaggcaagagtactggagtggggtgccattgccttctccgaacgcttacatacatgataccagaatctctcaacatcattggcagtgtctaaaattttctccttttcaggaagacaacttttatcgactaaattcttacatgatatgagctccctgatattatccagtcaacaaagaagaggcaaggatttccaggtggagagaagagaaggtgaaaggcatggaggcacagactcgtacggcagttagttagatttctgggtgtagagtaagtggtgctgattaagcaggtgaaggccagattgtgagccccactaaaagccattctcaggagctttcactttttcctacgggcttatggcagtcacagagcttgctgaacacaggagtgatggctctagagtgatctttcaaaacacttaaattgggcttcttgcacacaacatatataattggatcttctttttattttaaccccctgccagtggagaaaactcttgttttaattggtgtatttagatcagtcacatttaaagtgattattgacattagttggaataatgaccctcatttttataactttttcctctctgttgttcttaattcttggtgctttaaaaaaaaaaacttcccctctttttctgtcttctctgattttaattcagcattttgtatgactccattttatctcatttcttagcatattaattacatttctttttggtttgtttttaatttcatttctttaaaaattttttttgtgtgtgattgctctagagtttacaatctgcatttacaactaactcaatgaagaccctttttcctaaaaggcaactcttttaaacaacactataatacttcacagataggatgggtaccttataacagagttcccaatgcctcactcccagcccatggaacactgttgtaattcactaaatctttcaaactgtgaggctgaacccagtgtggatgatgaacttcagtcagacagaaataatctgacagaactttaaaatcttggaggcaagagctgataagcaggagacagtttgcaaaaatggctaacatcatgctttcatggatgggacactgaccaacgtgctccaagcaaggacttgcaaaatacccccgcactgagacagggcctctaatgaaagtgttagttgctcagtcgtgtctgactctttgtcaccccatggactgcagccacctgccaggcttctctgtccatgggattctccaggcaagaatactggagtgggttgacatttccttctccaggggatcttccagatccaggaatcaaacctggttctcctgtactgcaggcagattctttaccatctgagccaccaggtgcttaaaagctgagtatcattgttatttaaaggccaagcttagttcagtaacaaacaagaaaccttccctttagtgtgctgtgggttgtggtctgatcttcccagacgtccagctgccagcacatcagcctcatccatcacagagtctttagctactgtgtccactttctggaggctgccagcagacagcccagccctccattcactggcctttttaataacattaggaaaaccttggctccagtcaccctctggttcttgatatttgggaacactcaccagcctatctattttattaaagaacagttgggacacagtgcaccctgcccccacatgcacaccttaaatggaaagagggcaggaccagaagatttatgactggtgatttggcatgcagcgagcccaaaggagcacagtgatgtccttgttgttcaggctgggcggaagctggctcaccaggtaccgcctgcatcctctcaccccctctgtgggacacacctcctttccagcttcccataagccaccagccccagcaacgcttcatc

SEQ ID NO: 40521 - DNA, 1330 bp, Bovine  19866880862424
  misc_feature (1)..(1): n is a, c, g, or t
nttaccaaagcaggcatattctcttacgtcccaccatgcagacgttagtctgcgatgtagaggccatagccagtgatgaccagaactggacccaggaggataaacttttgcttgagagccaactgatcttagctacagctggaaccacatgtgtctagacccttctgtatcagtagcctgcattgcaaatagacttgctctataacaaacaaaagctaaacactcttcccatgaaaaggagcctcaagaggttttcggcgcctgctctgaatcggcaacagaagctgtcccattgtccacctcctcctgagctaagaatcctgacttcttgcaaaaaaataagagaaagtaaaacaagtgggcatcatggccttaagacttttaaagcaggcaagtgtgtagatacgtggatacagagaccctgtaacttggctgtcccagctcaagtggatgtgcagaaatatgctacagggaagaagcctgtcagatacgaggagtcacaaccaacccaggaggtactaggtgattctgcagttggatgtgaggctgcctaccaatcccaggcaacaaggttgaccgtcaggcagccaactgataattcacttgccactggaaatgggtctgagaatgaagccacaagggagagagagccgtgtctgccccagccctccacagatgaccagttcaagagtttcctgcccaggccacaggctgatgctgggagagtggtcagtcgatccgagcaactggtccagaagagcgcccagtgtccagtgcagatgtcacccagctccagtggctcagcccatctcaggcagccttctccagggacacggtcagcacagcctagggctgcatccatccggtcctcagtgccagaccggggagccagacctccacccccactcaagagacgtccctggagcctagagaagagctcctgcagtgacagctttacctcacagcaggcgggcagctctcaggcccatccatctgctggccctgctcctcagccacccagtctttcccagagatcatctgtgcagctgaacagaagtatcttgcttcctgcagccgccccgtccaccgtagtcatgttacaaagaatcccggatgtccaggtcacgaccatctcccctggcctgaaggagatcagactagtgggccccttttgctgtagccaggcctcagggagagggtgtgcccctagggcccctgctcctgtggggatccagccgggccagcagcccgcagctcagccattgaacctgcagcccgcagcaccactggggcttcctccacctgctttttcttccttctcctactccca

SEQ ID NO: 40522 - DNA, 2354 bp, Bovine  19866880972408
  misc_feature (1)..(1): n is a, c, g, or t
nctgcaatgtgacttaccgtaagtctgctgcccatgcctattggcatgaaggttttgatttcactgtcatccatttcctgttcatgaacagtggtagcagctgctgcagcaacagcagcatcttcctctcctacaatcacttccatataaacttcatctgcaatttcagcaacatctgagtacaaaattaacagaaccacttttgtgaccaagtttacagaccagataggaaaaatatttttatttgaattctgttaacaaacagaaagttcaagtgttacatacctagaatactactttcatatagtaaatacactataaacatttattcaatgaattattttcttggttttcaccataatttgtttataaaatggtatcttgagtaaacaccaagaatcactgatatttttctttgcactatggcagtacaataatgtctgccatagtacgactttttttccttcaaatagtggtacagttttaaaaatttaaagcataaagaaacataaaacgctctcccacaaaaaggccacctacttacttaaatcttcatcttcttgttgagagtcattgacagtcatataaaccatcttttcccttggcatacgaatactgttattctgatcaaggagttcaactccatgatcattctcaggctcactctccacaatgtcgacagtcccacctatgagggaagatgacaattccaagtatttatgtgaaaacttcatttcctcctgtttcatcttaataagcaattagctttttcaatattttgtattaatacaataaaaacctgttttaaaagttatcttcagaaacgattacaagtattttcagtctaaaacaccctaaagtaattaggttaaagtgtttgatggggatattcccatgtttagcaggggaaaagaatctctctgccactgcagtagaggcaggtttgatccctgggttgggaagataccttggggaaggaaatagcaacccactccagtattcttgcctagagaattccatggacagaggagcctgatgagttacagtccatggggtcgcaaagacttggatacaactgagtgactacactttcactttcaggaaaccaataccacagccgtgctcattcatttatatattgtctataggcttcccaggtggcactagtggtaaagaactcacctcccagtgcaggagacgtaagatacatgggtttgatccctgggtcaggaagatcccctggaggagggcatggcaacgcacttcagtattcttgcctggagaatcccatggacagaggatccttggtgggctacagtccacagggtcacaaagaattggacacgattgaagcgacttatccagcatggttgcttttacactataacaacagaaatgaatagttgtgacagagaacattttctatctacccctttacagaaaaactttgatgaccccatatgcagattaaagaaatcaagtccttaaaagtcacaaactatcaaaatgcacccaataaaaataaccagaataatcccattcccattaaaaaaatggatttgcagtttaaaaacctccaaaaagtctcctggcctggatgatttctctagtgaattctaacagacatttaaagaagaaataacaccaattctacacaatccctgccagaaaacagagaagggaaaattccccaactcattttacgaggtaagtattatcctgtgcacaagccagatgaagaagaaaactacagaccaatatccctcatgaacatagaagcaaaaatcttaaacaagatactaaaaatttgaatacaacaatatatatattaagaagaataccccatgacccagcagagtttattccaggaatgacagactgattctacattcaaaaattgttcgatgtaatccatcatattaacagaccaaagtagaaaatccacatgatcatttccaactgagataatagatgtatgtggttttaagctgctaagttttgtgataattttatactcagaaatatataattaatattagcaacacagttaatattagtattagcagctcatctattccccctttatttcttcccctacccatctcattcccccagagaaaatattttggtaacctctagggaaccactaacctgagtgtgttatctgtctcagacttttaaaaatatcagtacttttacttaaatgtatacatgtccaaactatacatggtatattttaatgttttcatatataaatggtatcacactgtgtgcaattcttctgttaagtattcttctcttaatcttgtactgtgatatccatccatgttctgtgtgtagatctgttcattcac

SEQ ID NO: 40523 - DNA, 1728 bp, Bovine  19866880779578
  misc_feature (1)..(1): n is a, c, g, or t
ngccctggggtgatgggcagttggatagtggcccagagtgtatttgccccataaaggaggtggttgggaatatgggctctggattggcatttgaaaagtacacacagggacatgttgtttaccatctctaggaattcactgatcttaggaggggcagtccctccagggtcagcaaggcctcagatgttaaatcattgttgttattcagtcggtaattcatgtccaactttgcaaccccatggactgtatatagtccaccaggctcctctgtccatggaatttcccaggcaattatactggagtgggttgtcatttccttctccagtggatcttctggacccagggactgaaactgcatctcctgagactaccgcattgcaggcagattcttatcactgagccatagggaaagccccatggactgtaatccaccatgaaagcattagaatacacaaaatatattttcaggggactttcctggtggtccagtggttaagactcactctcagggcagggagatgggttagatccctggtcagggaattaagatcccctgtgccttgccatgcagtgtggcttaaaaatgaattggaatacagaaaatataggacatgattaatatacagagagagtttggaggttgaccagcattgttacaaatcttggttttgcttgatttaaaaaaatagttttttatcttttgaggtaaatacaatttatagaggtctgtaatttgttttgaaatcatctagggtggagtgggaaataggtgtaggaaatgtatttagactccatttttttctaaaaataatctaagatgattctctgccagtaaatggttgtacaatgtttcagtaagttacattagctttatgagtctcattttcctcacctcttggataggaatagtaatacttctctcacagataaggtactggagaaatctaaaatagggacaaaattaatattattaataatgtggtatctgcaaatgtcttgtatcttagtgtctgatatgcctggctatgaactaagatgaacataaatagtctgtttcaacaagtatccgtttcagaaacagaattgtggttttggtccctgataattatagtgtgtgttttcacttttataagggtcttgtttccaaagtggtgatatctagactttttaactaacaagttcaccttgtttagttataatatccggttttcatttcaaactctttgctttctatcttttaaaacatgtgaatatgcattcttgattaatcatgtatttttctatctgagaaaccacagatcctaaaatgtatactgctgatatggagtcttatataggaaagattttctggggttgaagaagaaatagcataatagaaaaattatccagctagagagaaagaacatggactcttttcaatgtaaaacatttttttttgagaatcagcagggggcactaagcttccacaggagaaatatatccctctagcattcataaattatttttcttttgctttaacttcaaactgataacaccataaactctgtccttttttatctttactatagctgataatgtattttttctttttaaccctcaaggtatacgtgcatgtaacaaatttaactgccaattaaaaaaaaaacaacactctgattaactcatctgcatgctggtttactcctcattcaacattcaaacgcatgctattttcctctctttgacaaa

SEQ ID NO: 40524 - DNA, 1266 bp, Bovine  19866881188449
  misc_feature (1)..(1): n is a, c, g, or t
natgctagacagtgcaataagcactttatcaaagtgtgcctataattatctgcttgccgctaagtcacttcagtcgtgtctgactctgtgcgaccccatagatggcagcccaccaggctcccccgtccctggaattctccaggcaagaacactggagtgggttgccatttccttctccaatgcatgaaagtgaaaagtgaaaatgaagtcactcagtcgtgtccgactcttagtgatcccatggactgcagcctaccaggctcctccgtccatgggattttccaggcaagagtactgaagtgggttgccattgccgtctctgaattatctgcttaacatctccttatagatgccttaccagcacttcagattgaccaggtctaaacaaaatacaatttccccctacactccctagcacctcacctatgcaccagctcactatcctgacttgctctcaacatctccaacaatacatgggtgcttaagttctataactattaatactctgatattaatgaagcagaaggaatctttcagatcagccagttctacctccaaaatcttcctctacaggatagattttcaactttttagctaccatgtgtacgaatcttctgagattgtggataatgatgtgtccttggtctttctgggaacaatatccttagctgcagaactcaaaagagtttaaacactatgaactaggctcaactgtgcctcttctctcttctataatggccaaatccaatttattaccaaattctgcccattcaaaattccatatctctgtaaggcaaatgtatttctccttcctcgctgccactaacagatcatactcataactcttagattgcttcaacaacaagagcaggaaaccctgctagggagcagtctgtccatggtaggagggcatgctaagtcacttcagtcatgtccaactctttgtgaccccatggactgtagcctgccaggcttctctgtccacgggattctccaggcgagaacactggagtgagttgccataccctcctccaaggaatcttcccaacccagggatcaaactgatgtctcttatgtctcctgtattgatctgtgggttctttaccactaacaccactgggagggcagctggagcttgatcacatgtgaacacccatgacaggatcaggtgggcagagataattaggaaatgaaatcaaagccacatcagtgggaagatgaactgggactaaacctgggcccacactataccagatggcatcagag

SEQ ID NO: 40525 - DNA, 1445 bp, Bovine  19866881361340
  misc_feature (1)..(1): n is a, c, g, or t
ncttcttttaaaatgtggctattaggatattgaacattacatccatggcttgtatttgtggcttgcatcatatttctcttggacaacactgctctagataatgcttgtgagtagctattggtgacagcctgaggagagttgagatctctgtggagaggacagagaaaaggaagtgcatagggttgaggacataattgtggagatgcccgcgttcatagatgaaaggggaggctgagaaggacctggagagtgaacagaaggtgaagaagaaggaactatcttaggaactggaagaagagggcattttagggaggagggtctactcccttcacgcaaaataattccagtaattcaaactttatcctattgcagaggttcttccttcagaaagcgaaatgatcaaatttaaattttgagatggttttggcaacaaggattgggttgagggagaagctgaagtccaggtggccagttagaaattcagggaataagaacccaaagcccttaagcatctaccaagccaaacaggaaagaacagttttcacttggagaaagaactttctattttattttttgccatgaaaaatgaggtgagtgagattttgataatttaaagcatgtgtcttctgcttctagaatccaggaaaatgggttgcaatgaaaatccatgtcataaatgattaaagatcctttgtgcgggaacacagaaagatgtaaagaaaccaaggacacaaaaattgtaggatttctaagaaacaatggttgtctttttgtataaatgtctcacataggaaaaagagaagagaacattattccgcatccttgagagcgtgacagcaggaagaatggtttctaaaaagagttttccttgaggctctgactccgtaactcaagatcatttcaggtacttctgagtgtttacaaattgaacgagctgtgtcttggggatgtcctttaaacagaaaactgggtacataaaatgatttatttggagctccatttaaaataaaaaacagatcgaagtttatgaaagtaaaaaattcagggtaccaagtaaaggtgagctgaatgttttgaaggcatttggatactgtttaaattaatgttttaaattctctgctggtttaaaagaaaagagggaacaaatgatgataaaagaaaaatcaatgagggactcccgtggtggtccagtggttaagattctattcttcctgtgcaggaggcatgagtttgatccctggttggggaactaagattccagggagtggccaaaaaaaaaaaaaaaatcaatgaaagtagttctattaggaaactaaacaagagggaaatgactgattcattaaagatacttggaagatagtcctaggtggggcaccatatacagaatttggataaaacccatgcctgggcagaataatagtaataataatcaccaagtagcagca

SEQ ID NO: 40526 - DNA, 796 bp, Bovine  19866881890685
  misc_feature (1)..(1): n is a, c, g, or t
ngggtaaatagcagcagagtagagagggaaatttagaattaataactccagggttaagtaaatcttcataatggtggttaagaatatgcctgtggactggacacatcttctaatctactatatttcatacagaaagcaatttcttcttcatattgcttttcatgatgattgagaaaaaacagaaagagcttgtttgccaaaatttttgctctttttatttaaaaaaagtgtgtatctgtgtgtgtgtatatataatgcaaattcaatttttattaaaaagaaaagatataatttatatcctctcctcattttatatttcaattaagctaatttctcctccttatcctctgtcttttgaatcaaattcggttggaatgtggagagtaatgtcacctttggtcaaaaatggacatctttgcattgacatagtcatttccactatccttccctgacttctgttacacaaaatgaaaacaaaagctgataaaggtgtttaccagaagaggtggaagtgggaggcaggaggaatgaggagaagagaatggaagagaaaaatacattttaagcattacaatggtattgtttccattacttctttccatgtctgattccactgagaacaatgctcctgctgggtgccctttcttctgatacagtacacttttctcactgaactccattgctccttgttttgtgacaagctttgtgcagagggggagataaacactgccttaactattttgaatttctcaccttgacattgactctcacaatttattcaatttgtttttggttg

SEQ ID NO: 40527 - DNA, 679 bp, Bovine  19866880716478
  misc_feature (1)..(1): n is a, c, g, or t
nctagttatggacatgcttaacattctgatttttaggtaaattatatccctcacaccaccccctatgtacagcatttccacctagttttgaggcttgtatggtaaactattttgaaaaacagttacttggtgtttttatataaaggttccagagtagaaaaagagaagcatctgttaaaaaactgggacatttctagggctacaatctaaaaatctatttctaacactgctttttggcattccgttaaaaaagttttttttttttttttttttaagcaaacatatttagaaaaattaagtggctcataattcccttcagtaactaaacagctcagacaaagctcaaagaacaggcattttggtggtggtgattctaaggcataatggaaagaacggactaatgtaaagggtacataaacaagctcaaagacagctatacagaagtacaaggtttaggggcccaaaagctggaaatctataaatgtgggagtggtgcagaaaaggctggaaggtaattaaaaatgctacttaaatttagccctccaccaagaaagagaaagcagaaactcctcccaccttttcagagcctatcagggtaaggaataggggtgaggactgtgtaactcttaagggttggctggagactctagcaattattcaaaatatttaattatctaat

SEQ ID NO: 40528 - DNA, 867 bp, Bovine  19866880863642
  misc_feature (1)..(1): n is a, c, g, or t
ncatggaaacttacaaagatccatgggtgaatggcgtcccattttgaccccttaactaagatccactgagtactcacttacacttggaaggacttggaagtctcgaaggcagggaagccgtgtccctccacccaggtgacaggagatgtctcctctgttgcaggactgacagctcctttagcttcatggcattcttcttcaccttcatggcccagctggtcattagcatcatccaggccgtgggcatcccaggctggggtgtctggtaagagaccagggtgtctgggactgacccagggctagctgggcggcaactggggtgggtcctttgcttacttctgtgggctaagctgcctggcctgtgggaacaccatgagttattggaagtgtgaagggattcaggataacttagtagatacagcatagcatcagaggagaataaggcagtggtttttaggggtgatgagggatatcaagcatcatgagataacccaagagaaggaagccttatgctctgagaagcttgtttcctgagccaagggttcttcctaaagcactgacacaggccctgtccatccattgatatggtctctctctgtggcaatgagaaggtcccttactctagtggggcggctcctgggtgcccgtcactgtgccaggcagccccacagctggcctgtctctgcagcggctggatcgccaccatctccttcttcgggacgaacattggctcagcagtggtgatgctcatccccaccgtcctgttcacggtcatggccgtcttttccttcattgccctcagcatggtatgtggccgcctctggagctacagggtggtgttgggagggaccgtgatctgtaacgacc

SEQ ID NO: 40529 - DNA, 1247 bp, Bovine  19866881015156
  misc_feature (1)..(1): n is a, c, g, or t
ncgggggaactggtttccagcaaattggtggctccccacgtggacagaatggaatgtgttgagcagcaagtggcaggatcctgacgaggcgtggctggagcagtaagggtttacttgtctcctcagtgagaagccccagggtgcacagtccaggctggcggcatggcctgccgtgtttttagggacccctgtcagccccatcttcctcttgtgtgtatcacaagatggcatccttggtccagacttcttgccagctctaggtggaagggagaaggggcaaagggagggacttgtgcctttttctctctggcatgactgtcccagacccccagctgccagggaaccgcagtggggagtgtttggcatcgtgaccttaaacaaacccagcgttctgttaggcaggaaggagagggtggggtggggcagggagaccggaggctcagggaaggggtgagcccctcttatgtgctgtagagggacagggggcaggcagagccttctggagctggtcctgtcactgggcctcacaggtgtactggggggaggagcacagccgtgcaaaggcccagaggcaggcagtacagagggagtgaaggccaggaaccgtgacaaagctaatggggggccgtggggccataggggagtgcctggctgcgtgaactgatggatttcttctttattgtttctgagcactgaccctgctggggggcggggtgtagacacagggttgcactaggctgtggttggatttagcgctagttgtggtctcaccaaggcaggtgttatcgttgctcccatttacagatgacgacactgaggttcagagaggccaagtgagctgcccaaggcttcccagttaggaagctgcagggctagaccgcccccccctcctccacagaccctgcgcactctgctgcctctgcaggggtgggagtgaacgccaggaaggcagtgagcagggggcggtgggggcctgccttcatcctgatggaggcagcgaggcccagttctggaagggttctgagcagggtgggtgcagctgtgtctttgggtgcagggtggttcgggcagggagtgccatgggtgccaggcccaggatgagcccccatggcctcccaggcatgcagaggcagagtgtgcactgcacggagcggcaggcggggcctgtagacgagaggcactgtgaccccctggaccggccggatgaccgccagaggaagtgcagcgaggagccctgccctgcccgg

SEQ ID NO: 40530 - DNA, 681 bp, Bovine  19866881141917
  misc_feature (1)..(1): n is a, c, g, or t
ncgggcaccaccttcacctatgcccgcacaggcaactgggagaacctcacgtcccctggccccaccgacgagcctgtctggatccaggtgactgccttccggggccaggcccgggcagggcagaggtggagtgcgtgggacccagccccgtggcaggagtgtgccctggggcagtcgcggagcctggctctgaaacggccccatggggtagccccaggtcccggaggtagctgaggtcggctcctttaggatgggtgtcagggctgggttgcgggagaggccatctcgtgctcacaggactcccgcctgcctgccccagctcctgttccaggagagcaaccccggggtgcgctacgagtacatcatccacagggaggcggacggccacgaccacatccagccgcctgagttctcctggcgctatggaccctggtccaaatgcactgtcacctgtggcacaggtgagggagagggctgggcacggccgctgcccagcggggcctttgtctctgggcggtgaggcccagcttcagcctctggctcattgcttgtttgcggggcctctctgagctcggaatgctgcttctgggcctcagtttcctcatctgtataatggggctagcagtggtcctgtctcatggatccactgggagagtaaccaaggtgaggcaggcaggcaca

SEQ ID NO: 40531 - DNA, 1406 bp, Bovine  19866880072074
  misc_feature (1)..(1): n is a, c, g, or t
ntgatgccatccagccatctcatcctctgtcatccccttctcctcctgcccccaatccctcccagcatcagagtcttttccaatgagtcaactcttcacatgaggtggccaaaggactggagtttcagctttagcatcattccttccaaagaaaccccagggctgatctccttcagaatggactggttggatctccttgcagtccaagggactctcaagagtcttctccaacaccacagttcaaaagcatcaattctttggcgctcagccttcttcacagtccaacgctcacatccatacatgaccacaggaaaaaccatagccttgactagatggacctttgttggcaaagtaatgtctctgcttttgaatatgctatctaggttggtcataacttttcttccaaggagtaagtgtcttttaatttcatggcttcagtcaccatctgcagtgattttggagccccaaaaaataaagtctgccactgtttccactgtttccccatctatttcccatgaagtgatgggaccagatgccatgatcttcgttttctgaatgttgagtgttaagccaactttttcactctcctctttcaccttcatcaagaggctttttagttcctcttcactttatttgtgtacaatttctagttctttctacagtggacatgtattattgagtcttttaaaaatggcagctgtcctttgattttttttttatcctgagctcctaacaagacctttgccttataacgatagaattcagggtaaggtccaggaagatggaacccattgagttggtgtcacacaatggactctacccaagagataacaaatggtacagtaaccagctggcccaggaaaaaaggatctgcttaactcaggatagtcagggaaggcttcacagaataggaaatattttatctgcaatcatgaaggaaccattaagagttcaaaggcaaaaatgtggaggaaagaactgggcaagtcattctacacttttgagtctttgcctttttgtctgtaaaacgggggcagtagcatgtttcattgggtttggaggccaattaaataagacaggtatatagatgttcccctgccccccacaaccccagttgtagcacagtatctggtgcatattaggtaatgaggagctaattttcatttttgcattaaagataaacattctggaagggcactagttttggcttttaaggagttcactcctgttctcatcttttcactgttctcatcttttcagcaggccgaggacactggctagtggctcggaaaggtggcctcaagaagaagcccaagaatgtggctgagacaacagctgaaggtcaggaaggccagaagatttcctttgaggtggagggaagaaagggtctcgacaggaaaaccaag

SEQ ID NO: 40532 - DNA, 732 bp, Bovine  19866880358812
  misc_feature (1)..(1): n is a, c, g, or t
nccgtaagaacttcgactcccctctcatgtaggccagtggtctgggccccgggggattgtccctcctggtcaaagggcatgagaatgaatgggctccagggaagggaacatctgtgggtgggaacctcctgctcagggcttccacacccttctgagctgcctggtcacctcgcactgaccctggccatttctgtgtcctctgtagactgcactccttgagggcaggagatatactcaactcatttctgtatcctgcagggcccccagctcagggcctggcacatagcatgaatgaatgaatgatcagtgatcaatcctggggtgcagagacagggccagactgtttgtagtaaatgtaatttaatctgaagctaattaaactccccctgctttggtcagagctgggcctagggtcaggtcaggcagagctgaaccagcagtgttatcaggagacagagactgaagtcaagcaggacctgagctggaaagtcttcccctccgcctcgggggttccaggcgtggccctgctgcacatttgtaggtggccttcagtatgtcatcctcacccttgggcttagtgcatctgtgcactggggtgggaaaaagccctgctgtctcgatttccctaccacctccccagcaaacttctctgagcctcagttcttctgagtgtgtaagggggtctaggcttccctgatggtgctagaggtaaagaaactgcctgccaatgca

SEQ ID NO: 40533 - DNA, 1249 bp, Bovine  19866880440296
  misc_feature (1)..(1): n is a, c, g, or t
ntcctcatttgtatttgagaaatctgaggcacaaagaggtaaagtgatttgcccagggtcactccgctcagtggtagaaactagcctcaaacttaagtccctgtctgtaaaattgttgcctcttcctgtttcacccatctccttgtcatatgtttctcttctgggaaacattttctaaggacacctgatcccagctctctactctgctcctcccatggactgaatcttcccagaccctccatcttagggtcctaccttcttgccagggtctcctttcccctggccaggggcttaaaggctcctaaacctctgctaccccaaattgtctaaagctatcccaaagcaggtttaggaattactgctgctactgctgctaagttgcttcagtcgtgtctgactctgtgcgaccccatagacggcaggcccccaggctccgccatccctgggattccccaggcaagaatactggagtgggttgccatttccttctccagtgcattaaagtgaaaagtgaaagtgaagtcgctcagtcatgtccgactcttagcgaccccacggactgcaccctaccaggctcctgcgtccatgggattctccaggcaagagtactggagtgggttgccattgccttcttctaggaattactggatccctttaatgaaaaatctcagtctctaagagctcagggtttaaagaatttagatgttcgattagaagtttcttttcctaaaggaagtggcattggagcctaatcttaaagcatgagatcagcgagatgaacaagatggaagagctgttttgggccaaaggaacactaagaacaaaggcatggacctgtagggcctcagagaaagggtgtgtgttgggggtggtcctggtgggctcataggctgtgctggggtgagagcagccctgcccctcctcactccttacttccttgttttccgtgcttggctctcagggtcatggcctctgcagaactctataagctggatgatgggaagcctcacctgagcaactgctttccagctaaaaacctgcttcggacaccagaggaaggtcaggtgacttctcaaatcagaacctttgcctcacactcagcacctgcttcagaatgtctctaacacccatgtcttcctcttcaacccattcactaatgtttcctgccccatcctatcacttcccttctaatccatcttcccccccagcagcctcagggagtctaattttttttttatcctattcatgt

SEQ ID NO: 40534 - DNA, 3351 bp, Bovine  19866880463938
  misc_feature (1)..(1): n is a, c, g, or t
ngtagctcaaatggtaaagaatctgcctgcaatgcgggagacctggctttgatccctgggttgggaagatcccctggagaagggcatggtaacccactccagtattcttgcctggagaattcccatggaccagaggagcctggcgggctacagtccatgggcttgcaaagagtctgacatgactgagtaactaacactttcacttttgtgtatctgtttaaaatgtcttatttttatacaatttttcaagattacttttcgtttacagttattacaagatgttggctatattccccatgtacagtacatccttgagcctaacttatgcccaggagtttgtacctcccacccctacatggcccctccatccctcttctgcgcttggaaccactagtttgttctctgtgtctgtgagtctgcttcttcaatttttttattcactagtttgttgtattctttagattctacctataagcaatatcttatatgggcagtttttctctttctctgtctgacttatttcacttagtataatgccctcaaggtccatccatgttgttgcaaatggcaaaatttctttttaatggttaagtagtaccccattgtatatacgtcccacagattttatctgtttatctgttgatggacgcttaggtcgtttccttgtcttggctgctgcaaataatgctgctttgaacactggggtatgtttttgaattagtaactttggttttttaaaattatttgtttacttttggctgtgcggggtctttgctgctgctcggacttttctctagttgcagggcgtagcggctgctctttgttgtagtgtgtgagcttctcattgcagcagcttctcctgttatggagcgcgagttctagggcatgtgggcttcagtagctgcagtgcatgggctcagtagctgtggttcccaggctctagaacacagactcagtagttactgtgcatgggcttaggtgctccatggtgtgtgtgatcctcccagaccagggatcgaactggtgtctcctgcactaggaggtagattctttaccactgagctactaaggacgcccagcgactttgtcttttttggatatatacccaggagaggaatttctggatcatatggtcatgctatttttaattttttgaggaacctccataatgttttccgctgtggctgcacgaatttccatgcccactaacagtgtacaaaggttctcagggaaccttctcatgtacaccacagtgttctcatctgttcagtgaattctcactgctgttcctttacctttctactctaccccaggccttgatttatgccctgtttcatagtgttctattttgacatagctttaaaaaaaattgttaatttttttaattgaaggataattgctttacagaattttgttgttttctgtcaaacctcaacgtgaatcagccataggtatacatatccccttccttttgaacctccctcccatttccctccccatcccacccctctaggttggtacagagtccttgtttgagtttcctgagacatacagcaaattctccttggctatctattttacatatggtcatgtaagtttccgtgttactctctccatacatctcaccctctcctcccctctccccatgtccatgagtctattctctattcacatagttttttaccatttgcctggaatgttccagcccttattccagttgtccagactcctcccatcccacaggctcagcttgtctcccacaccttccagtaagccgtgtccagctactccagccctcagtgcccatcctctcttgtgagccatcttcctttttgtgtttcttgtttgatgtatagtcatagtctgcctagctcctaaataaagtggcttaaacttgactctgctaaatagtttttcaagcatttatctaattaaagactcccctggggcagggacccctcctaatgctgagcagagtccggcacatggaacactgctgagaagtgtggtttcactggattggatttattgctctgaaagtgtagagcaagggaaaagtacccctagcttaccctggatcagtggcttgctggtcactctgtacatggaatagtggaagaacctactcctttagcttgtcctccccacttctcttgagtgattttacttttcacataggaccttctgtggccacctagttgtttaaaaccctcctgtggagctgtcagtaagaactcatgatttcatgcccacactccctcgcacacacatagatggacagagaaataaatacagctgtatatatcttcatgtgttagtatacatatgtatatttcctggcccacggagggcaataatacctcagttgcaaagggatgcttggcacctcagtgttggtttctaaataccattctcgaatacaagaagccagggcttctcaggcaaaaagttgtttctagggctgagtcaggaaaaaatacactttgagccagaaaataaagcagtgctcagaaaaatgatgagggcaatttgaaaggacataggtgtcaacctgagggaatgcccagtggggaaagctggaacagtatgagcagcaaaataaacaaaggtaatattgggttgtaatctgtagaataagttttaatatatagtcacgatctcatacaatataattaaactctgattacataaataagtgggggagaagagcagctcttccttacaatagaattctggttaataaatgtagaggaatgaaggaaacagaaaatcactatcaaaacatcacaataataatttttacaggcaagaagctctacagtgttctttagagaaatagaaccagtagaatgtgtgtgtgtatgtctctctgtatgtatatcctgcatgttttgttttcatatacatacatgtgtgtatatatgtggactaacacacacagataaattatatatttcaaggaattggtttatgaaatgtggaggctggcaagtctgaaatctgtaggacaggcaggctgaaaactcaggttttcatgctcatgctgcagtcttaaggcaaaatttcttcttcctttgggaagcctgttttttggcttttaaggtctcttaggtgaatgggtgaggcccacacattatccatggattgtttcaggtacttaaagtcaactggttgtcagaaacacctagattagtatttgattaaccaactgcttaccatagcccagccaagttgacacatgaaattaaccatcatagatgctagaattcatgggttaaagtatgatgaaaaacaggttatttatatagtcttgagctgtctttactaatttcaaagagacttcttagtaga

SEQ ID NO: 40535 - DNA, 844 bp, Bovine  19866880516387
  misc_feature (1)..(1): n is a, c, g, or t
nccctacctcccaagcttccagatgccctaattggcctccagaggggaaccgaatctcatagaagggcactaattaattcctagaaatccaaggtccccaacatccttcctctcactccaccctaactcccctgttacttgttccagacaggaaaggaactctgcagactccccgaggaaggagaggccttgggagggcgtcatgtgtgtgctctgtgctgactgttgtaatgaggccccaggagacccgctgcaccaaggcagacctggaacttggaaaatgactgctgagtaccttccctgcacctgttctggctgacacccatccccatctttgcccacatcataggcacttgtgttctcacctggcttccccgtgggcagttaattttggtgtctctgctcaaattgctctagctgtcccatggttccagggttctggaggcatggtctgtgccactacactgccgaagtcttgccctcacagaggcatttccatcacacacttctgctcatcttccaagccctggggcaaacagtcctctgtaaatcttagccaaatgtcagacaggccacctcaccctccctgggacacccatggtttgtggctcctggcagagctcttaggactgtgggcctggaagcagagctggtcacttgcatctcactcctcctggccagaccccaggtccacagacaagtagaagctgaggcaaggaggcctctgtctcagttctgctctgccaactcctttactccaaagtgatgctctgcattccattcatagaagttttttttttaacagattctatagtgaaataacggaaaaggcaatagcacccca

SEQ ID NO: 40536 - DNA, 2510 bp, Bovine  19866880623097
  misc_feature (1)..(1): n is a, c, g, or t
nctgtctctgcttaaatttctttaaagaaataaaacactatagagaattgatatccctgcaacatatccctaccctccctctcataaaaaacagctatcctgaattggtgattatcccacatctctttaatacttgcattacatgaatgtgtatccacaagccatatatagtttttatttatatgttttaaaattttatattaagtaccatcatactgtagataccattctgcaatctgccttcttcactcaacaccacatgtttgagattcacttgtgttgagatacacagatcttttgagatttacttacattcatacattttaacttctgtgtggcattctacaagcaatctctctttatatgatatggaaggcctacagatcaaaaatacgtgctataatatatatactggggatggcaggccacaaatctagctccaagctacccattagccagtgcaaggaaagaaacatgactcattatataagtcacagagtctgtgagctaagaacaaaccaagacttccctggaggtcaagtaattaaaatccaccctcccaatgcagggggcacgggttcgataggtgctcagggaaagatccagcatgccatggtcaaaaaaaaaaaaaaacagtcatcagtatcttgggagaaccaataccattcctggcactgaaacctgagagaaatttctcctgtaggctcttctgatgggaactctctgcacacaatgaatcataccccaataagattctatgcacattcaaaccgcttccataaggttatttatttcctttaactcacctcacatgggataatggcaataccaaatctatagcaaaagacagtgtctgtgaatgttgtttccacccagtgagtccctgtgtgactctcctccttcctatgcccagattcccagttcccagagactctggaagttatgatggtcaatcagacaggagccacctcaggtgtagctcaccacaatcacatctctggtggctagtcgtaccttggagaacttcaggccgctcacgttaatgctgcagaggtctgatggatccttcacacagtggtgcttcagctgcaacacaatgcaaagaatcagcactcagggccccagcaaagctcatataattggccaagacaacaaatgactccctggtgaggagggcagcctggtacagtggaagaacaggctttggagctgctcagaatcaagctgccacgtcggctctcccacctctgtttctcatatgtaagatgggggtggaaacatggactttatggggctcttaggaggctgcattcctctctattccttctctgtctttttagagctccacttcctctaactgattcttagaataaaatctttatttctggggcactaccaaaacacttgtcataacttttatgtttgctcatctattcatttattcgccaaatatttatatactactttgggccatgtgtcatgctaaatatatcaaggaactttctccggggacttcccttgtggtccagtgattaagactctgtatttccaatgcaaagggtgcgggtttgatccctggctgtggaactaaagagcctataggccactcagtgtggccaaaaaaaaaaaaaaattactttctcctaatcttaactaaactcttcgacataagggaatatatctcttcataaatgagaaaaataaggctgagagagaggaaatgacttccctaaggttccacagccaataagtgatggatctatgatttgaacccaaatctgtaatcactaaacactgtgctcttaggactaccatatattgtccttgacaattaaaaggtagacaaaaagtctcaactttgaagttgctatttctatttaaccaaacctcattccttctttcagttaatcatttagttatggtgccttttatggttaggcatggaactgggaacttaagacaacaaagaaaagcagaagtatttcatgccttcataaagcttaaaactgcatggaagccaatgagcaagcaagtatttacaaatacagtaagtattttaaaggagaaattcaagaagccatgggagacagtaatgggagatccttatcttagtgtagaagtgaggaagtacctatttgaggaatatttcagccgataccttaagtgctaagtacgagctggtcccatgaaagtgggtggcagggtttgtgaatgccattcaggcaaatgaaagcaaggtgtttctgagaggatgaaaaacaggtaggtaaggttatggacgcgcttattagatcatgcggattcatggtggctctgcaaaggattgtggattttagcccacagtcaatggaaagctgtcaagaggtttttggcagagggctgatggcaattttacaaaaactgctgtatctgacacacacagaggatgagaagacagaaaagggggaaagaaaccactataccagacattgttagctcatttctctagagccattctctacttctcactg

SEQ ID NO: 40537 - DNA, 815 bp, Bovine  19866880699120
  misc_feature (1)..(1): n is a, c, g, or t
nacctcgtttctgactccaaccctcttgataacctactttctgttccaaaggtttccaataggttctgactagtttcaaattaaaattatctttcctataacccaaagattaaagagaagaagggaggcaaatcttctgagaagaatcaaaagtaggtgatacagtaaatcctttgtgatctggataagtgagtcattgttctggaccttagcttctgccttagtaagaagaagaagctggaatagacaactattaacgtcctttccagtttgactattagatgtctagatgtctccagactttgaggacagttccagaaatgttttcaccaaagacaacatcattggaaaaaccgtgcagcctccagctgaggccacctgagggggacaatgtacactgggatatgtaagatctgaaaggcttgttaaaatgccagtcacatgactttatagtaacagctcatacatgcacagggaatgccagtccaccagagattccctaaaattctatcctaatccctactctcaatgagcccagatgggcagaagcaccaagcaccaccagagatgcaaaagacacacggtgtcacctgctaaggaaaataaaccccaaaggtccatgggactgaattgaccagctgcatccagctagacaccgtgtttccacagtagggagtctcagtactgttcttgcctgacttctgggcaaattttttggattttagaacaacactgcagataactcttgtccaaaaggagagtaataatgaggtccaatcagtttatctaacagagggaaccccaggaaaacagaa

SEQ ID NO: 40538 - DNA, 1074 bp, Bovine  19866880731753
  misc_feature (1)..(1): n is a, c, g, or t
ntttggggagggagagagaactggcattattgtccctgattacagatgaggaaactgagcttcaaacagtaagatcagctgcccaaggtcatgtagcaagataggtcctcagaccctagtcctgggttctgtcccctgcaccacacacccctcttgtcacttgaatacccagggtctcagacaacttcttccaaagaaaaaaaagggcagaaggttcaggtgcacccctgccctggctctttttatttctgaactttttgccttggtaaacttaaccatcgtctaaccaagactatcacctctaagtcaatgacgccaatctgtgcttccctctgaggcccgagatctccagagcctaccaggtctcttcaggtattgttcatgcttccacctgctcctcattcacccagcttagaaaactcagcattagcttagtttttttctctttcaacttctaaatccagttggccaggtcctgggcattttacttaattcctttattcattcagcagatactgattatgtgctgtaccttttgagtctactctgcatcccagtgttacataatacacagtcctgtgttctgtcttcttttgcttagtgtaagatttataaggtccgttcatgttatggcatgtgttaatacctcacccctttttttggctgaataatactttgttgtatggatatgccacattttacttatctgttcatcaattgagggacatttagcttgtttctactttttggctattaggaataacactgctatgaacatttgtgtacaaatttctgttttgacataagctttatttcttctggatatatattactacctaggagtagaatttctgggtcatatggtaacaactatatgtttaacttcttgctggtgctgctgctgctaagtcgcttcagtcgtgtccgactctttgtgaccccatagacggcaccccaccaggctgccccgaccctgggattctccaggcaagaacacttcttgaggagctaccaagtggttttcgaaaagggctgcaccattttgcatttccacggcaaggcagagggttccac

SEQ ID NO: 40539 - DNA, 955 bp, Bovine  19866880757888
  misc_feature (1)..(1): n is a, c, g, or t
ntggtgagaggtctggttcgtggagaggttggtaggttgctaagttgagatctgaacctcctctggcctgtcagtgatccacagtcttcctcatttctcagggctttatgctaaaagcagctcctggagaactatacttgtcctataatcgtgggaggagaaagatcattctcctctggtaaaagtacttcagaaacagaaagcaatattgcagtcaggttcacagaactgaggggggtatctaaaatgtccaagggtgctagatggtaccttgaatgggccacccaagatcatcactatggccctttacgaaaccattaacgaactctccagccacacatacattcaaatacattccaggagacgctgagttcaagagcacggattgtcctttccttctttatatccatgacccagcacagggctggcaaaagttcgaaactcaggaaatatctgtcaaatggaacagaaaggatgagcagcacagccttcggtcatcagcatcaccagtcaagccagtggcagctttctttccatcttagtcagtttgtaatcacatagcaattaatcaagcagctttaatctcttaagggcatttttaagagaaaatgaacaacaaccaaaaaaacacagaaggcattcatcactagtgcttcctccaggcaaaaatttaaggattccatttaaaaaaataaatgaagccatttacaaaaggttttcctgggaagtttcagccaaaaagaatcaaccttctaaaaagaggcaattatatgaaaggggccaggggctggatacataatccccaaacttgacatcaacccaacaggcccagataacttcttccagcagatacaatcaatggatcatgaacatgttcccaaagtatctttcccacttgttaaaaaaaagggcttcgagccccgttctcaggaaccgtgtttcttggatttcccat

SEQ ID NO: 40540 - DNA, 2780 bp, Bovine  19866880863931
  misc_feature (1)..(1): n is a, c, g, or t
ntttaaacactctaaccgtaacaaacaattactcttacgggtatgcagtcctaaagttacctaacatgctaggtttgggtctggactagtcttagcaagagcaatctcaaatagtcaaaatcagtataaacctagccctgagccaagagttttaagtcttgaaggcataaacatctcagtcaaaactaggggacttccttggtggtctagcaattaagaatccatctgccactgcaggggacacaggtttgatctctggtttgggaagactgcacatgctatggagcaatttagcctgcatgtcacagctactgaagccctcatgctctagagccctggctccacaacaagagaagccacagcagtgagaaggctgtgcactgcaaccagagagtagctcccactcgagaaagcccacgcgccagcaatgaggacccaacgcagccaaaaataactaaataaaactcctagaagctctgtaaatacttaactgttgtgctgaggagctgaagagggacgtggacctcaaatacctgctgggactggagtgggggagtggggcacgggtctagaaatcaagtttctacctataccttaggtaaagtagaccctcctccccgcttaaaactcagctagtttgacctcagtttcacaggcaggagagctggcccaggagccccctgaagcgggtgttccaccatggcctaagtgcaagcacctgagggcggtgggcacatgtatgcacatgagacaggacacgaggctggggcttgccattacacataaagactgaattcctagttgtagcttttactatgaatgggagatttttctccttgcttctgtcattaagaataaaaaaaaactgtgatctatcataaaataaactcctaaatctgtcaaacaacaagccattctagagatcaaatatttttctaagactcacagaatgttcctatgattcaaggaatagggaaaaatcagaccaccatcaggaataaagcaaatgaaatgagtatttaactcaatatatgggctctcagtctattcaccaattcctacccactggacatttgcaggtgaagaaactttgaagttaatccaaaagcctgccttttccattttggttccaagttggactacaagtttcagcaaggaaggtgatagggcaaaatttaagaagactgatactctctgtgccatcctaaaccctccctttttagtttctcttaagtgttctcccctgtcttatactgttatatagcctgtgtcaaacacctgttgacctcattatggaagtatttcaataacacccagaaacgggcctaagaagcacatgtgaaaatgcaaagatgttttacataacagacatagaaatctgagatctaaacagaactggctagcccatttaataaattttttgaaataacaaagtgattaaccagaaggcaaggctacaaataaatacaataaacatatcaccacacatttgtatgcaagtccactcatctcttaactaataaacaaaaaccgtaaaaggcaatagaaacactatgctttcccatttccctgggtgggggaagagggggtgggggagttctaatcaagagactctctgtaaagctaacaacaaacaaaacaaaacaaaacaaaacaaaaagttccaatctgattaaagttagtaatcaattgtacttactgtttggcctgattaacatgaactcctagtgtatagctcagccatttgtatgtcacctgtaagaaggaatttttaaaaaaattttattagatgactgcagagtataggtcagcccaaagggctcctaaagattctaaggcaattacgccttataaattacattaaatgccaccctagttttgccaagaaccatccatctgggcaggcaggactcagacatttattttacaaagaagtctgtatcacagaataatgcaagaatctaaaaaggttgaatatacacagaaaaagctctcagtttccttacactccctgtttcaccctggtccttctttccacatttctctctttttatggggccaccaccaaaaactatcctcaaactcactcagaaacttgttactttggagtgtacaactcagaaacttccgaagaaagttgcagccacataaatattaaagggcacaggtggtgcaggggtcagggaatgaatgagtgaagtggatgaatactctgtcagaggttagactgggaattactggcatcaagctttgctcttccttccatccttccttgaactgtcatttgccacttccttgtaacctgtcaccctcccctcaaagtcttccaattctaaacgctgagtttccagtaattagaagacttagcacaggttgggcaaaggcagtgtgatgtagaggaaagcacgagcagaacagacatagactggaaaactgattatcccttgtgtgtgtgtgtgttagtctctcagtcgtgtcctactctttgtgaccccatggactacagcccagcaggctccgctgtccatggaattctccaggcaaaaatactggagtgggttgccattcccttctcccagatcttcccaacccaaggatcaaacctaggtcttctgcaggcgggttatcccttactaaccacaagttatttggcccctctgcttcaactaccttttctaaggctacttccgccgacctctatgggtcactgtaaaaagtaaaagcaataatgtatatccaaagctcacagtaggcactcaatcatcacgatgtgcgaaacg

SEQ ID NO: 40541 - DNA, 1718 bp, Bovine  19866880966834
  misc_feature (1)..(1): n is a, c, g, or t
nctttgtggtgatgtccatctaaacaagggaaatccccagtcctcttctcccttccatttgccgtcacagtggaaaaggctacccaacagagacagcctcaaggattccaagggcctagaggcctcagctttgcacctgagccctgctcccaacacacacacacactattggacctgtcccccacctcccacacacacacacacttggctggcacacacacacacggctgtgggcaagttaacctctctgagccttagattctgtgctgcttctctgctgcatcgaccattttgtgtcttagtgcttaccccagctctgtgggattaccgtgttatcacctgtgtgactcaggcaggtttcccatgggactcttcaggatgtgtatcagctggggtttttttcccccacaatggaaccacccggcccaggctccaaaaaggactgagggctaccttgctctatgcactcactctttattgctgttggacaaagtgctgattcctgcctggcccaggaaggggaggtcctgaccagctccccctctctgtggccagcaagcaaggctgagcagagctcggagacccgaacctgtcccaaggggtggtcaaggggtgtggcacccttgtgaagggtgcagggcacaggctagttggcacccatggccccatgcacagccctagcctttcaagtcactggctgtgggctcctggtagaattcatccatgaattcgaggaagcggcccaacttaggctggctcccgctcagtgctgggcgggcctggggtggcgctgtggtcccaaacactgaccgcagcgagcagcgcaccagccgccggtagcgcgcacggaactccttcagcagctttttggcctccaggaactgcttctggttcaccagccgctgttctgtccgctggcgcaggacggctcctatagggagaaaagccaggagggacacccagatcacctggggtcccacctatcccagagcagtagggactgggtccagagtcccccataaagtgggatggagtgggaagaggatggtgagggcctgaaaatggcctctccagctcgggcactagaaggccagagggatggccttctgagtctgtctcaagccgttggaaacatgctgtgtgacttcaggcagctctctgctgcactcggctcacttcctccatctgtacacaggaaggtcgggcagatgctctaaagggctcttcctgttccgacacaagccctctgccttatcccagaaggggagcaaatgtctagacctcagagcctggctgatgaggacggggggcctgagccatacctagtggtgcctctgtaatgttctgggtgtcccgcatgcgaatgaggatgtcatccagcagctgggctcgagtcttccgtcggggtggaacagggatcctccgggtctgacaggaggtgagagagcagagtgttagcacaggctcagactttcgtggcctcacctcattcagtcacaacgacaggcaggggagaactaggggcactagggaaaagcatggctcttggaggtcccaagtgacagccatttctgttccttagggtccccaggggcagttcacatgcacagtgaggtggaggcttacccgcttctccttgggaacatagtgcttctgcagagtatccagcctgggcttgctggagcggtacacgagtgggtgtttcaacatgtgctgca

SEQ ID NO: 40542 - DNA, 972 bp, Bovine  19866881022180
  misc_feature (1)..(1): n is a, c, g, or t
ncctgtgatgagaacttgctcctacctgtagaagtcccttccaaccactttttcacctgacttctactcatccttcagttgtcagctctaagcaggtggcaccctctcagcaccctgggaagatacactgattgagcagtatttcaattcaaggcatttccggtgccttgggatcagagttcaccctcagtcagaacagactcagtgaagatcgggcaggggacttggggtgagggtgggcatcattagagggatacagagcctgctgggagcctgggttcatcacgtgcatgcagtgggggggttgggggatgacagaccaggcaactgacagtttccatccagtggcatgagcactgacagaagggtcctgtgtctgggaccttcccctctgaaactgggcctctgtcgaccctggctataagcctcttcacctcccttcccccacatcaatcccccgacgtttgccctgtgtctgcagatgcctgactggggagagctctgacctggatggagccccccactgatcccaggcacctgtgaggagaagaacactgatgaggaggaggggaggaacaaggagggagggagttcttctcaaaaactctctgcctccctaagccctgggagccagagtttggacagagacactattaacacaaaatttgcaaacatggcttctaaaaatagccccagctggcaaggcccacctggcacatgctgcacctttgcggctgctggcctgctcccctcatagcgccgccttggtctgtcagcaagcgtgtcactctgccctccccctacccagcgtgagggcagccacagccctgggtccaacccaagggagaagctgaggcttgttccagtctgatgggggctacggggatgtgcaggcctaggggaaggatggttttgcctataaggtggttggaggagacagtgcagcctacagggagctccccaaatcagggt

SEQ ID NO: 40543 - DNA, 1224 bp, Bovine  19866881040194
  misc_feature (1)..(1): n is a, c, g, or t
nccttggagggcctgcagccccttctgggagttcgcagccccccactgatccaaggttactggtagggacacccatggggacaaatcacagtcctcctttctcatcactggcagaccattccccaaccccagcctgggaatggctctcctggttcttcaagacttagctcaggctaaggtaacaatccctccaggacgcttcctggcctcctgggctattttagagctttctgtgggctcacccagcacccttgtgctcccgtctattacagcatttatctcagtgtatggtcagtgtctgttttcatgtctgcctcctctcaccccaggcttgcttcttgccctaaacaggatccagcatgggggcccacacacacctcagaggtgttaacggaatgcattttcttttccttcttgggcacaggtcagtgggttgtcttcctccatcttccagagggatgattcagagataaaggagaaagaacaaagaccaccatccacagcacccagagaggcaaagaggactcagaagaagcccccatctgcctctttccccaggaagtaccatggctatgaggagctgctgacagccaagcctgaccccaccttcgttgagccaaaaggtatgtgaggagaatgtctctagggcagggagccctctccatgactcagagcaagtgagggcaaagccaaggctggtgccaacactcttttccaggccagggtgctgttttccatctgcccctcggagtgtcctggtttagagccctacttgtcaggagccctggcctggaccttcattggttttgagggaatcacagctgttcagagattccagccattctggacctacctgctttggttggaagtctctccaggaagggtttaatgaataaacacccagactagtcagattccccaggtcctcccccagcccaggtaatccctaaaccgaacatccagaatcctccctgtttggttggagacaagggaggcagcatcttctcacaccccttattttggactgatgtgttttgcactggtgcccagctgtgctcttgtgggtgtcagtctctgcagtgtgaccctccaaggttaatgggttacctttccccactcttgtgctgtttttccattaggacctgttcactgaatgatggtacctctggcaccacaacagatcaggccaggatatgggaacagtgtcttctggctagaaagggt

SEQ ID NO: 40544 - DNA, 716 bp, Bovine  19866881040384
  misc_feature (1)..(1): n is a, c, g, or t
ntggggggactctagaaccaggcccccatagaattggggtctatcggcagcatctgagggacttggggccacaccacttcactactgagtactcaggcatgggcatagaggcctactgtgggcctcccaagacaaatcacacagtggatcagtggctggactgggatgaggacacgaacctccccctctctcacccagggcttctttcctgctgccaccagcctcctgtgcctacgcagcagaaggcagagcttctaccatgttggcccctggtcaagcctgatgccagtgggagcacaaccccccccatccctgcctccccttggtttcttagcacatctgaggccaatcagccttttcaaaaagaactttgtgaaatatagccaaaaaacaagaaggaaaccataacagaaaattccagacatatcatgcggtccagttgaccaagtccaagttttgtgatcagtggagctaattcatttctccctccctggagttcacacatacacaatttcctcaccccaaggggctgtagctgacatccccaaaatacactctgaattccttccttctttccattatcatcacttcccctagtctaagccactttcctctctcacctgggctgctgtgtgagcattctagagtctccctgtaccccttttctctttttaaaatattttttggtgttgaccatttttaaggtctttatcgaa

SEQ ID NO: 40545 - DNA, 1146 bp, Bovine  19866881096998
  misc_feature (1)..(1): n is a, c, g, or t
ngttatgttcatcaatacacaggtttgtagactgcaaatttatgtcaggatgtaggaaaaccacagagtagtgtgttagatgggtaaaaactgtacaaggtggccttcacctccgataaaaggttattatattaacattcacatattagtcaaaggaacctaagaacatgcttactcatagcagcttttccaaaaaaattgcttatgacattccccttccctggtgccttggggcctaccgaagatgcctgaaagcaaagcaaaagaaaacacacatgatttttttttctgtgtttaggctgttcttcaagaaacagtaaaaaatgtcaatagtagaacacactgtcgtgatcatagagcctctatattaccatgccagagtgcgtacatactaggtataagaacaaagccagaccacatagcgtttggtattcatctccaaagcttagtttctcatagtttttataaaattattatccatgaatgtgtctaaacatttttttattatatttaaaaactacttactttgacagaattaaaacagatcagaggcagtatggtacaaaacggggaaaaaccttcagaacattacatttgtaatcactgtaagtggaactgcattctggttccaccacttaacaacaatatgacatccaaattacttaacaagatgacctctccctcacagaacggaaaatgaggatttaaacaaagatcaaactatcggcccaagaattaaacgacctacaccaaagtagaaaaaactagaactaaatatcagaaccttatataattaaaccacaaccactggaattatcaaatgctttctagttccccattctgagctgagagaagacttacattcattacttctttagcctctgttttggtttccttattggcatcttgggctttagaagcagctttagaagcaaacatgcccatgattcctttgggctgctgggaactctgtttggggacaggtgggccgtgaccattggttgtcagctcatcgctggcttgcatctcaggtgataccggaggatctgactgctcaagcttttcagaagaggaggattcggcaggagctctaggaactgcagctgcacactggatggcactaaacctgaggacagaaatgtcaca

SEQ ID NO: 40546 - DNA, 1054 bp, Bovine  19866881178023
  misc_feature (1)..(1): n is a, c, g, or t
ntaaaactttttacatacagtcccttggtatgggtaggagatgggttccaggaccacccacctctacatacacacccccatacacaccccctaccccagtccccaacctccacctccatcttgcatcaccaccaaggacactgaaatctgtggaagctcaagggccttgtataaaatgatgtagtatttgcatataacctgcacacagcctcctgtacacgttaagtcatctctagatttctgataccgaacataatataaatgctctgtgctgtgctgtgtcactcagtcgtgtccgactctgtgattccatatggaccacagcccgccaggctcctctgtccatgggggttctccaggcaagaatactggagtgggttgccatgccctcctccagggcatcttctcaatccatggattgaacccaggtctcctgcattgcaggcagattctttaccaactgaacctccaaggaaacatattttgtaagtggttgtaaatataatacaaatgctacttaaatatctgccagtgcatggcaaactcaaattttactttttgtaactttctggaattttttctaaattttttatatccctgttttgttgaatccatggatgtggaaatatagacatggagggctgactgtactgatcctgtctgagtctacaaagtatcctgccttagggaggaagaaaggaaggggatcatctccatttagagagagaagcggcagctcacagagatgtgttctgcgtaggtagtgctggctctgggctggaatccaggtctatgtgttctcccacactcagctcattgcactccaaaaacaagatgtatggcgttacaggtgaacagacaggcaacttctaacatgaaagactggcagccaggaagcaggaggtggttttcaggaagaaaacttacctagaggaagcaggttttctgaggcattgatgtaaatcactgaattaaaatgcttgaaatccttttccttagcctgtgaaagggcatttcaaagaacataagattagttccctgcctggaggccttg

SEQ ID NO: 40547 - DNA, 744 bp, Bovine  19866881233730
  misc_feature (1)..(1): n is a, c, g, or t
ncacagaaggtaaggttaggagcctagactgaataagcaggaggcagggagcgtgagcaggaccggcaggccgagcaagtgggaggctagtctgggtgtacaccagcagacagaggggcctactgcgccttcctgcagttccggtggtgggtcgtctgtgctcgatgggtcaatcccgaggggccaaggatgggggagagcctctcaggccaaagatcacagcctagccagtcctctcttcatggcacctagtctgcttttctcttttcttcacagctgccttcacctgctctatctttcccattctcccaacccaactgtggctgaaatcggttcagttaggagacagtatcatggtataggtcccagggccctcaagaccttgggtaactgacactacagctgttttggatgctcacctggcacagagacaagcttcaagttacagggttgggttaaaacttgtctgcagctccacctgtgcaggcttctttccctcccacacattttgtggaacagctctggcctgttgtcatttcttcttcacagcagccaccacctacaccatctctccagcctgggcttcctgtgtgtacccctttctcccccttcctaaaggtgtcagtactcctccctgctgtgcttttccttcacaactgccatcacccctctggtctgttctctaatcctcattgtggattacccctgtgcccaaccctcttttcctgatattactgaaatatg

SEQ ID NO: 40548 - DNA, 1035 bp, Bovine  19866881496460
  misc_feature (1)..(1): n is a, c, g, or t
ntgcttctgtggttaccagttcttggggtgacacaacatacttgggagtcttccctgaccccagattgtgcagtgttcttcctgtagaatgtttcccctaattttgccaccctggtatcgtccatgaacattactaatacctctccatcctgccccaacttgggctcgctgagtccatcagtggatatgtgcaacctttctccaaatgaaagactggatgtgtgagtggggtttggggaagggggtaattggagatgggattacactttctggtacctctgtctgcagaaaccattcttgggcactagagaaatttccaaggtggttaggcttctttttttttggtgggagggggctatgccacagtttcagacttggtttcaaatcctgaaaccaagtttcaaatcttggtttcagaccagggattgaacccatgtccccttgcttcagaaggctggagtcttaaccactagaccatgagagaaatcccctggttaggcctcttggttgattccctatcctctgtttcttcctgggaatgatggagcttgtcccgtgtgcttgatcatgactgcaggtctttgtgcacacagggaggcgtctgtcacatcgctgaccaccaagaggtacatcctgaggttcccagcgctggagacactgatgctggatgacaacaaactctccaaccccaactgttttgtcagcctggccgggctcaagaggtaaagctaaaagcctgtctctgcagggcccgctgtaacccccatccttgctcacaccttgagtactgctctagaagccaaaaggcctggctttaaatcccagttcctccacttatctcagctgtgtgggcatgggtaagtcatctcccctctgagctttagcttgagccaaaaaagcagggcattggtaaagatatttctgatcacatgattggtttagaagcagcaaagaggagattaggatgagatattatcagaaacgggatcctaaccctaagagaggagatggaataaaagaaaaaagagtgagaat

SEQ ID NO: 40549 - DNA, 1279 bp, Bovine  19866881906772
  misc_feature (1)..(1): n is a, c, g, or t
ngtcatgagcgcagtgtagtgcagtgggcggcagatagccacatagcggtcataggccatggccaccaggatgaaggcttcagagcatgtaaagctttggaagaggtacatctgccaataagcaggaagtaaagctgagaaaatggtccccaaacaggaaaagggacagcatcttggggacagtggttgtggtgaagaggatgtccagggctgagaggttgatcaggaagaagtacatgggcttgtggaggctggactctgccaccacagccaccaggatcagggcattacccatgaggatgagaaggtagaaaaggagaaaaattaaaaacacagggaggaagagggactctggcagagaggggatgcccaccaggtagaagactggtgagccacccactgatccattacaggttgtggcctccatagtaagccagagctggatttctgggagatgggcagctggaacatctggacactgaaatatctggaaacaatagaatcaaaggattctggaatgagaaatctacaatatttacactctagtcaaaatataaaggtaatattacaaccagctcttgaagacttattagtaggttgcggtattaactcctaccgtatgaacccaaaacttctacctcctttcttttgtcaaactaattattgattaactaataccctaccaaatgaaagacttgctatgttcagctgacacagtgatgaaaatggagaaagcaggcaaagtccctattttcttagactttacattttactaggataatcagatgtaaacagttgattgttgaattatgattgtgaaaaactctctggaaagatttctgctagtcttcatccttagattttatgtatctagtttgggatgtcaggtctcttaaatcaagtccttgaactcatgcctcttcttttgcagtcaaagttccaccatgttgctttggaaggactgctttctcccaaagttctttgcaacatgctattgctcacatagttatcaagcttattcttctcttgtaagccttgaatagtagttcctcctgactccttctaagctagatgtcagtacttccatttctgtgtagaatataatagatcacgctagcccaacacttttactgcagcaattaggcaaacctgagtgaattacacaaatcatatttttcagtaatttggagaaacatgggtacaagaaggattcaatgagttggatttccaggtaggaggggtcctccaaagtgaacctacaatcaccagctcttttctt

SEQ ID NO: 40550 - DNA, 702 bp, Bovine  19866880481889
  misc_feature (1)..(1): n is a, c, g, or t
ntattttaaacaagtttttaaaacaagagactaatatcttatacactgtctcatcccctctgtcttgagagattcaatgtatatatctaattttgttatatattatatgtaatttattataaattaatagctatatttaacttaatatatataaagtcagcaagaaaaatatcaatgcctcattagaaaaatatgtaaaccagtcaccctttgtatcaaaggaacacatgtgaaaatgtagaccattttaaacttatcacatggaaaaagcttcttgcattctatttttaattacaatatgcatgctgacaaaaatttgattgataagcacttacatgatgtaggtggaataactatcaaaatgcctttttgcaaagcaatttggtaagatgtaccaggagctttaaaagaattcacaattttcgatgtagtattttcatatgaaggaacgtgttgatgtgataaacttaaaaaaaaaaaaggaaaagaaatatgcaggttccctggtgactcactggtaaagaatccacctgccaatgcaggaaacaaaggtttgatccctgatccgggaacgtcccacatgccacagagctactaagcctgtgcaccacaaatattgagcctgtgctctagagcctggcgtcacaaattctaagcccaggtgccacaactaacgaagctgcacgtcctagatcctgtgtt

SEQ ID NO: 40551 - DNA, 1200 bp, Bovine  19866880567923
  misc_feature (1)..(1): n is a, c, g, or t
natgatcattaatattttcatagagataagatactgtaatcttgaaataagagacccctataaaaggaatatttaaggaataaaaaagaactcttgaaaactaaaaatatgattaccaaaatgataaactcagtataaaaattaggcaatgaaacggaaaacatctctgaatgtagagcagaaaacaagggaaatgaaaaataagaaaagaaaacattaatgtgtcattctagcagatttaacagctgaacgttaggttccaaaaaagagaactgcaaaaatggaggggagaaatttgtcagtaactcaagaaaatcccccagaactaaagaaatcagtttcaatctaatttcataagggacttcattgtgaattttcagaactcaaagcaaatattggtgcagagagagagagagagagggaggtgtgaaatacaagaggctagaaatcagaatgaccagatttttcacaagcaacactggaatctggaaggcaatggaacagtgccttcgagatttaacccataattctgtaccgagccaaattatcaatcacctgtgaagatagaataaagacattttaatatatgcaaggtgtcatattttatttatcatgcaccctttcccagaaagttactggaggatatgctccaccaaaacaaggaagggtaaaacatagggtacatgaaacaggtgatacaaatgaggtcaaggaattcccaggattgataatgacagatgatcccagaatgagagttatgtaccgaggcattgaagttaactaccccagattggaacatctcagaaggctctggaagatataattgattgattacctgatacatatggatttctcaagtcagattcacactactagcaaagtgctagagattaattcaaacttgggagacaaaattaggccagagagaaagccaacagcggattcagacatgggagatcgtgcagagtaggacgtatcagcatagtagagataccacctaataataggaaagtgaagtcgctcagttgtgtccgactgtttgcgaccccatgaactgtagcctccgtccatgggaggactggctcctccgtccatgggattctccaggcaggagaactggcgtgggttgccatttccttctccaggggaatcttcccaacccagggattgaacccgggtctcccgccttccaggaagatg

SEQ ID NO: 40552 - DNA, 1290 bp, Bovine  19866880656205
  misc_feature (1)..(1): n is a, c, g, or t
ntacaaagcaaacttatcttagtccagtctcccataaataaaagtgtgttactgctcagtgtattaagatggataaagctaaaggggatttgagctatgatccaggctgttgacagatcccgagatcattctgacagcagctcggagtgacagaggggttgaatgtttttggagtgacagtcctgtccccagagcttttcaggcccccaaagaaaaccttctctgtgtccctgatgttcttaaaaagcacagcagaccaatttcaaccatcctggacaaatggtggccaccatcccccagcctgtggaacggcaccctgaccctcccctggaaaatgcttctggcccttttctgagatgggaaactggaataaaaaggaggcagggaggagaggtgaggagtggaaaaaaaacaaacaaaaactagtgtccacatctgtaaaacgcagagagaagctggacgaatgagagaacgtatttccacaaatggaacccaaacacgtttcacacactctctcggcctgacgaaggattagctgctaaaggccacaactgcgggtaccacactctgtttacaaagctcctccgccctgcatggagacgtgactttccgtgtcctcactgaagggctggttgtctggttacctgagctgcctcaacccaaacaattctcagagtctctaggacaggagtcaaggaacaaggcctggagccaggttgtccacacaggttcaccgtcagctgagctacgtgtgtcttcaagagttttctgtatgcttcagaaaagtcagtgtcatgaaaggtgaaaaaaggttgaggaactgctcttgattagaggagataaaagaagcatgacgactatgatcctccattgcattttggaccagagcagggggagggatggatattaccataaaggataaaattggaccaacggacaatatttgaatatgaagtgtgtgttagctaacagtgttttaccctaaagctaaatctgattaggccagatactgttaaaaaaattttttttgacccacaacttgtagccacttgcccaggaaaccaaccttttatctacaataaacagcccaggtagcagcctgttataagtcagacttgtagaaagccagattgctctctctagtaacaatgcaggatgccaaacaataattcagtaacaattggtcccaaatggccaggacttgattaataagggacaccttcctaatgcttgttcctgctcccaacttaggatcaactagagaaattcaatcatgcacccctaaccaat

SEQ ID NO: 40553 - DNA, 2154 bp, Bovine  19866880825213
  misc_feature (1)..(1): n is a, c, g, or t
ntactggttgaaatgtggcacaccaggtattctcgttcttgctggtgggaatgtaaaatgggatgtcactttggaagacaatttgatatttcttacaaaactaaaaatcctcttaccacaatcaaatacccatgctccttggtgtttactcaaaggagttaaatgcttatacccacacaaaaacctgcacatggatggatatagcagctttatgaataattcctgaaatttggaagtaatcaagatatccctcttgactgaatgaatgaattgtggtacatctaaaaaatgaaataatattcaatactaaaaataaaaataaattgatatggtcatttgttcaactgtatgtgtagtgttggtgccatgccccagttagcagctagctgagatagcttgcagtgtcttttctagtttaaatggtgaacagacatgaaaactaatgaatagaatgagttaatgacgaggctcttctctgcctttctaaaagaggggccacctacacgtgtttaagatgtccctgcacatgtctcaagttctttataagaaaggaagcaacacaggctggattccaagcggtgtatcacccaagctctagttgattttccacagccaggttgttgccataatagctttttcacacatgacggtggtgctccctggctctccccagcccctaaaggctgttgaaacatagcaccaggaggcctgagaatgccaggggctctagctgcctttgtccctgcttctctggcatgtgccctcctggtgacagtgggattgaaacagtagctctcagtgattgcttctctggccttgagtgactgtccacagttcactttttcctattaggaatgacgccttctctgtatccgtgctccattgaatctctttttcatacatcctagaatgaaaggacttggcttctactacttttattagacatctgttttctccctccctagactattaagtaatattgttcctgcttttatccctctcagattcctgtctgagagctgagagctgcgggatgatgttcagtctctctatgcaccaggagctgaaccgcgtggagggtctacttaaactgttcatctgactctcatgagttgacaccgctcctttcttttattgtggcaaaataaaaccctaagagtctttggggaactctcaaaaactgggaaagattcacctccataaatgttaaaagattgtatcttatgtatagaagtaaataagaccatatggaattactggactgaaagaatagtttagcttataatgaagacagaaaaatatatattttgaaaatgctgctaaatattgatgctgacagtgtttttctcgtgtgagtgacccaagcatattataaatagttggtaaagggaatggagcctgtggggtcaaggaaaatgttgcactacctgtgcctagactcatgatgacagctttatgattatgggatttgataaaattgtaattttttattctattccaaagatgctttctataggatggccattaggtctagaaatatagatcacactattttgtcattcactagaatgtagcatcaataaaccatttattaagaaaaaaaaataaattgaatattattcaatactaaaactcaatactaaaactcaatactaaaatacatgagaagacatgaagaaaccgtgaatgcatattacaaagtgaacaaagccaaactggaaagactacattctttgattccaactgtataacattcaggaaaagtcaaagctgtggagacagtataaagacaagtgattggctggggtagggccaggatcaatgggcagtgaaattactctgtacagttctaataaggtggataaaactggagcctattatacagagtgaagtaggtcagaaagaaaaacaccaatactgtatattaacacatatatatggaatttagaaaaatgctaacaatgaccctataagcaagacagcagaagagacacagatgtaaagaacagacttttggactctgtgggagaaggcaagggtgggatgatttgagagaataggactgaaacatgtatatcaccatgtgcgaaatagatgaccagtccaagtttgatgcatgaaacggggcactcaaacccggtgcactgggacaac

SEQ ID NO: 40554 - DNA, 1401 bp, Bovine  19866880864207
  misc_feature (1)..(1): n is a, c, g, or t
ngtagttaagtgttctgccttgaccattgaatgagttgattaactgggcctttatacttaactcaataaaaaactaaacagatataaagttaaataaaaagttcaagttcattgcccagcgtacctattaacattatatttaacaattgtctacctaaatttttgtcctttgactcactgataatttcctaggcgacacactttagattcacacattagtaataggtcactcaccattgttaggataattgaaacttgcttcactaaagaaagtttagttaaacctctttacaacattaatgttaggtacatggagatcacttgtctaataatttaacttgacatcatatatcagaattgtattatatttgaagaacaaaattgaagtttttttatttggtgaatttaatgtctttccagagttctaaaaagataggttttttgttttttttttaatttaaattgataaagactataatttagcagaaatagggccataaagtagaaaaatagtcatatagctacagtcataccatacttcagcttccatgtaggaatagaagtggtaggtccagttttgttagtggaagaaaagggatttatggaaaagttatgagatgtttcaatattgagtccaccaaacactttgcacaatgttatacttcatttgtcagtgaatatttgttaaaatgtatgtctggttatcatgattgcgacagcctcaaggtagaacacactgcagtccctagctgaacagaagttagcctaataattcatgacagaaaattgattaaatgccttatccttttaattaaggctgcagaactgttaacctaagatcacactgtggcaagagtcaatataatttaagctagaggttacttggaggttattactcaggtgtaataacatttcgctgtctttgactagggtttaaagccctgttaacttggtttgtaccagcccagactttttccctcttacaagttgaacacactgttgagtttgtgcagggtctttcttcagcaccagacattccactagtgatggttagccttttgacatttagaacttccaaacttgaatcttagatagtcccatgtgtctgacaggccagccatgaagaatttaagatttaattctaactttttccatgttggccttgggtgaatgactcgtcttttgaagaatagctttaagtgacttggtcactgataaaactcaactattttgttgacacccttcaatattattttatgtttagccatatttaaatttaagatttaatagagtctagtgaagaaattagtggaatgtgtgaatataaaaaaatacaaaaaaagagaaagctatttaaaatgtggctttattatattcctaacagttcaaaatttattacat

SEQ ID NO: 40555 - DNA, 4055 bp, Bovine  19866880930450
  misc_feature (1)..(1): n is a, c, g, or t
ntgtgtgtgtgtgtgtgtgtgtgtgtgtgtgtgtgtgtggtgtgagtgtgtgtgtataaaataccaaccgaacatttcttaggtgggcaattagtccaaatatttaactcaatgataaatcaaaatatttaactcaaggatgacttaaatatgagcaaatgggcaaaatttctcattggcccacagtcttctagcaaaatttggttgaaataacctatttaggttaatagacaaggattaatagacaattattattgttattgacaatagattattgtcaatctattggacaatctatctgtccaatagattattattagagaaataactctttggaaaagaattctcttggtccaggttttctatgatagagattgacaatctaatattcagatttattttaaaaatttgaagctagatttttaaaaagtccaaatgcatctttgcaatagggagttgccacaataggtaggtttttcacagagttgaattagaattcagaggtaagtctgattgctggctctatatctgtattaaacaatttcagaggggcagcctctcagtttttacataagttgctttgccgttaaactgactttaaatatataaaccagcagccagttaaatgaagtcagtgagactaaaacatgaatttataatagataggcagtaatgcctgatatcccgccaaacagcagcagcaacaacagcaacaaaatgccaatttctctttgaacaataagaaaccagagttattttacacctttggaggtttagaagcttaattaatcttaattgcagtgtctttcagagaagagtcaggagttgaggagatgttttacagtttttcttgctgttttttcagggttgaggagatggtactttttttcaggattggggagatggtactcaattgcaaaggaagataattttcttactgggatttctgaacttttttttcctaactagggctctgggacactgagctagcttggtgagtcagggctggcctgctggagtcaatggatgtcagaagagaatacctagaggtctggacagttgaaaactgaagagactacatgtggctctagaaggcaaaagcaggggtcttattttaaggtggctgaggtttccagctgtaagtcaggcaggaactattaaaacctccaggcttcttagagaagtgtgggactaaatgtacacgtgtttggtgtgtgctaagttgcttccatagtgtctggcttttttgtgatcttatagaccaacctcgctaccctttttttaaacacaattttcttcttgcctgactctgttgagcttctacttactttctccctctctccagttaatctttctccctttaaaatgcccagtcacctctacatggatcaaagttgagcttagtttacattggactctcttaactatagcagtaggtaccgaataaatctgtttttactgctttaactcatatccaactttgtttctctttgagagttttaacaataactttgagtggctcaaagttgtgagatgacatttctccctacttgtgctatggctatgcaagacctagattatatatgtcttcatagatccatcatgttccaaggttcttcgctgcttatcacagtaactctatgacctctttgatcaatctggaaccagtagatgttcagagggaatgtggaggaaggggcattcatgctacatgaggcaaacttgcctgaagagagtaggaaacacaaagcaatcagtagataaattgcccacctttcttttccctaacaggtgatttcaagacactgtagcttttatggcttttctagagaggtcccatgatgactggacagttcattgtatgcattatggagctatggtcaacttattaatgctctactttgtatttacctcctctccttccctggctgacttctcttttttcctcttttttctgtagaattgcactcccaataaaacaatggcacaaaagcctagattcagttggaactgaggctaagaaaacagatcccagtgcatgtgggtggtgccgtgccaagttgcttcagtcaagtctgactctttgtgactctatggaccacggtctgccaggcttctctgttcatgggattctctaggcaagaatactggagtagttgccttgcccttctccaagggatcttcccaacccggggatcaaatctgtgtctcttatgtcaccctgtgttggcaggtgggttctttaccactagtgccacctgggatgccccaacagattccaggattggtcccaaaaagcaaattctcaggatggaattttagagttgaattgcctacttgactaaaggcaatagagaccccactgctcagtggtagtgggggtaataacccctggcagtgaggtcacaattaatgaaatttcacccctgattggttggaaggagatgcaaggcagaaggcaagacactgtgagattataatgtggtaaatggtaattatgagatttgttatgtgggggtggctgcttttggtggcagtgcaagtcttattaaaagaaaatgatagactcagggcagctccttgctaacttaaatgatcctctgaaaaccaaaggtgtcaatagcagtctggtctcagagtagaatgagttgaaaatcagatacagattataattataaagacagtagagaagtaaaggaaattaaatttgtagcatccattaatatgctatatgaaaatctcaggacccaggtgggaaagagggcaggaagacctgtctgtaatgaagatatttgagtggttatacctaagaaagaactaaaaaaatttcctggaatgtttctgggccagtggaatctacctgctttctttgctaaaggaaagcagcctcctctttcctttcctagagtctgtgcagtgatcttacgtaaatgtgcctaacaagataatacttgttctcctcaaagactgcctctactacacctcattggcagctccagataaggaacgttagaatggatttactatgtacaaccggagagcttatcactgattatataccctggaagggtccagagctcactcccatctctacagcaataagaaatatactagtgctaggtactccagtttctttaggaagcttggtggtgcctgttctctgctggccatgactgtatacgtggtgtaaaagttaggctgcgtgatattaataaggctggtagggtttcagaatgacagagaccagtggcaggacttaattctcagagtcacaatggacacaattacagccatgggcatcaaagtcagagtagaaatcggagtgactaggcctacatggatttatggtgattttaggggtaagatagatggagaactgacctgggcattgtttgatttgtgtaatagaaaactgagagctggaaagctgacatcagtgctatagtgaaaaaatcacccagtttctagaactaaatgggattatagacctagagttcatttactgatagggagacctgtccccatgaggaagagtctgtcagtgccaccatagatatatatgataaatgtcttttctgattcttccctaaggggaccttcggtcatttaccagagtaactgttccagaggaaagggcaactactcaggcttttcaaatctgttagatatgaggtttgagctggcactgacactgatattgtgctgtgctgtgcttagtcattcagttgtgtccgactctttgcaatcccatgtactgtagccctccaggctcctctgtccatcgggattctccaggcaagaatactggaatgggttgccatgccctcctccaggggatctttccaacccagggatcaaacccaggtctctcacatttgcaggtggattcttaccatctgagccactagggaagcccgacaccgatattaggagaaccaaaatgctatcctggtcttctagttagagcataagttacagtagccagatgataagcggggtattagcccaagtccaattcacagtaggacaatgagtcagcagacttgccctgtagt

SEQ ID NO: 40556 - DNA, 1834 bp, Bovine  19866880965897
  misc_feature (1)..(1): n is a, c, g, or t
naaatatgctgtgctagtttatttagtctgtccaactctttgcagccttatggactgtagcccaccaggctcctctgtccatgggattctccaggcaagaattctggagtgggttgccatgccctcctccagaggatcgtcctgacccagggactgaacccacatctcttatgtctccttcattggcaggtgggttctttaccactagggccacctgggaagtagatatatacacacgcgcgtgcacacacacacacacacacacacacagcattcactgatggctaaaccaaaactcctgtcttataccaacggttattacccagcttgaccctgaaggcctacagctttcggtctttcagggcaccagctgaccatcaaagcaagttctcattataaaggcgtacatacttgttggggtcatggggcgggtcttgggccctgggaagggatttgtccaagggactccaaccaagacagtgtatggcaatccagtgaaatgtaacagaaaagccagaatctgagtgtctctcttaaaggtggtagaattaagggaggaaaagtatcagagggaaagactgaaacaagaggaggagatggaaatgtctgtttctggtggcacaccttcggagaaaaactcttttgagacagtttctgctatgagtttgaaaacccagttcctggggcaatggaaataccaggagtatcccataattatgggagtgaaacatccattctctgtgggggagaggaccaagaccatgctgttttcttagactagtgtcagtttaaatgtcccattaaatacacaatgttagaaatgtaccatttctgagactgggcagctgaggggagagtttaaaggcagtatttcatagcaggagtttctataaaagctgtcatccaatgacttaaaagtacactgggccacaacctgggacctggaaaattccaaggaatatctttccatcatcgctacctgttttaggaccaagccattgaaaagccaatttctcatttccactccttgcaccaagcctaatgtagttttaagaaccatgggcaaagcctgctctatcagtggtgataaaaatgaggttgggctgagttgggagagggaaggctggcatggtttccctccctggctgggtgtaactgcattctgataaatcttactgtttaacaggttctgtaaggaccaagggaaggtcaagggcatgcatgcctttggaagccaagcagagattcttggaggcttcaaaaactaatttaaaatataaaattcttatcacagaagccacacttattcatcatcaaaatttagcatgttatatctttctagatatataaatacatatatatatgctgctttttaacaaaaatgggattattctataacatacttatttcacttaacaatatagtataggcactttttttgtgtattaacataaatctacatcattttgggggcttccctgatagctcagttggtaaagaatctgcctggaatgcaggagaccccggttcgattcctgggtcaggaagatacgctggagaagggataggctacccactccagccttcttgggcttccctggtggctcagctggtaaagaatccacctgcaatgcgggagacctgggtttgatccctgggttgggaagatcccctggagaagggaaaggctacccactctagtattctggcctgcagaattccatggactgtatagtccatggggtcgcaaagagtcgtataggactaagtgaccttcacttcacttcactcaccatgtgtaaaacagttagctagcaggaagcagcttttccag

SEQ ID NO: 40557 - DNA, 1297 bp, Bovine  19866881008679
  misc_feature (1)..(1): n is a, c, g, or t
nttcagtccctgggtccggatgatcccctggagaagggaatggcaaccccactgcagtattcttgcctggagaattccatggactgaggagcctggtgggctacagtccatgggttgcagggtcagatatgactgagcgactaacagtttcactttgacttgactagggaacagtaccataatgaaagatgagaaatgaggagttctggaatactgatagtaaattatttttcacctgaattgagctggaattacacaggatgatgattatttaatagttattttgaaactcaaaattctaggcctgagcagttttacgagtcattacttcagtacctgaggaatatatagttggggagaagtcaagtctgagcaaaacatggaattctgggtgacatttggttcttagttggaagcttttaggatacagtaacatatgtgaaaccattttgtaaatgtaacttaatgaactgtttgaaggtattttgagtctcacttgatgttataggtgagtgaagcaggtgtccatcgaccccatgttggtggaattcatggtcggagtaatgatggcgcttactctctcgtcctggctggtggatttgcagatgaagtagtaagtcatgatgcaaccttgttctttagaacctgtcttgattattcagtaaaatacagaagctttgtccaggataaatcccatctcttttagcatcacttttgtgttgaagtggtcagttctatacaagtaacatagtaaatcagtcagtgtctttaatcatttcttgtgctgattactgcaatgaaaatagtcacattttctttagagctcattttaatttggggataattgtagattgacaattattagaaataatacaaaaatgtctgtgccctttactcaatttcagccaatggtaacatcttgcaaaactatagcccaatatcacaaccaggatactgatactgctatacattcaggacaacattttccttactgcaaggtccctcacattgcccttctttagccatcatactatttctgcttccccaatatcccttaactctagacaaccactaatttgttgtccatttctataatttttgtcacttaaacattttttataaatggaatcttctagtgtataatctttgggattaggtttattcagtcagcatagtcctcattgtggcatgtgtcaatggttcattcctttctattgctcagtagtgttccattgatataggtgtatcacagtgtaaccattcatccattgcagcaaataatgctgcagtaaacatt

SEQ ID NO: 40558 - DNA, 2929 bp, Bovine  19866881077746
  misc_feature (1)..(1): n is a, c, g, or t
natgaacctccatcccctcttgattggatccccagagctggccctccttgctctatccgatcgtcctcaggcaccccagccactgcagggacgggaaggcatttggatcctggaagaggagctcagttccaaagtccagctcagactttgggtcccacaggccagttggtgcagttcgtcagaactcagtcactcacagccagtggcaaatgtgccaccagtggccaccgaacagccccagcttccagttccaccttctgtttctacgcctccccaacctcgcacacacctgtgggctctcccacttctgctgacggcccttctgtctccaaccttggggtgcccagctcagctgccccttccctgaagccagtgtcacaagaggtaaagcaaacccacaccaggtgcccccagagctcagcaccaccttccatctcctctctcctagctctgctggcctgaaagccccccttgcctcggagtcagcccgggctatcacaactactactcacttcctatagcccaagaggcgctaagagagtcacacaatgagtgaactggggcctcagaggaggcccccagggcaggaggtggggcaagagagggggcaggtggctcatctacacccactgggagaagatgggagcccctaacgtgggtgagccatgcctggcacgtggacggggtccctgcatggtcctgcggaagtggacacgaggattcagccctgagtcctggggcctcagagcccagcagggctgcaggggggctaagattgggagatgagagccttcaggaggaagccctggcaagccctgtgctcagacagcacgacagtgctcggcactcaggctccgggagcccgaggtgcctgctggaacggggcgggggttgtctctgcctggtcagccagcacctgccccttccccgtgcctccccgggcaggtgggccctacacagagaccaccttcccatgggccctttttctgctttcgaggtccccaggctgcatttcccttggttctcacctgtactgggaggaagccgaaccgatggacccatgctgcacagtccccaagcctctctgtgtccctgttttggagctttagacatggagagaggcctgagctgcctcttcgctgctggcagaggggctggggcatgtctgctctgcagcggctctcagatgcctggaaagccccggcacaaggtggcactcggggttctgccaagcagatgctggcccaaggctggtccctgcatctcccaacatcagacacacggcagagttgaccagctgcgttgcgagtcctccaggcatagtgctcaaactttacacagctggccagtgtccatccaccagtcctcctccttcactcatcttcctttgatgcacttcagggtgagtcttggcaacgctctttaagagagaaaaccaaagtctaaaagtctgtctatgggggaggggtatctggatacggaatgctgtgccatttttttttttttttttttttgctttgctaatcatatttatttattttcaagagctcatcagtttaaaaaaattaaactcatttatttcaaataagtaatacttccataaggttcagaaaaccaaaacaatatacaaaggtttacattaaaaagtttttttgcaaagagctcaactgtattctttgttcttatcttttctaccttatttttcttgttttacagatgcagtacattctcaaacttctctgtgaatactacttggacttttatttaaaacctcctttagttccctgcattagctctgcttgttccattcatcttgtgatttctccttataaattagttccagcctttcctcttgtgtctaatgctccctttgcttcctgttcatctttcttttttttcttcctgtccataaaagtaatgacggcacatctttaatattaaggaaaaaggctataaaaagttcaatctcagaatttgttttagtaaaacctcattcgtgctcctttgtgggtgcatcatgaagttccatgggcttgttcacctgccagtatttctcaccgaccaattccaaagagagagggccatttaacacatcgaaactggcccctggctgtggctatgtaaatggcatattgcttcttactggctatatcaaggttcgtctggcttgattctcctttgcttcaaagttcttctaaagctaacttcacagccaggttgataagtgatcaacagtggcattacctgagctcttcgtgaatcttgtctgtgtacgatcatcttcttccaaaaacgtgggatgaagcctcagtactaattcagtttcactagcagggtccattacacagtcagatgtcacttttgcattgctgttatcgagttcaagcccagaatcatcagatgttttggtctgttactaggtgctgcttccaatggctgtacgtggatgttttcctgcagtgagagctgtctccactgacttcggctccactataattttcgatctgtttcccacctcactgtcgtctgctcacggcctgttatctcggtccttccttgatgctctgaccaagtgcttgctgagggttatgcttgttgattctagctaatgcttttttctcgatgagcttcatactcaccaagacttggttaaattttgctgatgagtgcatcaaagtttaggtctgatcttagtgatcttttggaatctagcttttcccaacagcttgttgttgttcagtcgctcagtcgtgtccgactcttggtgaccgcatggacttgtgcacgccaggcttccctatccatcaccaactcccggagcttgcccaaactcatgcccactgaatcagtgatgccatccaacaatctcatcctgtcaccccgttctcctcctgtcttcaatctttcccaacataagggtcttttccca

SEQ ID NO: 40559 - DNA, 904 bp, Bovine  19866881097008
  misc_feature (1)..(1): n is a, c, g, or t
nctctaataatgaccctgaagttcacgagctttttatttgtttgtatcatagtttaaaatttcatatttgggggacagtttcctttgttggaaaatgggcttgaaggatgctgtgctaaggcacatgcccattatatcatcagagccttttatttgtccaaggattgatataaaataatacctctggagagaaataactcctcttattaatctgtcttgagccagggaaagtaagcaatgaattaaaatgcttgtttgtttctctacaagtttatggtatagagtcatattaactctcaaatcacaactcagtttgaaagttttttccttttgtttatagtttcttctttgaacttaaatttcagttggtagaaaggggttaaaaacctgagcaattcccacttgatatctgggaaagaaacaagtacgagtccttgcagagacagaaaacagagggtttggatgtcaattttggtcacctagcgagaatgtctttgtgggtgtttttgagatggtaagaacactctggatgcatgaaatgacacctctgtgcccctgctgctaggtgtcccgtggcctgaccctacaagatgccaagagaagaggctcacttcttctatggttcccccaggaaagggcacagccactcttatgtcacggctgaagagtaagttcaaatccagacccagcggggttacagttttgctgtttgctgacacagcctctggcttccaccagcacgtctgtccgtaaatctctctagtgtttatttctccagaaataaacctggcaaagagggaaggagaccctgaggtcctacaaaaggtctcaggtttctctgagaccaaagaggcaaagagggagggaaggcaaaaacccagatcttgccatttttgtttgcatt

SEQ ID NO: 40560 - DNA, 2193 bp, Bovine  19866881174898
  misc_feature (1)..(1): n is a, c, g, or t
ntcttattgcctgtgacccaaatacatcttgtacattctgacctttgcccatcaaccagttccctggtacatttctactcaggccacaaaaaacgcagttcaaatgtcaccaccttcatgaagtcttcctgacttccacaaacaaagttaatctctcctggccctacaatcctacagcactgcgaagctatcactatttcactttatcccagtgcattggagtcactgtggtttccccatcattgcatcccccagggagactgtgaccttctcaaagaaaagactaggcctgaagatgggaacccactgggtactcaaagacaatatgagacaaaaatgaaaatattactctttctactgtgccttcagcccaaagtttcataattggacaactgaaattagaattttactaagcattcctgtcttaccctctactgtaccccaatgccatatcaaccagagtgtcagccacactctggttacatcccactgcagcaagaataaacacttgaaattgagccgcatcatgtagttcttttggaaactctagtcatgaagatataagtattggctcaaccataaacagatggctaacctcaatgaatctttcttcagtagggcctgccacacagaagggctccttacaccatatcccaacatgaactgaactgagaccaagcttcaggtactgaagacatgctagtgaaagtatgctgtttacagtcttccgtgtccccagtctaatccccagcaggacaaactgaaataaacaggtgtgcacatgccatactgaaaatgagggaagaaagaaagattttcccttttattatcttagaaaatcagaatgtttgtggcttgctctctcactaattattcaatttttagtcctgctctctcataaacctaatattaactttgtttttaccaaacaaatgtatacagttgaaaccatgactacggctatttctctaagacagcatgtattattttggaactctatctcccctccctttctctcctcagcaatgtgtcactaacccccagaccacctagcatgctgacagaatctgtatcaacaacacacagctttaaaaaaaaagagtaaaggagactgaacaagttcagtgcagctttagatacagtgctcatccaggcagaaaacagtgtgtcagttctgtgccagagactgcctaagcacaggggacagtgaacagaatcatccctgccctcaaggagctgacagtccaccagagaacagggctattcaaataaaaataaccggtggtcccagggaaggctggcagattaaagagcatggtcataaaaactgccactgtcagcagaggcagaaggctatgctaacacgccttgctgtcaccaacaccccaaacactgtttgccagccgtgtaaactcactgaataagtctgcaaccctcagaataagaagttttccagaaagtcaacatggttctgggagtcgattttccataaccatgccaaacaatttttggtgtcacaaaaggccaaacataaggaaccccacctgagtttgacttcaatccttgaaggtggcagaaagaaattaataaaaaagcccaacacttaccacataataaaatctttttgcaagggtatgtatgaatattattttggctacagctgcagttccatacagacaaacggagacatagaagtggttataccatgagagggactgtccaataagtgagatgaacactgctataatgagaactgtaaccaagctggtaaaccagcttatcagagtgatgccaagtccacagaagaagtcctttgtgtaggtagcagctgacggagagaaaacaagagcagtgatcactgtctttatcaaatcaatttcaccaccagttagtagaattaaaggagcaaacattaaaacaaaatttaccactataattgaaaatattaaaatttcctaggggtaaggtttgttaaacattacaacaaacaaggaaagtatcagtgaataaaattcaagtatgaacatttgctgagagtctgtgggtacaaaggacccaaagaggtaagtcttcaggaaaagttcagctatattcctgactaggaaagggagtcatctttgatttttaccacctctggaatgctttgtgtattgaaataacagcaaaaatggaaggcagagttacatataaagt

SEQ ID NO: 40561 - DNA, 1274 bp, Bovine  19866881224216
  misc_feature (1)..(1): n is a, c, g, or t
nagcctaaatgtccgtaataagtattagttaaaattatggtacacaatttaagttttaatattatatagccattaaaaataaagatgggggttttgatctattgaaaagccaagtgttcatgatatgttaaatacttttttcaggataaagaagtatatatatgtgatatattacaaatagaaacacatacatatacacccttctgggaggaatctgtacagaggaatctgggaggaatctgatacagaggaatctgtaccaaaaagtaaccattagttactagtggatggtaattatggtgatttttcctccatttttatatgtatttcacaactttctacagcataatagtgaatatttaattttttaaaatttgaaagcagcaaccaaatctctgggtatgactggaaacagactgttagtaggatttacccttcagttctctgtgaagtgtctggggcagaaggtcaggtttctctgtagagaccggtggctctcctgttttgtctaggtctcaagcgagccgggcaccaactccagcatgacttgttctttgatactttgaagattcagtgtggctgctcagtgaaggaggtcttgggcagggccgctcagcgacaaataaatattcggctctttgaggatggcaccgtaagtcagactttcagtttcattttacaaattctataaattttcatgactttcctcattaaaatatctttttatttaaaaaagatctcagtattggacctttgggcacaatctgtttctttgtaaacaattttcatttccagtttggaaccctgtgactttttaaatggtaattcattgtcaactttccttaaggtgttgtgttttcatacatggaactcttaggcacatattttgctcatactactcctttattcacaatatgactgttcaaggtaaaggctatgataagcaataagatgaggcaagttaagggaaaaaaatggtgagcttatctagtaccaaaaggggtgcccagcagccctcagacgagttcagatgtggctgtaaaactctggatcttgtggagtttgggactggactagactgctttgccaaagagtcaacctggacataatgatattctgtttttttaggacaatggagagttttgtccagcaatttctccccttggacttctcttattagagtttcagccctgatttgtgtgtgtgtgtgtgtgtgttcagttctttttttaaagcttatttttaactggaggataattgatttacagtgttgt

SEQ ID NO: 40562 - DNA, 1175 bp, Bovine  19866881287964
  misc_feature (1)..(1): n is a, c, g, or t
nattgtgtatatgtaccagtccactgtgggaaaaggaaatggcaacccactccagtgttcttgcctggagaatcccagggagagaggagcctggtggactgccatcttcggggtcgcacagagtcggacacgactgaagtgacctagcagcagcagcggcagcagtcccttgtatacacaccacatcttcttgatccattcctctgttgatggacatttaggttgcttccatgtcttggctatgtgactagtgctgctgttaacatagggggtgactgtctctttttgagttatagttttgtctggatatatgcctaagaataggattgctggataatgtgataattctattaactaattttgttagttttctgaggaacctccatactgttttcaacagtggctgcgccacctttagagccccaccaacagtgtagggagggttcccttttctctacatcctctccagcatttgttatttgtagtctttttaatgatggccattctgactggtgtgagcgatacctcactgtagttttgatttgcatttctctgattagtgatgtggagcatcttttcatgtgcctcttggctatctgtttttgttttttttttaaggactttttttaaagatggttgacttgtgtttagataggcagtccctgaacctctggccacttttaataacaggaaaaactacactcaattggcctcatgaaaagagaggggccaggagccatctccccaagtggcctagggaaagggaatgactggtgtcccaccccgacactgctgttgcccctactgagatgcttgaactctcatcttttcttcagtgtcaactcttgtgagccctgtctgcactggggagagaacgtccccttggctctctccacttgctcagtacctccctccaccttttattgccagatctccagaggtcctaccttgtgggtctgagtttccagttaagtgtccactccttacaggcaaatgcacctgcttttagtgccatctctgaaacaagacaaatgggtccttttttattgccatctctggaactagacaaatggtccttaatcaagaatgacacacaaggctcctgcgtcctccttcctaagtgcttcaaaaagaagtaaaaccaagttatcaaaactcagtcatgtaccctgagt

SEQ ID NO: 40563 - DNA, 2367 bp, Bovine  19866881300618
  misc_feature (1)..(1): n is a, c, g, or t
nctgagaaaactggatagacacatgcaaaagaatgaaattggacccttatcttgcaccatacacaaaaactaattcaaaatggattaaggacctaaatccacaagctaaaactatgatatctgggacttccctggtggcccagtggctaagactccacgctcccaatgtaggggggcccaggtttgatgcctggtctgggaactgaatcccacatactgcagctaaagatttccacatgctgcaactaagaaccagtgtgccaaaataaataaattaaatattaataaataaataaaataaaattacaaaactcttagaagaaagtatagaggcaaatctgcatgaccttggatttggcaatgatgtctttatgacaccaaaagcatgagcaacaaaagaaaaaaatagataaaagtgtacttttgtgcattaaatgacactatcaagagaattaacagacaacccacagaacaggggaaatatttgcaaaccatatgtctgataaaatatccaaaacatataattaggatacatggcttgctcctcattcttctccaggctgatagaatggctctctggagccctcagtgggtattccctaaattcctcaaatgcatggaacaaacactgtgattaaatttaaattaattgtggaattctagagggaggatacttattcagttttgtttattaattagtttaaaagagaacagtgtaatacttctttgataatttacatttgttttctgatttgaagtcaggtctcaaagaaaacttagacaaccagaacagcactgataaacactctggaacctatttctgcttcctttcattggtttatttagcaaatatttattgagtggctcttatgctataagccttgcagagtgttgtgattaacaccttgctacaggtgtaggtagctactgatgcttctcttccatgtcacagaatctcatcctcacatgtcccagctatttcatcattttagaaaccaactcagtcaccccacactgcttctagttctcatgttctctctctctcctcctagcctttgtggcggcttttcccagcatctggaacacctgtagctccatcctccttctctgcaattgtgtctggatagctcctacttatctttcaggtctccacttaagagaacttcttctgagtcttggtgagaagcccctcctctgtgctcatcacagacagtgcccatcataatacctcacctagactgcattcttgtgcttgttcagatcctcaacagactagaagctccataagggcaggaaatatgtctgatgtagcactatcctggggatgtaacaacttccctggtggctcagacggtaaagcgtctgctttgcgggagacctgggttcgatccctgggtcgggaagatcccctggagaaggaaatggcaacccactccagtactcttgcctggaaaatcccatggacagaggagcctggtaggctacagtccatggggtcacaaagagtcggacacaactgagcgacttcactttcactttcactctggggacttaacacatagtaacgacctggcacatattaggtcagttttcccagaatcaacataaccaagatgtaaacgttatgaagctttgtattaggaatagcttcaattaagtacgattaacagtccttcccactaacctgtctaatcagtcctggctggggcccagagcagtgacctctaactatcagcagtcatgggagcaagagaaaaatcagtagtttaattttaacagcaggccaccaaggtcgttcctgggccccctctccctcacagctcaggcccacaagaggcaaggccatctctgacatctccccagagagtccttatgaggagtgtgtattttaatttacttactgcagacgactcacagccgaagatccacaacaagtcatccagatctttttcattgactgtttcatcaagagaaataccaagctatagaaatgaaaatgaaagggaaaacatcagctctaaatgtcaagatcagggctgacataaaaaggaatgaatttgaagaagctgtagtgaggtggatgaactttaagagaccgtcttacagaatgaagtcagaaagagaaaaataagtatcttatattaacgcatatatatggaatttagaaaaatggttgtgataaacccctttcagggtaggaatacagatgcagactagagaatgggcttgtggacacagagcagcaaggagagggtgggataaactgagagaggagctctgacatatatacactacaacgtttaaaatagataactagtgggaagatgctgtatagcacagagagctcagctcagtgctctgtaatga

SEQ ID NO: 40564 - DNA, 1543 bp, Bovine  19866881318226
  misc_feature (1)..(1): n is a, c, g, or t
ntgaaaagtgaacgtgaagtcgctcagtcgtgtccgactcttagcgaccccatggactgcagcctaccaggctcctccgtccatgggattttccaggctggcccccaacagtacatgaagtttaaatgtcaccccttttcaggctcaagtagagacagacagaagagagagacgctgaaatcccactaacagtttccatttgaacatattagaatatggatttagaaaataacatctgaacctcattttggaaatggaactcttcccaaaccacttggctgtggcaggggcctctgcagatgaagtcttgctttagcagcgctgggctgggctgggctgggcttgatggggcctttcagtaactgaacctttgcttgaaagactgtgctgtctgctggccagcaaaagagactcctccccatcatgagcctgtctcctcctcccctcctgccagctgagtgttccacagagcagagcagagcagtcagctccattagcctttttctttgagttgttgttacaatgccagggtggctgccagaacctcagaaaagaagggttgaagctcaaggcttggctccccagttgcggtagcatagtggggcatttaggattcctgaaattaatagttgatgaggagttaaataatttcacagttttccccctgaatattccagctggtcatttaaggcactttttttttttttcccctctagatttatctacctctgaatacatttttctccttttgaaccatactccttactattgaatcctcatcattgttagaaagcttgttttaaagatatgtggtgacagtatattcaaagtcttaggttctcatacttttatttacaaacaaagctaaccccttcatatgtattcatcacacaagaagcagagcagttcacagattttgtcttcagggtctgttaatgactggagctattctcctcaggattgagaagttatgacttctcccaagtatatttaagtagattcattgtttgctgagaatcaggatagtgggttaagaaggagtgcattattttttactgagtaggtactttccttgaagataattcatcagttatgtaggccatggcatttgggaaactcccaggaatgttgttctatttaagaatgctgagttagtggtttattcttgatgttggatgggtggtcaacagcttataatggggagatggtggcctgagcctagagaagcaaagtgaactgaccgccgcaagacttcagcctcttcagctccttgccacttgcggtgtgctgttcaacagccttatttctaattctcagtctgaagcctgaaactgaaacctcataagcccctttgaagaatcatataaaattgtgtcttacacatatacatttagtatacatttacctgcccacggaagaaaccattaattggatattggtagcaaacttgttgaaaaatgtatcaatggagttttaacactagaaatattttatataaaataaaatatatatataaaataaaattttgtataaggaccaggca

SEQ ID NO: 40565 - DNA, 1670 bp, Bovine  19866881387444
  misc_feature (1)..(1): n is a, c, g, or t
ntgtccctctgactaacggccgtgtgcagtttgctcagtggaaagtcactcgtcacagaaggcggcctcattcccacgagtgaagccaaatagcatctttagttaagtgtgagcctgtgcaaaagaaagcacaaaacaaaagaaggcactattcctatggttgggcactcatgacatatgcctgcctcaaagcatctctgaaactctagaaaacctgaggcaaacaattacgccatcagagagccctttaatgaattaaacactgacaagatgatctgtcctgagttttcaaaattaagcatgaatacataagtggctatcgattttttttaaagtactgcctagtacagtatttctttcacatgtcattttatactactccatcaaaacccatgggttagctattattattattctcattgtcactattactcaagcctagtctttaaaatagtaaaagctcacttgcaagacgttctcctcagcaccattaaagagaaatatgaccgcatgatgtaaggcttctgaagatgtcgacaagacacgaaggacttccagcatcactgaacagctaactgcgtcatcgctggcacctttaaatcagaaaaacagatttgcttctcagattttaaaacctttatagcacaaaccatcatggcaagaaaaggagttttcctaccaaggcagcatcagaacatctgcagtagcaccgctctggcatcatcaggtaataactgcacccgccagcagtgacctccaggaggacagggatctttggtttgctcgctgacttactctcagtaactccaactgtgcctggtcccacagcggttgctcagttagtattttttaactaatcaactagaggagacctaaagcaatactgaacactggcattctcatcaccaaaagcaatttaatttatccttattcatatcctctgtagtatcttcacttctggtttcctatgtcatctccaactgccacccactcctttcctgctagtttttctgccaaaaatcataaaagctgcagatcattccacatttagagggggtcagtttggatagtgtagcattattttaaaagtttctccaaggggatcgtgtgatggaaaaatataaagaagacacctaataagaaacaggaaagggggttaatgaccaaagtattaataatatcccaggtctaagaactgataaaacagaggaccttatcaaatcacttaacctcttgattcagaaactttaggtattaaacatgactataaaggtgacttttgtacttagacacttttaaaagtaccgtaagaggtaattaaaggaactaactggatattagctgatgtcgttagcatgctcagtcatgtctgactctgtgtgaccccatggactgtaagcctgccaggctcctctatccatcggattttccaggcaagaatactggagtggggtgccattttcctcctccaggggatcttcctgacccaaggatggaagctgtgtctcctgtattgcaggtggattctttgtcctctgagctattggggaagcccttctatatactgtggaagtagatataatcagttttgcttacattttttacatctctgctcccaaggagattcgtaatattttgtctacttggtatcaaggtagacggcctcacag

SEQ ID NO: 40566 - DNA, 1062 bp, Bovine  19866881638405
  misc_feature (1)..(1): n is a, c, g, or t
ntggcagaaaccctaactttatcacaacctgatctttacatttatgactgaaattatttttaaatgttaaaataagtaaaaatatagcatttatgtcttcctacctctcctaccccagactcccttttaaatctgccatgttaaaagcttttatcaatttgtagttgttaagctcaggtggaattaagctttctataaatcatttctcggtcccaaagggttgagattgaggttttaatttattccttgtatcaacagaaggtttttgtatcctgctgtggtgtttggtaagtatctgtactaggccagcatgtttatttttttttttctatgggattattctgatatgacaaatcacattaggaaaagagaatcattttctattataataggattttcttcatttacttttatgttggctttttattctgcttaatgaaaaaaagaataatatatatgctatgcaagagtttgaataaaccatgcttgaaacaactcattgagtttcacggatataaatcaatttgggggcctttttgttcctcaaaaaataggaaaaggttatatttttgtgtaagtgccctttccggggccactgtgactcacttgtacaatgaagacagtaatagtacttactttataagattgcggtaagagttaaatgaatgaatttatttaaagtgcttagattagtgcctgacacatagtaagcaatttctgtgttagccattgctatcatcgttatcatcattattaaagttagtattgttattactattacaatgtatacatatgcatatgctttctcctcttgctcttcagcctatcacatggaaagaatttgcaaacatccaacccctttgtgcctctggaccaagctcaagggtaccagcagcttttccgagaacttgagaaggatttgtgtgaactcactggctacgatcgaatctctttccagcctaacaggtaaagggatttcttcttctgtctttttagttatcttttgtagtataataccccctgggaggaggactagacgatccaaagggcctcattttcaga

SEQ ID NO: 40567 - DNA, 1261 bp, Bovine  19866881757044
  misc_feature (1)..(1): n is a, c, g, or t
nctccttcaagtaggcaaacacttttactttgtactgcacgtgaaaactgagtacaggggcaaaagaaaactttcttttggttcatgcttcacatctacaatctactctaagagttcctacagtggtacagggaagagaagagggaagagaatcttttcagagtaggaaaagctctggattctcaaagatttagagatccaccaatacaactccttaaacaaacccccagggagcaaactcaacctctcaaagaatatctaaatgaggttaccctactttaactggaacttacagcccagaattgctgctctccccattttgactctcaaaagtagagtcaatcacacaattacagtgctgctcaagcttcatttgcatacctaccacctggggaccttgttaaaataaggattctagttcagtggggctggtcaggtgaagctaatgctgctggtcctgctgatccaggactcatactctgaacagtaagaaactagtatgaggctgacttcctacaaaatgcattttcaaactctgatgttcatcagtgtctcccatggggtcttgttaaattcaaccacttgcaattttagggtgaggtgaacatctataataaatatccactaagtgattctgatgttttatcagagattaaaagcaagagacctaacatacaaaggtggaagaggaggcaatttacatcatggacactgtgaatgtttttttatttatgacatttttcactatgtggcagtaaggtatcttgaggaaggagtgtattttcctaataagcacaaaactctgacttctcaaagatttagagattgaccaatataactcttccttaaaaaaattccgacctccagggtgcaaattcagcttctcagagaagcatatccaaatgaggttaccctactttacctggaatttacagccttgctctctctccattttgactctcaaaggtagcatcgatctattctgtcctttctccttttgactctcaaaagagcattttacaggataagggcaggtctttgacaccaatccagtagaaacctactacagacacactatcttgtccaaggactgtagactgtatttccaaaggagaatagagataataatcactcccatggctacttgtcagcttgtaaataaatacctggagcactatctttcttctgtctccaactaagtaggaacccaaggtccattcctaattcctacttgtctaccattaaagagaaatgaaagcag

SEQ ID NO: 40568 - DNA, 994 bp, Bovine  19866882028826
  misc_feature (1)..(1): n is a, c, g, or t
naatatctgagtggaatctggcttcaaattgaatcctgagaactattttattcttttcagagaccatgactcttgattaatagtgttgaacatctaacattttaccaacaatagcctatctttcattgtccaaggaagtttgtcaagtgacctttagtttgttttgaaacatgtgtgactgaaactcttttgcatttttgaagtaggggcccttttaacaaacatgccctggactgtacagaaatgagaaggcagaggagagaaaagcttaaacatacctatttctgttttgatgtttctgcactgaaattataactttcatgtttacagtaatagaataactggtacagaagttaaaatgtataaagttcaaaaggcaactttcttctgtagaactcaaggtgctgtacaggaatcctcagactttcagacttcaaagctcaaaaagtgttgatcaaaccccccatggccctgtgctctaaaggtcctgcagttcttgaggcatgctgttggaggcactccaacagcttatactgttcttcatatgggttgtttctctggtttgcttgacattctttgaaaatttcatgaataagagcttatagtagtgaatgttttaagggaagtcctttcttctactttagaacatttccaaaggtctctcagcccagtggagggaaagcttatatataagtaacgatgtttttaccctaacttgttaaattctcctttcttgtgcagcaatttgaacttattgcttcctgagaggaggtagctttgtcagtgtttacttcatagtttaaaggatagaccctgctcaagacaaaatgtagcttttctgagcagtggaaattatactgcagtagaagatcttgatgagttgtctgtattttttttctttcagaatgccagtggccagtatctgggagaagtattttttgatgtctcgttgtttgtacactgtgggttccttacagctctcacttaccgaggg

SEQ ID NO: 40569 - DNA, 1499 bp, Bovine  19866882080754
  misc_feature (1)..(1): n is a, c, g, or t
ntgtctccgaaatgtctaacatcagctttgcaaatccctgttactgttgccttgcctacacctgtgactatatcccctaaaataatcaatacagttgcacaagcagcaacagttccaggaactacacgttctgtatctctttctaaaagacaatctcggacttcggtccagtttcagtcaccgggggtttcaactacagtgccaacaaatataaacacaaataaacctcaaactgaattgccatccctttcaccaaatccaggtaaaataattaacatttccaattttgcttctctgccaaaccagcaaatgtcccctgctttcttaaaatcgatccctagttacagttctactccaggtgtcactgccattcacactgctacagcaccatcaaatgtaactagtctaatagggagtcagttcagtgaaccttgtattcagcaaaaaatagtcatcaacaccagtacacctttggcacctggtactcagatcatgattaatggagcccggtttatagttccaccacaaggtcttggagcaggcagccatgttcttcttatatctactaatccaaaatatggacctcccttagttgttaatagtggccaaggtgctcagcctacgccagtagataacctggcccagaagatcacactagcatcaaataattctttaagtgggcaacctgtaaaacattgtctaaaaagctctacaaaaattgtaaactctcttgggaatgcaagttctctatccacaatacctgcagcaccacaaatcataaacccaactgctaaagtttctgttccacctcctgtaccaacagtgtcactgacttcagtaattaagtctcctccagcaactcttttggctaagacatctttggtttctgccatttgttctagtaatcctccactgccaagtaacacttcagtatttcatttggacacgtcagtcaaaaaattactggtcagcccagaaggagccattttgaataccataaatactccagcatctaaggtttcttcagtctctccatcactctctcaaattgtatctgccagtcgaaatcctgcctctgtcttccctgcttttcagtcatctggcttagagaagcctgacacagctgcatcttgaatttagactaaacgagccagtttttaaataatggggcattgttttgactcccataaaaattttaactgtttattatactgttgaaaacatactatacatagtttgtgtgtgtgttaatgtatcttttcattagcttgcaacaaggctttgattttcttggggaggaaaaaatctgttccgtttcactcattgatgtgagtatgttttcaaaggttatttgtttaaaatagacaggatttacctgtctatatgacataaattgaacagtcaagtttgactagtttggaataagctagggttttgcacacctgcatcgacatgtttcttcttgaatttggactgttgcagcgtgtatctctgataca

SEQ ID NO: 40570 - DNA, 1799 bp, Bovine  19866880393218
  misc_feature (1)..(1): n is a, c, g, or t
ncttggaagcaaagaattctaaggccggcccatgagttattgtggtggccactaaatttttcttggacaaagcccattgggccaagtcttgggtaagtatcaggaacaacaccagaaaggtcaaaaagaaatctctctgtacttttcagcactgggttgaccttcttccagccgtagaccttgttgacgctgctccctgagaagccacccttcagccagtgacaacttcttttgccatcaagatctatgagccgaggacggtcagccaggattgtcccctctccttcccagctcagcccgccattccggtcactcctgcatgtgtgggtggccacacagactgctgcagggagctgtgtgtccctggagactggggcactgggagcctgaggccatgtctcacacaatcccatccatgaaaatcctccatttcttcctcgacgattggagtatttccagtggatctgtgctctttgtccaaaattgcaccgcagttgccttgattctctgttcctctgactcattgcctcttgtccttgggactgcacatctgttctctgagattcaccagaaagtctccagggcttgaccaggagtggcctggcccacttaggggacagccatccggatgtgaggcctcaattcatgtccgatcttagacttgtttttaatggggaagggtggctgaccgagaccaagaggatttggggaaacaatcaccagagaacaagcgcaatggtgattaacgtatgtgttcagtgtgagacagttttcactgcaatcgctgggcaatcgaggtcggcagcagggacagttgagtgtttcagctcccttcccagggttctggacggagagtgactgtggattccagcgggagtccagtgacgctggacttcgggtctgtgcgtcttgcccctaagcgctggccacgtctgttgctagtacatgctgatctgaaaaccaccacgaccgaaaggggtgggtcccaagcatgtgctcctctccacattggagagaagggtggtggagactgtctccatgctgtctcgacccgcctgcctgcccctgggattcctacttctcctgattcgctgcttctctctccaggagaacacacgctcctccaggagccttcatgaacattcacagacgttccgcaggtctcaggaaccggctggggcttcttatttagtactcatgggtagctggggcctggagagctttcaaagcccctggtttcgccagcagactggggatgaaggggccagggaggggggaaatggcgtgtgaccaggctgagccccgtgtgttggcttcggatgactgtgtaccctcgctccaaggaccttaattggctgatagagcgactgcttcagccaagggcccaattaatacccaacatttgagggttggttttccaaccccagttagatgagtttcttggcataaaaggggtaactgctgtaaatgcaatccatttccttgactctgcgcccgctctgtaatgtaagggtatcgctctgtctggttaattccagacaaggttctgtgagcagatggggaatttgggtttttgaatttgaaaaaaaaaaaaaaaagcctaagtgagtgtgagttttatgcagttacgttgatacttcttccgtctcatggaaaatgtgctaagttccaatatcgcagaaggcggactgtgagagtggagcagagtggagcctgagagggccgaggcctgccctgcttctatgggcagtcggtccagggaacctgccctgagccaggaaaccccggctctgcccctg

SEQ ID NO: 40571 - DNA, 2008 bp, Bovine  19866880407049
  misc_feature (1)..(1): n is a, c, g, or t
natggactgcagcctcccaggctcctccgtccatgggattttctaggcgagagcactggagtggggtgccacattgccacttctctcttagtctataactcgttttttctttgtatcagtgaaaattctctgagtcaaagtataaaatagccaattgagtttttttaaataacctagccatatttccatcagtgtgccaaaatgaaagagagaaacttggttgttgcttttcaaagagttaattctgatcaccatgtagcatctctcttcagcaacaggagcctgtcagcccagctacgaactcaagccctcagcagcagctctgcttctaaacaccgtctcatgtctggctcccttctgctccgttctgtctttcactttatgcaagtgtttctgctttttccaacgtgctcttgggtgtatataaatgtaaataaataaagacacacacacacacacaaacacacacacacatcaaattacacgaagaattaaggaaacgctctaagtgaaagtcacctttatgtccctgtttgtttctgaatatttcaggcaatgaaaatttaattcatataaatattcatgagtttctccatcaatccacatatacatcttaacatgtatcttccttttttctctgtgtttctgttgaaagctttttacttaaaaaaaatcttgtaatacagcattcctttgaatagaaactccattaataggccagaattatgtaggaaataaagtgaactaggactagtattattcacttatacttacagtttaataccatattattaaattttcagttcctattattaaaatgacatttatatcctgttcaactgccaggataaaaaaaaaaatccgctcctgagaagcatggtgtccaaatgtagaataaactataatgcctcgaattaactgctgctattactcaacaaaaataaaagaaataatacaaatgctaaaggttgcagagaacagctgggaaatattgccctcttgatggaagttaccttaattgtgaaataattcccaaaccaggatatcattatttaaatatgcttttctgtcccctgggaaattttttattattctgtgtctgagtaataaagtctccctctgttgtttacttacagttattgctgtcagttgcctggccaataaaatacataaactattatttatcacaagaaatacatgtgttttatagacatctatggtagattttcagtactttttacaggttctgtaaccaataccacatctctaaacatccaaggcacgctctgccccgagggcagcctttcccagctgcgacactaaatgctagtcaccagctattttgtgaaatttatacattaatccatattacgactccgcatctagttagtactccattcattctcttgagcacctacgggatgccaggagctgttttgggataaactaggtctcaccagtgaaagagggctgggcgcttcctcatcatacagacagtgcagaccctgaggctacacctgccagctgaactcaattttaaacagaacttctatacctgtggcggattcatttcgatatttggcaaaactaatacaatattgtaaactttaaaaataaaataaaatttaaaaaataataataaagtaatttggaaaaaaaaataaacagaacttctttactggggaagtaacaagccaactattaaaactaaactaaagtaataattatgacgatgatgcttataataatcataattcgaagaatactgaaagaacgtcaaggatgacatttaatagtgaaaatgttggtcgctcagtcgtgtctgactctttgaaaccccatggtagccgccaggctcctctgtccatgggaattcccagacaagaatactggagtgggttgtcattcccttctcaaggggatcctccccacccaggaatcaaacccaggtctcatgcactggaggcagattcttcaccatctaagccaccagggaagtgctttttaa

SEQ ID NO: 40572 - DNA, 1620 bp, Bovine  19866880426873
  misc_feature (1)..(1): n is a, c, g, or t
nttagaccgtttcagatcgccatctctagactgcttccacgctgccagatgctaggtctgcaggactggtgctcaggtagaagggggggtttactggctaaagcagactcgttgacaatttatccactctgaacattcttgttacatcacagtgttctctcggtataggaggaaaatgggcattattcagaaatgttactgaaaagcccactcagaaccccgaaaagaatccgataaagttcttgactcaagattgtgtggagatggagtttagggctctgctttattcgagacttgggattcgaattcaaggggcccctaattccccactctcaaccgttttgcgggaattttaagttaaattcctggccagtgcaggtggagggccggtctgtgctccatgtaaaagcactttcatggagaaaagggtcaagaaaacgggactggggagagacaagggcttctccttttgtagtctgaagaggcacccggatcgccgcagcctgcgaaggcagggagggtgtgtgtcctgctgccagccagccagtccttgccgagggcttgccgtgtgccgagcgtggtgctgcgtgcgtggagacagatgtgcgtcttcccagtgactccccgcctggcagggcttgcggttcacgagagcgtggaagggatgcccgagcaccatgggacgctgcggcacgggcatcggacttcagctgaggccttgagtaagtgtgggttagaaaggccgggagaattgcaagactcttgcagcacggaccctgagcccaggtatgttcgtggaaactttgaggaatgaagaaatgaagacatatgcagacatgcagattgtgtatccccgaggcgtggcggaccctgcctctcagtctccccttgctcggcctggggtcccggtcaggacgtccaggcccgaccctgagatggctcacggctcggggtgcatcggcagtcaagctcacccccttcccaggaggaagttgtactttgccacccacctagcttccacatcatctcagaagtaataaagcagacaggccagtttgtatttgccaaagtctcttatgctctgagcttgtaatatattggcctgtttctcctccccctgaagaaggaaactttgttctcatatttctttctgagcaagacaaatgcgcagacacatatttcacgggagctgagtgccgggtttcaagtccaagaatgctccttgttttctcctcccccctcacccgggccgatcacacacagatgcctgcagagggcgtggaaagggatcttgctcttcagaagacgaatgaggggcacgtgttcctggcgaccccctggaggctggggtgcggcctcgctcaccaccaaccacgggcttgtctccagagagatatttgcaaccaggctcccttacaaacacctcttcgaatgaagccagtaaagccgccctgagccgcctgctctacattgggcccatgtccctggcagagcgcgtgtcttcaggccctggcctggctcttgcaactggcccggcccctcaggcaggtactgctatgcatctgggccttggactctcatcccaaaatgaggtgtttgcacagatgatttccgaagttc

SEQ ID NO: 40573 - DNA, 1141 bp, Bovine  19866880548550
  misc_feature (1)..(1): n is a, c, g, or t
nctgctgtgtatttaaatcttccctaataaaggcttcttcatctttatttgctttagtgtttcccatcagttttcattcctcctttctcctgggcacactgccttgaggccaccccatcactctccaatccgccttcgttgacagctgtgcgggaagctctcaccctgacccatctgggatgcagagaaaaccttgttttctttaggttgtttgcagcttggaaattgagcagaaataaaccccagtcttcctctttcactggcccaagcaaattccttttttaaagaaaagctattttagcaataagtaatggaagattaaagaaatgtgatactcttaaaaaaaatttttttttcccatagacatgctttatatgacagctggtccctgggaccctggtcttgggactgtgggcgtggtgactgtttcttggccaaaagacagatttcgagcaagtgcttgctttaccccacccaccacgctccagaagcttgctggcctgcaggtgactgacttgtctgtgagtcagcctgtggaaggctgcggggagcgcacacgctgtttttattacaggactgtccttaaaacagagcctgggggcccgtggtgtgagttgtagagtgtctcatgagagttcctggcttctggtttgacaatcatctgtttaaaaatgtagtcttttgtgagcttgtggcccaaaatgatatggtaaaatcgaagctggagactcgcagctgtgtaagttgcagaagttatgcaagtaggagcagagaataaatcagaccaaacgctggaaagatggacattgaagggatgaacactggaggggtggaccaaagagagcttcttcagagaaaccctaaatgctatctatctgcatagtaggggctgaagtggcaacccctccaaaagacgtgtccacgtcttcaatcccagacctgtgactgtgaccttaactggaaaaagggtctttgcagacatgcccaagtgactgatctggataggaggtcctcctggattatctgggtggccctcagtctagtggcaggtgtcctcataggaaatacaaaagggggagaccgaggaggggaggagaggccctgggacggggggcagaggctgcagtatgcggccaaagcc

SEQ ID NO: 40574 - DNA, 1892 bp, Bovine  19866880779542
  misc_feature (1)..(1): n is a, c, g, or t
nacggtgagccagggaagctgcacagctgtcacagtctcctctgttggtgtgccaggagacgcaggagtcccaggcagaggcaggcagggataaaaggaaggccaagaaacactcaaaccagtccaccctagaggaaatcaaccctgaatattgattggaaggactgctgctgaagctgaagctccagtactttggccacctgatgggaagaactgactcactgaaaagatcccgatgctgaaaaaattggaggcaggaggagaaggggatgacggacgatgagatggttggatggcatcaccgactccaatggatatgagtctgagaaaactctggatagtgaaggacagagaagcctggcgtggtgcagtccacggtgtcacagagtcagacacgacttagcgactgaaccaagatgcacttccccaggacgccatctgtgctggacagcatggtgctctgcagaaatccatcaccaccctccagcacaaaatcaaggtgggagaaaaccgaggaaatacaagaggcatatcccgtcaaaaccccctgaaaggtctgcctaactggccagttcagtgccgctgtgaatagccgctttcaagtttagaacaatattctaactgaaagtcttcataactcagggctccagatacattgataaagattggttcagatctgtagaaaggttaataataaattacaggtaaacttcatgcttaaaataatctctttgtaataaatatgcacatacattaaaactgtacaaaaatggaaaacagtttctctttcctcttccttttcttgttatcgctcagagtgacggtccacacaactaaaggctgtttctttgcaaagcacatacttgcacagctccaatcacccaagtgatttatggaggaaacgactttgtgcaggtactctaaccaaaacagagcctcactttgtccagtgttcaaggccatgcttaatgaaaacttcaaatttggaagaaaaaaaaaaagtagtactgaaaagagaagaattattaaattttagtatttacctgatttattaacatttcctcgtgcatttctttttataatttgtgccctgcctaatggaggaagaaaaaacaagtgtccttttatttaccggctttgaaaaggtcatgagaataagaaaaggatacacatacattgatggctgtctcagtttccattttactgcacattcagttatgaggttgttacttcaatgtcaccgctggtggtaagtagagtttagcgatttgcaaacattctcgctctttttaacctgatttcttccagggataaaagcacgtggcacagtcaggtgagactcttcctgtcacaggtacagccgtgacagaaatgccacctggggagccctggggcgttgcagatctgctctgcaagcatggagtccccaggaagctggagacactgcaaataacagaagagacacacagggcgagagctggggctcgtgggacctagaaccattggaagatgatggaagtcgagcacacgcacgcaggcgtcacggagtgtgtcagcgtctacccagaaagctgcccgtcatcaaatgaccgaagatgacgctcggggggtaagggcatcctggcaaggcgaggacaggcaagagcagcacacctcccagtcaccaggacaggctgatctcagcgggcacgcggcctgcgggccggtcaccgtaggacaccactatgtggacaaggatatcccttgcttacttgctgggtggtgctgttatgagtgaaggtcctgccactcagacgaggggccaaaaagcactttggggggacttcacacgttgaaaagtacgcacctccacccagccggcagccgtctctgcagtcactggctccaaggcc

SEQ ID NO: 40575 - DNA, 4049 bp, Bovine  19866880865088
  misc_feature (1)..(1): n is a, c, g, or t
nattctgaaccttacagtacacgtgactccagcccctcacactgaagatgagaaaaccaagactcggagtgtctgcagcccttgggtcagagtcagcagctcggggctgaggggtacacggccctgcatgtcaggccacacgggccgagccacacgggccaagagacggcaggtacaaacactcaggatttcacgcgtccatccggagataaattccaggagcacatattttattttaataaaaacagctcatgaggtgaaggccctctaggaaatatgatacaagtatttctctgaataattattagctttaaaaaacttgttatgggaaaaatggtatcctgcttttcagaaaaatcactaataactctggagaaagggcaagtgattaattttaccacaagaaagctcacaacattagccatcacctagaactgtcccacatcgttcctttccctgcgtgcagattcgcgtaaccaaagctggacaccgtctccagggactcgctggtgtcccccgcgcggcctgtcagaaagcccagctgcactgtctctgggccgttaacactagatgtgcagtcaggtaatgccccacatccctaccacggaaagttaactttttctcaaacgaaaactggagtattaactgtgcctgctgggtttggagaacgtttcccatcccaaaataagcttataagcacagagacaggaatggtcactctgctgataactgttttaccaccgtctgtcaaattagggaaaatggcagggggaaaaaaaaaaaaacccaacctttatattgtcatttctgtgtgcctgttcttttcaccattgaaaatgacggtggagctggccagaaagtgagccacaggcaggggggcgacacagcctcgtgtctcactggctccttttccagggggcagagttgcacctgacgagggaaggtgccacacacgccgttaacagcatagcccatccactaaagggtgtcactgctcctcgttaacctgccttggtctccatttttagcttttatccttctcttgaaataaaaaatgagcatcccttcacgtctgtgtaccttcgagccgtggcagtcaggctcagcgaggtcgggaaaacaccacgaacagcaatgctcggtgcaggctttctgagtcgctcaggcgtgtccagctcttggtgatcccatggactgcagcacgccaggcctccctgtccttcacaatctaagaaatcctagactgggggcgaggatcagggcgtcacagccctgttcctccagtgctggccgttcctaggcactaaaaagaagtcacttaaagaatcctgcagaagactctaaatcccggtcctgcccacatgctgggcattacttcacacattgctcttatgcactgaagtctgggacaaaaactacaaaaagagacaaaaagacgcccaggctgtcttctctccatagcttgtggatctgagctgccaggtgatatgggggcagggggagatgcacgaaactattattttgtaaaaaaaaaaaaaaaaaaaagtttgtttctaaaaacagtgatttcatatgaaaaagtagcattttagaaaatgaaaactaagtgcacatttgctcaaagcattttagaaacaggactgttacagcatacagatacagtatttcacctccgcagtgcacgcatctgtggaaacacattcactgcccagtgacctctgcctgcactgaagagaccagcctttaaaagcagattcaccttctccactatcgcaggaaacaggaaccgagtgggaagtctcctccagtctaacacttactgatattatttattgttaatttgagtctttattgttgctatatgatcctcttagaaaactggctaatatatatattatagttcatgtatatatttattcttgtttggctgctaagtcgtgcccaactctctgtgaccctgtggaaagtagcctgccaggctcctgtccatgggattctgcaggcaagaatactggtgtgggttccattcctttctccaagggatcttcccaacccaggggttgaacccgtgtctcctgcgttgcaggcagattctttaccacccagccgcacaggagctcttgtgcgtatatacatgtacatgcaaacaaaacccagaacattttccagccacaacaaggaatgaaatcttgccgtttgcagcaacacggatggatgtggacggcgtgacgctgagtgagcgagtcagagaaagacagatggtgtctgccctcacgcaatgggaaaagacacagcaagcagaaaaagggaccgacaggtacagagcgcaggctgctggttgccaggtggggggaggagtgaggataaaggcgacagcaacaggtgagggcggtcaagagccacccagcaggaagacaggggaggcggggggtgcggcagacggcgggtgaggacggtcaacacgcagctgctgcagccttgaaagatgctcagagcagatctcagatgttctcatcataagataaaaaacactgtacctaggcttatcatggtgatcattctgcaacatgtacaaacatcaaatcatgatgctgcacatatatgccggagaaggcgatggtaacccactccagcactcttgcctggaaaatcccatggatggaggagcctggtgggctgcagtccatggggtcgctaagagttggacacgattgagcgacttcactttcacttttcactttcatgcactggagaaggaaatggcaacccactccagtgttcttacctggagaatcccagggacgggggagcctggtgggctgccgtctatggggtcgcacagagtcggacacgactgaagcgacttagcagctatatgccaactagcttgcaattttttttaaaaaggaacaataacaaaaaactatttctacctgaccctaactttaagaaaacttgtactgctgtaaacgtgtccagtccatccacagtcacctcaggcggctgacatgcaaacttggtagctccgtatctaaaagaaattttagaagcaaggtttcttcctcaaagaatagaatgctgtaattctttttaaaagactatattttagttacaggaaaaaataataatactctgtcaaaaatgacaacaatatgcacttttttccaccttggaaactttagacttgaaagccgcccatagtgtaactcttccagcgttccagttgagtcctgagaccaccagagtaacagcagcgctcggaaaccacagggccggcctggctggagtacacacacggccgccggggaccggaaacgcagccagatggttctgctgagggaggcacttttctttataaaaccaaaaaggcagtaataggtcaaacacaaaaatgcagatacggtaaaaccgaaagctagtgtggagactgatgtcaataagacaagcacagctctctgcggtgttcccatcgacagcagtcagtggaggcagggagacaaaggaaggaaaagcaaccccgtcggtccagaccagagactggagtggttcagtggggccaccaaggcctggaaaccaatcacacgtgagggtgttagactggacacttacgaaggatcacaaaaacagcagaaacggacccacgtcccaagtctgctcatgggttgctggcctgtccatctcacccctgtcaggaccccaagaagccctcctgggaaggcactggacacgggtctgggggcagggggcacggcggggacggcagggtgctgggccgagagcttggagccgcccaggctggtcagaaccaggcctccagcgagcaggcacgcggcccaggcaggccctccggggagagtcttgggaggggaagacctgcccccacgagccccagcagagcagagcagggcagggcggccacaggtcagagctcacctgagggtctgcggccttgtcttctgggcaagggcacagggcacgggccaggggttgggggtaactcaaggggcgggtggggccaccgccaacctggggtcactggagggcaagga

SEQ ID NO: 40576 - DNA, 1431 bp, Bovine  19866880881957
  misc_feature (1)..(1): n is a, c, g, or t
ntttgtcctttcacaacaggaaacgcatgccataggacaaagctggtattaatttacttaaaaaaaacaacttactctgtttctacaatttagatgccctaaaatgtctaagatctgaaaggataggggaggcctcctttctccaaatcaacacactccccaggtttcaagagctgctctttaggacacagatgagaaaaggcaaggagatccaaccagtctatcctaaaggagatcagtcctgggtgttcattggaaggactgatgttgaaactgaaactccaatactttggccacctgatgcgaagagctgactcatctgaaaataccctgatgctgggaaagattgagggcaggaggagaaggggacgacagaggatgagatggttggatggcatcaccggctcaatggtcatgggtttgggtagactctagcagttggtgatggacagggaggcctggcgtgctgcggttcatggggtcgcaaagagtcggacacgactgagcaactgaactgaactgagaaaaggcagggcattgggaggctctggaatgctctccccttttattttctatttttcaatggaacccactgaatgtggtggcacttctgctgcaaaagaggctggaatctcagttctctcaaagctgctgctgctgcttttggtcactcagccgtgcctgagtctccgcagctccatggacagcagcccaccaggctcctctgtccgtgggattctccaggcaagaacactggagtgggttgccattttattctccaagggatcttcccaacccagggattgaacctgtgcctcctgcattgacaggcggattctttaccactgagccgcctgggaagccctctctcaaagctactagacacataaactgtagattcttgattcacagcagtagggagtggactgtgggagttggggctttgattctgagtgaccaattcttgcaaactcaagtttaaggaaagatactggaagtcatccaaaatcaatcttctctcaatttcattatttcaggacaagcagtggagccttcgcaccgtacggaacaaaatcaataaaagccaagaacaacagggtacactctttcgagatcatctcgtcaagactccgcggaggcaaacacaatgagggatctgtgagctgctagaataacaccattttcactttgttattcacagggccctaatctgagccccatcttcctgtttcaaatgccgtttcaatatttgaaatctccacagctggtaaaatcacaaacacatctgtgaatttctatccccctaaatcagatgagcaagtggccttcctctgtctcaggttcagatattctgcattaacatactgctttctttctgcgtgtattttttgtgtccatctgaggctcaggacccttcccggaaacatcagc

SEQ ID NO: 40577 - DNA, 1702 bp, Bovine  19866881055196
  misc_feature (1)..(1): n is a, c, g, or t
ncggctcagagtatcacctgtagctctcgagaggaactaaaggcctttgactttgcttaatgactaaactattattagtcttgttggactgtcttcctttgtttctatagtctctcatttctctaattaaacttatgctttggctaaagtttttccaaggacaaaaggcaggcgaaggacatgcgggggggcaggaccacagagtcctgctccacttcaagcagaagaaatagagggaagcagagagtcactcgctgctgacaaagtgcgagccccaacatgcagggccagcgatacggcatggtttaaggcctcgtccattcccagcgtcagacagctgacaccctgggcttgtacactgttcagagagagaaggctgggtggaaaaacccctaactatactttagttcacaggccacaagctgagactccacgatgctctttctcttctctttgctgttttggaaactgaatgaatcggttacatttttcaaatactagccagaacacatcagctgcttcttttaaaataaacttccaaaatggggcaaagtcaatgccaagtaaggactctgcttctaaatataaacttactacaagcaccgcaggcaaaagtgaaatcattcaagaaacctgagtgctgaatatttagagggagaaagtgtgcttttcatggatttctgagtctttgtagtcaacaggagaacacaaataataactgatattttaaaccccatctggatatatcatactgacaaaacacaacgaagagattaggaagcacattttgtgaatgcttagtttcagtggtagacagcgtgcttgaaaaaagatactgaggttgagagagaatttgtagatttcactttggatccatcatcaacttcctacaggaaaagccaaagatcatttcctttctcaatatcgaggatatcgtcaagcacaggcagcactacggtcaccagacctaagtcggggacaggccaggaactgcaaggtccttggagagacagaagagtgggctgccgtctatggggtcgcacagagtcggacacgactgaagtgacttagcagcagcagcaggcacgtttctatcaaggtagctctaactgaagtccaggtgtttaaaaaaaacagctgaaaattcctcagagggaacaatggctcagtctacaacatgacatggaacagtcagaagcaaccaggcaggcccccaggctcccgccagaaaagcggacccagttttacatctgctgggaaaacagaggcaccaagaacttaatgatcacaattatagttcgatgaggccgttgagagtaacttactttcccctttactttcgtaaaatagttgccaggacctgggatctttaactcacaccctcctccagcagaacagcatgcccagatacagacccggagcgggacagacacacagagagaaggcagccgggtcaaggacagcaattccctgcctggacggaggcagccaggtcaaggacagcagttccctgcctggacggaggcagccaggtcaaggacagcagttccctgcctggacggagcatgccgtggccgcggactcgccggacgttggtgggccccctgtgcttggtgtgactttaacaaggccttgttacttccagcttgctttgaagtcctttatccctgtcactgcatagtctaaactaagtgtttaaaaa

SEQ ID NO: 40578 - DNA, 1040 bp, Bovine  19866881081553
  misc_feature (1)..(1): n is a, c, g, or t
nttagcttatttccttcttgtgaggacacttgtcggggtggaaactggaagtgagttaagtggaattttatttattctccttcccaactggacacagcttggaccaaacatggaaaggtaccacagaaaggcaggggcaggtagaacattctaactgaggactcagtcagaggcaagaagattaaaccagattttataattattttcccacatgacatatttataaatttctataaggagggatttccttgtgcccaaatacacttgcaggcatttcttttggttatttaaactatcatagaaatcacttacaaaatcttcatctacaccagcaaggtagcacagcccacagagcggtgtcagtgagcaccacgagggtttccttctttgcttaaaacaagcatccatcgcagcattttctaacacctggaacatggtggccaagtaacacatggcctcagcgggagctgtttaccaaaccacctgagacaaagcagctttccaatagatgtgcacagcccccagggtgtgcatgcacactcactgtgcacagacactcctgctctcagagcagccaggctctgccctgacgccaggacacgtgtgtcctggaggagcagcccctgggcgaagccccctgtgcacaagggtcccagacccaccggtgggagggaggccgggacaccctcctcactgaggccggtgagctgttcccagtcccggggtggttgggaaagagctccaaagtataaatagagcccaggacaaggactatatttacttaggggtgactacagcacagaataatttaggtcagctgacgcaagagctgagaggctgaaccgtgacagcaactgccccgggtcccccgcggtcacccagccaggcggggctgcccggggttcggtcgctggcctgcgcagctctgctctgtcctccccaccctggctgatgcgggcccgacaggatgagtttccggcccgtgagcggcccccgcggtaacgacgggccctgtgggtgaacctcctgtacctgtgctg

SEQ ID NO: 40579 - DNA, 1274 bp, Bovine  19866881082773
  misc_feature (1)..(1): n is a, c, g, or t
ntgccggctgctatttaaacgcgagctcctgccagcccaagggggctctggggggccacagcggcaggaaaccagggcatttatgactgagttcctgttattgacttactcgcagacgaaacgccaagtttctcagacacagcgcagcagccccagcgtgcaagccccgtgtgtgccgctgtggcgttaggctgcagtttctgtttcacgtgtcaggacttttttaagatgacttttaaaacgtccctcccacgttttctgtagtggtttaggggaagtcgttgactctaaaatgaatgttttgtgtttgttcacttacatgcagagtacatcaggtgaaattgggctagatgaaacacaagctggaatcaagattgctgggagaaatattaacaaccttagatatgcagatgacactactctaaaggcagaaagtgaagaagaactaaagaccttcttgacgagagtgaaaaagctggctttaaactcaacattcaaaaaactaatatcatggcatctagtcccatcacttcatagcaaatagacagggaaaaagtggaagcagtgacagattttattttcttgggttctgaaatcactgtggacagcaattgcagccatgaaattaaaagacgcttgctccttggaaggaaacctattccaaacctagacggcatattaaaaagcagagacatcactttgccagcaaaggtctgcatattccaagctatggtttttccagtagtcatgtatgggtgtgagagttggacagtgaagaaggctgagcaccaaagaattgatgcttttgaactgtggtgctggagaagactcttcagagtcccttggactgcaaggagatcaaaccagtcaatcctaaaggaaatcagtcctgaacatacattggaaggactgatgctgaagctgaagctccaatactttggccacctgatgtggagagcctactcattggaaaaggccctgatgctgggaaacattgagggcggcgggaggagaaggggacaacagaggatgagatggttggatggcatcaccgactcgatggacatgagtttgtgtaaactccaggagatagtggaggacagaggagcctgatgtgctgcaggccatggggtcacaaagagttggacacaacttagcgactgcacgacaactaaccacgtgcccaagtcacacacggcgacagtggcctccggtgctggcttccccggtggcacactttgacagacggcctctggcacccttctgggccaagg

SEQ ID NO: 40580 - DNA, 795 bp, Bovine  19866881108302
  misc_feature (1)..(1): n is a, c, g, or t
ntaaaatgcactagaaattcactccagtcctcatcagtagacacttttacacttttacacgacagaggtgcgtctgttctatttcgtgctttctttactgtcacgtgctcactcccaccagcagcagagatgcgctgctctgacattttctaggctaaagtcgtctccacaaactcagaggcacagatccatgtgcttcaacaaaattaaagcttttgtttgagagagaaaaaaaatggtctccaagtttcctgtaaccaaccttctaaagaagttgagtggctttctatttcaaagagaagacagacatcttgctgtcatatcagaggatcaacttcccctccttttatcatcttaagaactgaagcgtctctttcctgtctcatggaacttaaagctctgtcttcatactcctaggtttccatagggagctcactggtcgaggctttgagatggttccgcgtcacgctgtttgattttatgaagcactgatttggaactggtttggaatgtatgctttctctttctcccattgtgttctatatccacttagacattctaagaaataatgcttgtttctaagcagggagcacacatgacccagcaaacgtccctgtgtgctgcagtctgcacacccctgccgctctgcaaggcagtgtggtcaggtggacggctctgatgcggcccacggcgttccagagtacagttcccaaagtgtgattgggcagccctgggaggtcccccaagcctgagaccctggagccccgggtccagccaaaatcatttctctaataa

SEQ ID NO: 40581 - DNA, 708 bp, Bovine  19866881656425
  misc_feature (1)..(1): n is a, c, g, or t
ntgggcgctacacccgtagccttaggccttttctgaggtcacagtaacgtgaccatttctacaaaaaggggactcagggagcacgtgtgtgctcccggaacgcggcgtgctgtcggcagccctgcgtggagggggcgctggggcggaggtggaggtgccccggatggaggtcacagcgagcacgctctcggggagcggggagcacagacagaaagagggcgcagaatgcctcctcatttaaagcgcggctggtctcttcaggcagctcaccgtgaataacgaacctgggagttaaaagctttaaacctgttaaagaagcaatattaggtttggtataaatatagctgaaataatccagacagttttatgaccttacaccccaaataaaggtgaaatgctgaattctttccctagaaatagtggtaaacacagctaacagatggaagagctgcatggaaatttcagtaacgagggccacaaagaagcatttgtgagctcaggggcgcacgctttagaaaaagaagctgaaaaatggagctttgtttgattttgatagagtgccaaaacagcactgcattccttacagggcgaataaaggctcaagaccggcctctcaacacctcccgaaaggccccgcgggccccattttgccaggacgactatttatatgacaggtaaggggagtagttctgctggattcagttacag

SEQ ID NO: 40582 - DNA, 1350 bp, Bovine  19866881738884
  misc_feature (1)..(1): n is a, c, g, or t
naacatcatttgcagattacctatgatttaagaccttgtcttactgtaataaatcttagaggaaagtgatgttcttttgaataacagaaatgctgaaacttgaaattactggcactcactagttttctaggtcatccacttttcaaggcgtcataaatatgcctaagctttctgcatccagacacaaagcagttctgctcggaatacagccctgcgtgcgccccgggccgcgtgcacttgctgagccccctgctcctgccagggcaggctcagggcggcgaactcaggccgcctctgactctggggacctggcttgtatccagctctcgttccctggtccatcagccttccccacctctctccctcccttcactgcatctgtgtgtttggggcgacattcctggctctgtgctagctgttgaagattgaagaaacccaagtctcacaaaatgtggccgttctttcgtgtgtacttttgctgtggtgtttctgggcgtcttttctaaaaactttgcctgtcttcagtcgccacagtttggatttcactgactgcttatttccagtattttcagtctttttcactctgttattgtttcattttgcctgttttcaaaatttttttcctccttttagctgatgttattaattttttggtctctttgggatatatatgaagtcaacattaaagagatattaaggggaaatatttaaggtcattttcagaatgtgctattattttcatttcctcttgtgtaaattctctcttgaattgtagatcttggttctctgtttagcatgagtaaataattgtttttgaattatttaaactaaggtgtttgaacttcatctgaacgctgtgaggagccattctacttcaagaagaatgtggcctgattagattttacattttgggaagatcattctggtagcgtggaagatggagtgtagaaaggccaggaccagaggctgggagatgtgtttggaacattgagtctgtgcaaaggtcatgatgagagacccgggtgttcgggggtagactcagcatggacataggggtcacgaggagcagctgcgttgtgcagggtggggtgcccaggctgcctggacgcccttctccttcaaggccagccctctttcctgctgcacctctggccacgttactcactggctgcttggaatagaacgtggagcctttgtttcccttgcttccactgaccatcatgtcagtcaagaggatggttgctggacacgtgtgtggtgtcctcagatatacagaggaataagcctggaaaggactgtatgtgggagaaagggactgaggcttaggttgtgacaaaacgaggaggaaag

SEQ ID NO: 40583 - DNA, 850 bp, Bovine  19866881854668
  misc_feature (1)..(1): n is a, c, g, or t
ntggggacagggtcctatgggccacttggccaatggggtccacctgggagcagccactaggcaggggtcaccccccgcctctgtctgcagggcccacgccctctcctgcctcgaatgtgggtgttcctggcgaatagtttccgtctcagtgtggagctgtgcatctgcctggcccaatttctgcccacgttcggtgtgcaccatgaaaggccatttttctttttgaagcagatccaaaataatacacatgatgaagtgcaggcaggatgcttgtggaaaaaggcaacttctcccaattttttcagtggaacggatggctgagccctgtgagccgcatctgtcggaggagcaaagcttccccccttcaagtcagggtatcagccgcagaggggagtccagagcaccccgacggcagggccacatggccgaggcccgcagctcccagcggacggaacgcccgcaccagtgctgagctgtgcctcggtttactttgtccccaaaggagaataacatgtgtcttttacttagaagacagatttttatcaaatgatctcaatggagaacccttggaatgcctttgaaaaagtcaactgtaaatacaggaaatcgaagaacggtgattacaaatagcggttgggtctctgagcatctggttaaagccattggactttcaggtttctgctccgaccagcgcacaccgacgggactgtgtgttcaagtctgtttctgcagatgaagagcttgactggccacggaggactgaccgcgggcagaggggcctgaaggccagtactggcgatggaatgcgtctgagccttctcgctgagcttcagaggagacagagctccca

SEQ ID NO: 40584 - DNA, 1299 bp, Bovine  19866880348430
  misc_feature (1)..(1): n is a, c, g, or t
ntatagttgtacgtaaatatactcatgtatattcactctgggagcgatctgaccagagaaagggtgctgacaccatgcagtgggataggccttgcaaattccacctggttatagtatccaagatggtgttccggtgaggattctctcagcaagccgtgtgcagagcaatgattgtttacaaagattattcaaattctagcccttctgctcctggctttgtgcttcattccagctagtcaatgtgcagaagagcaatggggaaaaaatgtagctgagatctgaatatattcccttaaatacacctgattacccaaggccccaaacttctgctttacattaaacatgaatttaatgagtttgtgatgaatttctaaagaagctctaaatgaaatgttttctaccttacctattttaaggttttcacctcaaactttggtggtggaatagaaaaaaaaaaaaaaaagaataacaacaagctttttcacttggagaatcttgatagtccaatgtatagcatttttccagctgcctctcttcctctcacccactcccatcaaaggcataaactttacaatgaaatgcctactggagagctcttcattgactttgccaaaagccttccttctgtttactcacctaacttcagggccaagggaaccaagttctgcctttaaagattagctaaaaatcctatttttgtgccctctatgagatagttaaataatgtttgatgataaagagtgattggtcacttgggaagtagatctgaaaaaagatcatatcagcctgcaaattctaggaagtatcaaactgcagaatgaccaacaagttggcctgtcatataattgcagagagaggtaggtggcagataaagaaaagatcccaggagatgcttgcattgattgtcacattactggcttagctgaaatctcccctgtctaaatcctctgtctttttctatttctaatagctttcactctccatccccatcagactgtacttgccctctattggttgctgccaaatgaatgttgttggctaggctttgtgaaacaggtgcctgcttgattatttgcaccaatgtgatgtatgtgttattatgaaatgagatgaaccataactagtgcatctggaccacaggataataaggaggagaaaaaaatcttgcctcttcacaactaggggagaaaactgtcacttataaatgaagatttttttttagaatggatcattggtaaggcattcaagagtccataccaggagttatttttaaatcctttcttcagttaaaatcattaa

SEQ ID NO: 40585 - DNA, 2833 bp, Bovine  19866880469051
  misc_feature (1)..(1): n is a, c, g, or t
ncctagacttggcttcttgcctcttgttcaggcaccaaacagctgggattactgacaacctccctgagacaccctgggacacactcgcttactttagcactacttaaatctctctagatagtgtattgctttgtttcctccaagccaattattgctttaatctcacttcttatcctttgcctccctgagactaaaggaacaagaaagagtacagatcagaggctattaacctgggttctacaaaccccaatgtgaatagacttagggccaacctcgaacaaaatccctgacctctcaaagggtaagaggtccagaccctcttaatttcttgaggatccaggtagattaaaaagcaaatatacctcaagagggctgtaaaaacagttgtttatttttaactgtttattatactaaatgaatttttttagcacaaaacaatatacagcaatatatgtgtgcaaagtctggggtacttaacagtgtttattacaaaatatgaattcagagtgcattcaggtggtatggttataaggttaaggctgtgtggtgaatgttttatttatttatttttttttcagtcctcagaatgtgtctctgtgagtggtgtgtgtaatctcattttacaaagaaggttcagggacttccctggcagtcccagtgggttaagactttgccttccagtgctggcggtgcagcttggatcagggagctaagatttcctatgccccctggccaaaacccaaaacataagacagaaacaatattgcaacaatttcagtaaagacttttaaattgtccacattaaaaaaaaaaaaagaaaaaaaagaaagaaggttcatagtccaaatgtgagtatggctgggaatgtgcgtccctggccacgtgatctccctgctgcctttttattcagctcttcctcagaggctttgtccctgacattgaatgtgaacttttatgttcatgtattcattgcctggattttctccaagcagtccattctcccccaaattaagaactacttgtctcagaaatagcctaacctgcaaagagttggacacgactgaggaactgaactgaactgaactgaactgatgaagcccagaccaatgaaaagagcttctcatttctgagatacagaatactcttcttttaaattgtgaaaatattttagccttgcaatttaatttcatattaaaagcgcttttaaatgacttgctgcgttttcaaatgtgtaataatcttaaaattcttcttgttttctttatttgccacctctccattcctattccagaatccataaggtttaaaacaggacactgactgttctgaatagtcaggggtctaaccctcaccttgctgtgtgaccccgtggaagtgctttccctcttgatactcagtttctacgtctttaagatgagatggtgattccatttcacaagctccttttagttttaaaaactatgatttctcttcccaaatactttaagatccaatctccaaagccactgtcatggtgtcctggccaacttggttagacataaaataatttgctctttactacaaccaaaggcagtactcactagctatggattcagacttacttttccccttaacccgatggcaactagatgtttactttgtcatcttggtgaacagatcatttctgataatactcaagaactttaaaacaaagatgaaaaaaatcctgacctttggcccaaatggtgcagtggtagagtccgcctgccaatgcaggagacacgagagacgcggttcgatccctgggtccggaagattccctggagtagtaggaaatggcaacccattccagtatttttgcctggaaaattccatggacagaggagcctggcggtctacagtccatgggttcccagagaatcggacacgactgaacacgcacacgcgtgcgcacacacacacacacacttacacacaagttgctggatatagtcctgcactgatagtttgaggacactagatggcgatatgagtgcatcaaataacaagcacatccagcattaaaatcccaatgattgaggccagagtaggttaatacattagttaaagaaacaaagttaaatataatcaggtgttggagtgttagctaatactctgaatgtgttcagtaacctgattcttagcgaaagaaaagagtgttagattagaaattattttatgctactgctgagtctatcttcacgctaattcttggggcaagagctggcaataaacccatgtatcccataaaatgtatctaattcacacttttctctccatttttggttttcatcttttaaaaatagcagttgtttggaatggagtgtgccctgtatatattattcatagatgaagtactacattctcattaggaatgtgagtcctaagacattggtgtttgaaaggggaaatggctgacttactgtaagccgttgcctgggccattattgactggcaggatcaactggaagcactttgttagtggattaggttgccctggaaatgccttcctgaaactctaatgatgcacttaagggaaccctctgggacaggagtaaaatgtctctttgcaggcgtgtcttccaccagagtcctcttgggatgagatgggagggggcgggggcacatccagagagaagcttcgtaaggaaacagacccagaaaaaagttgcaggtaacgatgtcttacgtggaagccaagataatgacttactgatagaaaccctgtttttttccgagggtaccagttcttcctatagtcttgggaaggagcatcagaaattccagagagactgaaggtatggatgtatatatt

SEQ ID NO: 40586 - DNA, 1876 bp, Bovine  19866880508808
  misc_feature (1)..(1): n is a, c, g, or t
nggattcctgcctgcagtagtagatacaatggtcatctgagttaaattcacccattccagtccatttcagttcgctgattcctagaatgtcgacattcactcttgccatctcttgtttgaccacttccaaatttgccttgattcatggacctgacattccaggttcctatgcaatattgctcttcacagcatcggaccttgcttctatcaccagtcacatccacagctgggtattgtttttgctttggctccgtctcttcattttttctggagttatttctccaccgatctccagtagcatgttgggcacctaacaacctggggagttcatctttcagtgttctatctttttgccttttcatactgttcatggggttctcaaggcaagagtactgaagtggtttgccattcccttctccagtggaccacattttgtcagaactctctaccatgacccatctgtcttgttgtagataattaccttgatcttagtagttaatttcaaccaccatttataaaaactggcaaagtagatattctggaaattgcatgacatttcctgcctgtcagggatatcaaatttgggtgttgacataattctgaggcatgtttactttacttggctttttagacagtatgctggctatgactactcgcaccaaggccggtttgtccccgcagacatgatgcagccacaacagccatacaccgggcagattttccagccaactcagacatatactccaactacacctcagccattctatggaaacaactttgaggatgaaccacctttattagaaggtacagttggttgcaactcttgatagtactctataatatccagatggtgaaagtaaatctttgtttggaggaattcctcttgtctttaaaagaataaggttgtaggaaaaaggtttctactaagtgactcatttcaaacaacactgagccagaaagaaccagatttttttaatagatctttatattagtgataataaagtatgtcagtatgtgagcaaagtaacctttggaagataacctttggaagtccagtgaaagctatgcatactcttctcagaaaaatgcacatatatacatagaagacatagttttgtatacgtttttgcagggcctcctgtgtttctgaagccccggatatagagccctttactatgaatgctgtctgtgtattctttgctataaagtcatagctcacagtgtctgattcattatgtccttaccttcttctaacaccaaaccagagatttgatatttgtggaataagcactgtaatcagtaaagatggattgaggactcactaaaataatatcatctgatgttgctagatcacttttttgatactggttgtttcattttcttttttcaccctgttacaacataaattctggtaaactgaaagtatatcacaaatcctaattgactttcttattttctttttctttagaattgggtatcaattttgaccacatctggcaaaaaacactcacagttttacaccccttgaaggtagcagatggcagcatcatgaatgagactgatttggcaggaccaatggttttttgccttgcttttggagctacattgttactggtaagattctagttggaactctcagtgtgagattaaagaatggaatttaaatattccaccaagagcctttattaagacttttcttttacatcaagttttgatgtgtcttaaaaggtgttggaatttttaagtttatacatatttgtcacttcaccattgataatatggtatatttagaaatcatttcttgttctaataagtggtccaattattagggaaaattggtaataaataacatgtagctttagtcgctcatcagaat

SEQ ID NO: 40587 - DNA, 1535 bp, Bovine  19866880619376
  misc_feature (1)..(1): n is a, c, g, or t
ntataaataaaagtttataaacttttcaataatgattatgctttatggtgtgtctaagtagtttccaaagtctttttgataatttaaaaacttaaagttatattgagataaataaaataattgatattcactgagtatctagatcattttaagataaaatcctgaaatattaactattgaacatgatttaacctcctttatcttccctttacagaaggactttgggtatattattaaacatgacttgtgaaatattggaaaacttaatatgaagaagaacgtacttccagaaattataaaatgtgtttataaatttgccaatccacataattctattgcaacaaacaatccacagtttcttacctctctgctgtcttagctcagtcggtagagaatctgccggaagtgcaggagtcctgggttcaattcctgtcaggaagattccctggagaaggaaatggcaacccgctccagtattcttgcctgggaaatcccatggacagaggagcctggaggactatactcctcaggttgcaagaatcagatatgacttagtgactaaaaccaccacctgccttcttaggcaggaacaattatctacaactaaaaagcaaggacattgggatacagaagacctaaagaaggtattcagtgtcacacagcccatacgtgctgtagcttaaattcaaaccaggccatctgaccagagctcacaacttttaccactaagtcaaccttatccttcttggagaacccaccatctttggcaaatgcttagaatctctccttgggagtgatgaggagtttcatgaatcatccttattttcttgcgtggctcaccttgtgaccagaaaaatagattttacaatgagtacacacaaagcatgtatgccaagaaacataaatcagtgggtgaaaatgcaaggggggaaattcatacttaataaggagcagatggactaaaatatctttgttgtaggacagggaatataagtcagcaaagaggttaaataaagagttgattcaatgacttcttcccaaagatgagcagagcatccaactgctggctattaaaagaaatggcaactagaaatcttgagtgctcagctgggcttgagctttgtgcacaatgcctattaagcatgacactgaagctgaaattttacacactaggtgggcaattataataaattcatttttgtgttacagatttttttccccaagaagaaaaaaaaaatactgagatggggaagggtgtcaggtcaaagccttgatgttcttttattaagattttttttaagcccattagagtctcagggttttgaggcgattgtacagtttttgataaaacattacccaagcgaattatttataaagctgcaggaaactgcaaactctggtgaacaaatctttttgatgtcctcatctcctgcaggcctgttttggtgccaccctctgtccccttctgcagatattctttggctatggctgcccatttgcctcaaaaggcagcccagccaccaaagaaaagcaaa

SEQ ID NO: 40588 - DNA, 1027 bp, Bovine  19866880674378
  misc_feature (1)..(1): n is a, c, g, or t
naaattccctgaaacacaattttaataggttgatttttatacaatgtgattcaaacttccttgcactcctagtttgtaatacattgtgtgatagatagtagaagcttatgttctctttgttgaatggatgaaaaagtgttagccttgggaatttttaataatttggatacatcacatgtagatttattcataattaacctacaggcactttaaatcacctatttagtatataaatagataaatttagtatgttaactatgaagcaatgatgataaatacaaaaaaagaaactctcctgactgcctcttcactcttggccccaggaccttggcatatactcttgctttgtcttaaagaagtttccttctccttttgtcatctctcattcaactcaaatcccatctcctccacagtattttctctacttggtttagttatgtttgccttttatttgcatgaatctgcttttattaaagcagggaaggtcattgccatacatctaaggatctttttagttcaatgcatgctgctgttgctaagtcgcttcagtcgtgtccgactctgtgtgaccccatagatgtcagcccaccaggctccgctgtccctgggattctccaggcaaaaacactgagtaggttgccatttccttctccaatgcatgaaagtgaaaagtgaaagtgaaggtgctcagccgtgtctgacttttagcgaccccatggaccgaagcctactagactcctccgtctatgggattttccaggcaagagtactggagtggggtgtctatgccttctccgcaatgcatgctagggatggtctacttctttattctccaatctagaagaagttcagtttaaataaccacatcagaaaacaaaaggaatggaagccagagaggatgagagggaagatgaacacaggtaatataactttttttttttgtaattttgttttttacataggcaccctgcagctgtttaataaaaccatccccttgcagtgataaattacttgcaaattatatcaa

SEQ ID NO: 40589 - DNA, 1335 bp, Bovine  19866880785713
  misc_feature (1)..(1): n is a, c, g, or t
ngagtaggatgattattcgttaaaattatttttactctccaaacatacacttggaataaatagcacatgaggacacaggaaaggccatctggtgactctgtgtctgtttgtgtgccctttggattggttgtcccatagggctcagctttgtctatgctgatactgccccaccaggacatactgtctaggagggaggcattacttacatgttagaaaggacaaaccagtgcaatagcaaggcattgcaacacgaatctcactttattaaaatcaaactttaatcatgaattgtggaatagaacataggcagttaggaactgctaaaatattaacacatcaattgaaacagaaacccaggcactttattatcctcatgaccagctctgggatttaataattaagtctttcagtttgatttatttagactctaagcaaactttcaaagtgagtttgaggggctttgtacttggaacatgaatgcattgcatttcccaaggcagtttggaactggggtttcatcacttcaacaccctgctcagaagcgggtattctgagaaacttctcctgagcacaattactcattaattgtgagaaggacttcagacatctcccttaagaaattaatcttcaggaaggagggagtaagggaaagatataatactgaggagggaaacttgtattagtcacagcatattaatttctcttggtactacaaagtagacacctctctcatctaagcctttagctggttctacatagttcctcattggccagagtgagtggaaagatgcacccctttagcatttagaaacattagtcctttgacttgatagtgtggaacgttgaaactaacataatcctgagattaatcatgtggcaaattctgagataaactgagcctgaacatacaatgtaacatcaacccatctcaaggaacaggattggtaaatcaaagaaaagaatgagacctaaatacagtacagatttaagggtagcattttattcagtggcacataataatcttcgtttgagagaagtcaaggaagggagaaagggagtgaatcacacagaaagatgtctgcaactagttttaatacaagagagtgagaacaacagagaggagggaaggagaaaaggagagagaagaagagaatacagagaaaacagaaagagaaagaagagagcactgctacagcaaagcatagtatccaagcttcaaaatatgctttggggatatttgagcattggaaaatgaccagttgacttagtcatttgccaaatcatgcgacaaacaggatctaaatgaaaaattgtgtctcatcactgtgatgatag

SEQ ID NO: 40590 - DNA, 971 bp, Bovine  19866880865180
  misc_feature (1)..(1): n is a, c, g, or t
nctgattgtggtatttatgacataatactggcagtctcccatctttagtgcatggtcaagatagagagctgtgagctacagttatgtcataggctttggaatcaatatacagtttataatttacaaaattagtaaatgttttttttgaatgaacaaatctttagtggtttcactactccgtgttgtagaataagtgtgtgtgcatgcttggttgtgtccaactccttgcgaccccatggactgtagctcaccaggcccctctgttcatgggatttcccacggaggattactggagtgggttgctgattcctcctccagaggatcttcccaactcagggattgaacctgcttcttctgcatctcctgcattgacaggaggattctttaccattgggcaggtagaataagtattgatatataaatatgcagagctggatttgagatctgtcagtaggtctgtggaaactctgtgtatctcacaattgtcatctgtgagctaaagggattgtcctagatgactttgtaggtccattctatccttaacatttaatatgtgtccccagtgggtaaatgtgtgtgaaaaacatttcacgcctcttggactttttggtgagtttaaaagcaatccatccatttactagttatagaagtcaatctgtagaaaactagtagaaattttatacactgtcatttctttaatgtccttctagttatttcatctgtattttcttctctgtggggtcagtgctgtatagtatggtaaaataaatctatcttctgattgatagtatgaaaattgctacatagcctcagaacccaaatgggttgtcatgacaactgatgacatttctttcctgcagactgtactgggagtccatggcctgtgtgtccctgcaaactgttccatgttatttgtgcagtgggaaagctggagccagtaatggtgtgaaggtaggacattatccaactca

SEQ ID NO: 40591 - DNA, 1376 bp, Bovine  19866880898322
  misc_feature (1)..(1): n is a, c, g, or t
ntaatcttcagccagattccccaaatgaatcaaattgttttcttattttttgccaccaccttccaacaaaataacttttacccttaaatcagtgatgtagagatttttgttgttagctgtcttttatttaacccccaaataatcagttgcaaaactattttattattagctattttgtcaaaacagctatacagtggagttgcctttgatgtaagtaagagttgagctcatgaagagtcatatgtagccaaaatttcccctttgtaaaactcaaatcaaaaatacagtatatatagccatatttgtgcatacttaaaaaacagatatactgtgtctcaagaatgccatgtggtaacttttttctactggttcagttaagtatcaggaagagcatatggtttgcttttacacccattttatgccaaaacatgcttgtacctttaaatactggagatgctcacagcattactaaaagcttgcctgttcactgtctctgagtaaaactgtctgggagtggagtttgcaggttcactcactcaagctagtgtgtcgtttatgcaagcacgtgtatgccaaggacatgcagttgattttacatatagtgtaaatgtgtattttacaactttgctgtaatactgcatttaccaatggatgtttcaagagctgtataacaaagcttatagaaataggcattctttcgccagatatagtcatgcagataatgaaaaattctgtaaatctttaaatattaactatcctcggatgctacccatccagtcaaagagaattgtttaaaatatatctaatgacttgatattggataggatctaagtactatgcatatgacatttcacaactctaataggcattgctcaaaatatacttataaaatatactaaatattatcaaaactaaggacaattacgtctataatgttatcttacagggtactcttatgcaatcatggagaattatgggcatcacgataacattttgagatctgctgttttcatatagagcaggtctaatgtaatgactcagacagtttgcttaacttgccctgtgggaggaaaaatatataagtgacacagtgcttggcctttcataaagtggggccaaaggttttccaaaaaacacagcttggtacacagatcatagcatgaatagaatagcactggaccttccttcaaaactttagctagagcaagcttcctccccaaatcatggccccaagtgaaatttatcctcccaagtatccactaattcatttggtagtgtcagattccaattactggtcaccaaatgaactcgtttattaaaaatcttaatttatttgggaaaaaagacttaaagtatttctcaagcaatttgtatct

SEQ ID NO: 40592 - DNA, 1550 bp, Bovine  19866880903336
  misc_feature (1)..(1): n is a, c, g, or t
nattcttactgaggctcctcctgggtgttcagcactggggtagttactggaaaaagttatgtgtgagactgaccaaggcaaatcagtaatccttaaagttaaaataataatcatgacatcattataaaatcattataaaaggagactataggtataattataaagtatgtttagaattgattactgttcatctaaggctatcatttggcttctaattttgcacatatactttcacaagacaaaggtttgatggaagggagaaatgaagagtttaaaaatgaagatattggctcctaatcaaaattattcatactggaaatgatggaattaactaaatgagaaatggagcaatggctaatgattttcagatactcctaagccatcctaggatagaatttctatgactctatcagtcagctagtatcttaaagtcaacagatgcattaggattttagcattttctcctctaagcattaatataaaatgtggttaaatttcctgacaccccaagttcaaattagaagtttcctctctacccttttatcaatttacacttctttattgcatgagattgaaattgcccattaactagttcaatctcttcttaaactacatgctccacgagaacactgatgaccaaatgcatctcatttacaggtgaatctctggaactgcgtgcatcctcatgtgcatagtaggtgtttgaaatatattctagaaggaatgtataagccaaccataagacgtttaggaacctagcacacgcaaaagcaaaggctcagcaaggccccagggactggcatatactcacacaaccagaaggtagcaaacagaattctgtacaagcaacagaggctagatatagaatctaccaattaaaggaggtcattctaaaatgccatttgcagcaacatgaatggacctagagactgtcatattgagtgaagtaagtcagactgagaaggagaaatatcatatgacatcccttatatgtggaatctaaaaagaaatgatacaaatgaacttacttaaaagacagaaaaagacacagatttagagagtaagcttatggttgtggggtgagggaaggatggggggaagggatagttagagagtttggatggacatgtacacacggctatatttaaaatggataaccaaggactactgtgtagcatagggaacactgcttaatgctatgtagcagcctggatgggagaggagtttgggagagaatgcatatgtatggttgagtccctttgctgctcacctgaaactatcacaacattgttcgtttatcggctacaccccaacacaaaataaaaagattttaaaaaataaacaaaggaggtcattctaaggaagggatgacacaatcttggtataaaactaaattgtacttcacatgatgctttgttctttgtgcagatgatggaagatttcaagggcctgcagtttccaatccatgaggcctgtgcacaatgtgaatcacttccctggcagattgtgggagaagtactagagaatcatgagcatgaggaatttgtgaa

SEQ ID NO: 40593 - DNA, 1204 bp, Bovine  19866880916912
  misc_feature (1)..(1): n is a, c, g, or t
ntgtttgaaggccagtaaaaaaaaaaagaaaaaaattgccactgcagccaggatttgtgagagtgatatttcagaaaaaggaagctcactgaggtgaggtgtaaagcctaacaccactttcctgcttgggagaatttttaacatttttttttttaacagaaaatgagagtctgaggagccaaaatagagtcagcaactacagatagacaagtcatcaggattttggcagttttcaggaaaaggaaaacaaaaactcaagttggaggatgtcaaggctgttagtataagaggaaataagatttttcagaggacagagggtagatacataagcctaaaagtgttagtcacttagtcatgtctgactgttcacagcgctgtagcccaacaggctcctctgtccataggattctccaggcaagaatactggagtgggttgccatttccttctctagaggatcttcctgacccagagacggaactcatgtctcttgtgtctcctgtattgcaggcagattctttacatgtggagccactggggaagctacataagcctacaactcagtattttcccattgagacatctgctagttcttaagctgtgtctttacatctaacacaaaaccactttgttgccactaaagcttctttcctctattaagtctgaagaacagagaatatcctatgctcctacttgatttcaggagatagaaatcaaatgattacggagctcatacagctgatgaaaatgaatgaagtacttatgtggaaaacagtagggactggtggggtctgcagtaagctggaaaggacacactgcatctaaagaaggcaacaactgaggaccaagaaatgtgtggtttttaggaacaagaattctgtatgtttaacacaggagagtagctctgagtaaataaaattggagatgaggatcccaaggaggagggaccatgacaagaactcctgcctttcagttggaaattctggagacctacaccttaggaatacttatcttttttattaaagaacaagtgttttttttaatatctattcatttttattttttgctgcatcaggtcttggttgcagcatgtgggatcctcgttctctaaccaggcaacaaacctcagttacctgcattggaaggcagattgttaaccactggaccacagggaaaatccttaggaatacttatctttacactcat

SEQ ID NO: 40594 - DNA, 959 bp, Bovine  19866880930868
  misc_feature (1)..(1): n is a, c, g, or t
nacgggctggggagcaacggtgcagtctctgccttgggtaatgctgaggcaccagatagcttgttggaggacatgttgaaataaatatatgtagcttttattgaggtaaccgtttttctatcaaggacacgtgtttgtgtgtgtgcaggcaagtgggcatatatgtgttgctagcatcaatttgggtaggtaaatggaaacacgtgattattccacagtactgcaaggatgatggaaacaatatgctttttaaataagcagatatcgcatggaagcaggacccaggtgcttcctttctgaaggaaactcccaacacacactgagatccactattaacaatgaacacatatcgacagaaaagcccagagattctcaaatcaaattctttaaggcttataatactgtagattcagctttaagggggagaaattaaaaagcaatcattttaattattatgtttatgtcaagttaagctaactgctacagtaatatcacttggcttagtctactgtaattaattcagtgaatgtacaaagaaaacaaattagaactatttatagcactgaaactgagtggaaatgagatattgcccaagtgctattacaataaatataggttgttgacactccttcaaactatgctttaggactttcagccatttatgttattcttcaatggtaaaaacctccatgaaataaagaaaattccaatagtggatctcatcaatcttattttcagatgtgcatgtcacgttgagtaaccaggcacttgttttatttgagccaaattaaataaatctcattaaggaaatgttactagtatgcaaacactgaatgcattaaaaaaaaaaaaaagctgtctctgcaattagatacaaatattacatgactttatgagttagtcccacagaggaaaatcaggtcaagtttcctctcatttaacggcatagattctcccca

SEQ ID NO: 40595 - DNA, 1001 bp, Bovine  19866881235205
  misc_feature (1)..(1): n is a, c, g, or t
ncataactacacagctgaggcagaaagatgcatgttaaatgaatttaaaaactgcagcttacctaggtggttttgaatagctaagcatggtgatttcttatttattgtctagtttaaccatgtcatgccttaatttctatgtaccatgaggaaattagaataaagtcactactagactctagtgttcatattaattacttagggagtttctgaaaaatccatcttcacagtctccattgaaaacattaatccacatggtctagaatggagacccagaatgtatacatttttaacaccctcaggtgattttaaagttgttgtaccatgagtcacattttgaggatttctagaaaaaaagattttcaaaagtcccttccaatcataattgagcagaaatgagatcactggcttccccagatacagtacggaggttttgttaggaatcggcattttttttaacatatggaacgcccgtgatctccattatctgcctatggttgacccttttcttcccctgaaactagagtggaaaaaaaaagcttatgaagagaaaaataaccattttcaatttttaagaattgtcagtcagctctgaaattattctaagccataatacttatatcctatcatagatagtaaatgagctgcacagaagaaatcacaaatgtgagaaacagtttataattttaatgaaactaagaaaactccataatgtattcttcttccaaatgtcttttccctttagccctctgcttgcagattgtggacttttggagagaatgcacatagtcttaaactttaaaagtttacctttgggtggcttccacatcctgcctattgtaaatagtactgcaatgaacattggaatgtatgtatcttttcatggttttcttggggtatatgcccagtagcggaatttccaggtcatagggtagttttatctttttcttaaggaaactccatacagcttttcataggactgtatcaatttacattaccac

SEQ ID NO: 40596 - DNA, 752 bp, Bovine  19866881237910
  misc_feature (1)..(1): n is a, c, g, or t
nattttgaaaagctctatttcactcttatcaagtcacacatgtacctctgatatcttggttaccatcagagccactttttgagtcaagttgtccaaagcagtaacatcagagccatataagctgtttgagatagagttctgtttgtgtcagcctatcgtgaagcccctggaagtctttgcttaagctgtgacatgacattcccataacactgacagagaagctgaacaggagttccagacaagaacgtagaagaaacagaagtcagacttattcgggaacttataagacttcccaaagtgcaagctgtttaagcaggtcagctctggtgaaacgtatcaaatgcatagtcctggcagcacacttgtcacaacagagatatctgagctaacctttaatgagttggaatagttttaccaccttagggaagttgggtggaactggaaataaaaatttcatcttaacttgcagtatctatgacccagaaatgtatacaagtcaaacacttggggtttggtggcagagaatagacctacagccaccagctgtgatagtgcatacgttattttctatggcttggttccttcatctataaaatgaagataaattgtcaacttgtaagtcagaatcaaagggtataacatttatagcccagtgactgggcacaaaacaagcatgtaataaagagtagttactatcacagtttttaatattcattcatccattcattccaataaatattgattatctacta

SEQ ID NO: 40597 - DNA, 878 bp, Bovine  19866881279332
  misc_feature (1)..(1): n is a, c, g, or t
natctgagcctcaagcacatctcccaattaccctagggtctctccaaacgacaggctggtttgcaatatgtggttccaaagactgccagaggacatcaggcaattgtttgaaaatgcaaccagtgtcatatatcttcatgataaattgggtttccattccatcaggaaaaacaatgtctatgacattaaaaaagaaaaagatttatgtatctgatagaaactggattcaacctgatgcctcttgaccaaccccttgaatttttcatatatgtaaatgagatcttgagagctgttacatactgctactctgttgtagtaccatcctattgaacacagaggctaagattacccctagataggatattaaataaaattataaatttaaatggaaaattagagaaagaactatggatggaacagagatggaattctaatttgcaccaaagacagtaagcaaatgcatttctcttattgccattttgcccaaggacatttgtacatataggtctaaagaaagaaagagaaagtaactccaatgaaagtgaccaaggggttggagcccagtttgagaacatcagtgctttgtcactagctaatcagagtccagagagagtcctttcccagaagcccaatgagttaatgacaactaaggttgtttggagttcaacaaaaaaagcttttgaatcgtagttctgttccatgtctcttataatcatttatttactcaaatatttaatcaaatatttacatggtctgtttgtacaaagaactatgtcagacactatagaagctgcaacgattaatgggacctagaagttgccctcaacaagctgatgatccagtagggcaacacagcttactctgtgtccgaattggag

SEQ ID NO: 40598 - DNA, 1222 bp, Bovine  19866881534026
  misc_feature (1)..(1): n is a, c, g, or t
naaaagagaatgagacttttaaaagcttcatttttatcactttacttagtggaaaattttgggaacattttaatacagttgactcttcaaacaccctgaagttctatttctgagataccaatgaatattaataagacttcaaatgatttgctggaaaaactagaaaaaaaggcaacagattgcaacatggtgaaggtacagttcaaaataaagaaatagttatttcagtttcatattaaagtataaactttactaaagctctatctcctatactgatcttttttttttttttttttcaaaaacacaaaacctgagagtttaaaataaaacccacagacttccattaagtaagcctgggcttgacgcttccagagtagacaccaacaacatacacacacctacatggtatagactgatgactttaggggttagaagagtttcattgtgaatttgccaaggactcattatgtgattatgtgaactcagatccattttcttcttttcatctccttttcttggcaacactttctactttcacaagaagttaactccccctctttcttttccccaacccaaccaaacttgccaccatttctttttgctgttgttattacctttttaaaaaggatttttaaaattatttaatttattttaattggaagatagttactttacaatgttgtggtggtttttgccatacatcgatatgaaccagccatgggtgcacatgtgtccccccaccctgaacccccttcccacctcccttcacagcccagcccactgggttgttccagagcaccagctttgagtgccctgcttcatacatcaaacttgcactggtcatttattttacatacggtaatatacatgtttcaacactattctctcaaatcatcccaccctccccttctcccacacagtccaaaagtctgttctttacatctgtgtctcttttgctgtcttgtatatagaattgttgttaccatctttataaatcccatatatatgcattaatatactatatcggtgtttctctttctgacttacttcactctgtataagaggctccagtttcatccacctcattaaaactgactcaagtgtgttcttcttatagctgagtaatattccactgtgtatatgtaccagagcttccttacccattcatttgccaatgtatatctaggttgcttccatgtcctagctattgaacagtgctgca

SEQ ID NO: 40599 - DNA, 792 bp, Bovine  19866881728988
  misc_feature (1)..(1): n is a, c, g, or t
naagaaaaaaaaaaaaaataaacctttggaaagaatccttaaaacaaaagagagttgcaagaggtaccgggacttagaagcttttcagaaagcccagaagcaagacagatgctccctgctggggtcccaggtagccaccccacctgccggcaaggacaagcgggctcccatgttcccagccaggtgggagcgggcggccgccgcggcgcagagatgccggcgcggggctcaggctcgggcttctccggtggaggagctgggtggttccacagttcccagtgcagttcggatgctgttgtttcagcagtgcaggcaagaaaccatccagggaaatgactattacatcatcttaaaggaatatggcttggagagagcggaggcagctccgagtcacgtccgcctcggtgacaggtcgtcgggactgcacggggacgccgcgctccggccgtgggcacgcgagtcccccgggcgctccaggctcggggcggggacgcagcgcggcgcagccgcttccctcccggtcctgtccgggagtctggagtttccaagggcctttgctttgccctttcgtgctgtctctagacctccacagccaccaccatgccccagaaacaacccctcaacccagatgaacacggcggtttttcatttttaaaaatcaacaaacgattcctttgcatgtgcactaaatttctgctaaagggcaaattgccccctctaaagcttgcttaaaagaaaaaaaagcatactcaatgaccccaatgttcaagctacaaagtgggtttttctctc

SEQ ID NO: 40600 - DNA, 994 bp, Bovine  19866881751376
  misc_feature (1)..(1): n is a, c, g, or t
ntactgaagctgaagctccaatactttggtcacctaatgagaagagccaactcattagaaaagactctgatcctgggaaagattgaaggcaggaggaaaggggcatgacagaggatgagatggttggatggcatcactgactcaatggacataagtttgagcaaactcctggaggtagcgaaggacaaggaagcctggcatgctgaagttcatggggtcacaaagagtcggacatgacttagcaactaaacaacaacaaaggcagtttattttatgcattacagttttttgcaatatgcgtatctatacaaaaagctaatgatctttttaatttctaacaaattcccaaatgatgctgatgttgctgctcagggaccatactttgagaaccaccgaactaggggggtctcaccacaattcctcacttagcttatgtgataacatgttgtgagttacatgcaactgaattgcggcagaggctgttcacagttttgagacattttggatggtgaattctaaataagtgttaacaggagagcagtggtgtgaataatccaccaccatggataatccaaaagccatttcagcttgattttggaaggtgttcaagtcggattttaattttgcaggagcactggttttgccttagcaaataggttttttgctgaggccaatgttaaaactgagtgactgcttcctgggtaaaaacacatgttttccaagtgaggaagggaagccagagagcctggcatgatagctgtgaagacaaacctggcactcataattcacaaagcagacaaaggctaactgagagctgagtccatgtaagacatataaaaaaattgtagttcctaaaaatatgcatgaaagttgggaagatttgggggaaactcatcacttcctctttctatacatactaaactctgtagcttatggaattcaaagtatttcccttttaccctgtgatcaacacctacacacacacacccctgtg

SEQ ID NO: 40601 - DNA, 838 bp, Bovine  19866881878234
  misc_feature (1)..(1): n is a, c, g, or t
ntgtgctccccagcatttaactaggaggtggtttacttaatatatcattatactgttcaagaagtaatcttaaggaaataaatatctcttactgagtgttccaattattttccttggtaacttcaaatatgagagttgaaccataaagaaagccaagtgtcaaagaattgatgcttttgaactgtgatgttggagaagactcttgtgagtcccttggactgcaaggagatcaaaccagtcaatactaaaagaaatcaaccctgaatatgcattggaaggactgatgatgaagctgaagctccaatggttctgccacctgatgcgaagaactgactcattagaaaagaccctgaatgctgggaaagattgaaggcaggaagagaaggggacaacaggggatgatggttggatggaatcatcgactcaatggacatgagtttgagcaagctccgggagttggtgatggacagggaagcctggtgtactgcagtccatggggtcacaaagagtcaaacacaactgagcaactgaactgaacttatcttcaaataagcttcccatcctcttttctatcttctttcccttaatttttttggtccctttcttctcctaccccagtcacattgacccatttcgttcccttctgcttctgtatttgtgataaaatatttcctgtatatcttctgcttctttgacttaaatattattcatgtctccttgatgtagcaatttaattactctttcaagaacaaaaccatacctaatcttaattttccctccttcctcataattggataattgcacatttggtagcttaatcattcaattgtgcatgtga

SEQ ID NO: 40602 - DNA, 2576 bp, Bovine  19866880378770
  misc_feature (1)..(1): n is a, c, g, or t
ntgcttattcttctactaacatatctctgcagatgtctttacatccaattcactatctttgccaaattgttgtttggggagcatgtaagagcaaaaagacatgtacctttgagaagcttaaagttttaaatcttaaagaaatagaggcaaatatatagctggttatatgagcaactgtgaggctaagtaacatctcataacgcaggatattgatatgcttcagaacctacaactcaaatacactttataatagccattatataaacaggttaccttatgaaaagaacagtaataaaccaggtgtcctttatctcatttcaaaattgaggggcaaagatagttaggtcttacactagtagaagaaagagtgggttaaagtaggaaagacttctcagagaaattcagacctaatgggtaaatgactcagggcttaaatgaagcctattgttttggtgagtggaacagattttggtggctgacaaaggtctctgtgtaggtggaggagttacagacagcttggttacaagatgaggcaaaagcatactgaaggatgaaaacagatatatgagtgggtggaaatttatagtttatcttctttcaatgaagtcgattgtccggtaaaattcctagatttacttaatttacttaccaattcaataaggtccttgaagacaaaaaggatgttgcattctgacaaaatgtaatcataatgcaaataatttctatctatggactgttttataattcacacaaataactcagataatgtattacaagcatttctaaacaatatactcttcctctaaaatctgtatatctaagagtggtgtcatctattagcagtccttagacttgctgagtcactctattaatcctcttgcagctcagccatcattcagagccccagtaggttgaaagttggcaactgcttaactctacatccctaacatcctttacaggaatgttgcaagactgtgagcctcaggagggcaaaggtcatatccatcacaaggattcgtgcatcctcagaaacaggtgcagtgttttacacatagtaggcacaaaacaagtatttgttggatgataaatgaaagagtaaaatgaaatgaagtttgagacttctgaaatgcacatcttttctatattgtgtattctagggtcatctcaggatttaattcctagatttgttcactttagttctcatagtttaacttgatcttacttgattgaagaattagcaaatttaaaagactgggatttgggacttccctggtggtacagtggataagaatccacctgccattgaaagggacacaacattcaatccctggtccatgccacagagcatctaagcccttgcaccacaactgctgagcctgtgctctggagcccaagatccacaactactgagcccatataccgcaactactgaagcccatgcacctagagcttgtgctctgcagcaaaggaagcccacacactgcaacaaagagtagccccagctcactgcaactagagaaagccagtgcatagcaacaaagacccagcacagccaaaaagcaaagactgggatttggaagtggggaggagtacatgggggtgagtcaagaagaaaaagcaatgatatacaagtgccaacatttgtcaaagttagttaaaaaaattgcctattacaagattacttattatatttctcatagattcgatcccagggtcatgaagatcccctggaggagggcatacttagcaacccactccagtagtcttgcctggagaatcccatgaacagaggagcctggtgggttatagtccatagggtcgcaaagagttagatacttactgaagcaacttagcacccacgcacatgtacgcttcccatctcttccccttggtaatgtatacatcccccagtggtttgggctgtttttcccaacttgagtgtcttgtgcctttgaagtgccatagtatcttgagatttctttcataatttttgaccaaaaattttgctttagagatgctggaaagtaacaagacagtgtaaagacatgagtcagaaaatcatgattacatgtagaaatagctacttgaatatagcatagtttaaaaacatggattctgaaacaagactgcttggattcaaatcatggcttttcccttatgagctgtttgatttttgtcattacttaatttctccatgccttagttttctatttggaaaatgggttgtgaggattaaataaatattatggttagagtagctccaagcacatagtaagtcccgtgttaatcttagcttttatcctgatcttgggtaagtcatctaccaggtttagagtttctatgtataaaatgagaggctttgactagactctaagcctctccaggacctgcttttttcaagcaatgacagttcatgcatttttctaccatacgtgtgtgtggctagggatggagaaatgcatgattagttagtaaatactttccttgattgatggcagagggaactattgggaaattgagataagcttcttcactagacactaaattccttagagtaagaagcatatcttttcctc

SEQ ID NO: 40603 - DNA, 1712 bp, Bovine  19866880430833
  misc_feature (1)..(1): n is a, c, g, or t
natgagttgtcaagctgtctcaattctgtcttaaacttaagttcctagattttatccaatatgtcttaaaactctcccatatgctgctctagtgcaggattcccaggtggccaccttcctgtcttgcccagcctgctgaagctgcctctagctgtcctttctgaccttgacctccagtgctctgtacacctgaagtctgaggggtttttacaaaataaaactcaatgtgtgtgacctgtgtaaaactctccagtgatttctcatcaccctcagaagtcctccctaaggaattaaaagtcagaccctttaagaagtcttcaggaccttgcgagaggaagtccctgcctctatctagaatcaacagctcttaccctacccccaccatggccagccccccacccccaccagcatatatcagagttacactccacttacagccttgcaggacttctttctgttcctctaatcttctgtgctttcctgacaagtctgcagggtgtgtctgatgctgagattactctccccctctgttgcttcacttttctctgaagttgtgttagtcactcattcgtgtccgaccccatggactgtagcccaccaggttcctctgtccataggattctccagacaagaatactggagtgggttgccatccccttttccagggaggcttcccaacccagggattgaacctgggtcttctgttttgcaggcagattctttactgactcagctacttctagctcccatttcttctttttttcttagcttaaatgtaattttctctcagggagtcctcttcaccccataaactaaattaaaaaatgctatttttttctgtaatacttcctatctctttggcatttcacttgttacattcgcatgcctttttcagtaaattctaagccccatgaaggcatagatatgtctgtcttgttctacactgtatcgtaattaccaggcccacagtaggatcttgaatgttttttgaatgaatgaacatgttcaaatcaaccccatattagtgtttgccagccacacatgcatttcagccatccccttttgttgacttaaattagctttgcttaattgtactaactatatataaacatgaaataaaatatatactctttatgcttatagcttttatatagctgttaaaccatttttaaaaatcaccaataaatgcaaaaactattaaacaattaaaatttaaattaatgaatgctttttttgctgagtcttaatcacttatgtttatttattttaaataatataaagttgttgccttgggtcctaataaatacttaatgcgtaacaaccttttgattttgataatagtaattcagaaaatacctgttggcaataaatatattattcaaaatcacattatggacttgaaggccttgcttgctatctcaggaccatcagactgcagctgtgtcagtgagcagtccttgaattacagttttaatgattttaatgatttccaatttctttgctagtgtagttagtgtcttatacattcaaagactagtattcacaggtactgaattgacatcaaacatacattcaattcaatgattactagagtcaagaaaaggagcacaatgtttgtgaaatttagttcttacagatttttagtttcagcatacagccaagtgtcagactgttgaaggaagtcaatagatagtggaaatgactcatttaca

SEQ ID NO: 40604 - DNA, 1414 bp, Bovine  19866880471065
  misc_feature (1)..(1): n is a, c, g, or t
nttcacaatttgttaaggacaaacaactctgggaaaagttttcccatgacccactcccttatgaacatttttaatatttcaaaaatgcttagaaactggaacaaagcaatttaaaactctcaaagggccagagcaactagaattagctgaagaatgcattatacatgaaagacaccaaggctctataaacagggcatcttcttcacaccaaagcacaagaaaacaaaggaaaaactaaactaacacagaccacagaaaatatcacatgaaaggaaattcacgtctggcctagcctacaaaagaagaaacgcaataaacaggcttggtttctgtgggctccctgggagcaaggagcagaaagaggagaatcatttcagtcttgaaggtgaaacttccaaggatttctaggattattaaggaggcaaacagaggcagagggtcccctgcctccatctcagtccattatccgttcactgcaatgcacaatctacattctgtgtctgcctctagttctttctccaggggccaaagatgggaagactattgacatggatgatcatttatttcatcaacacttgtatcacacttattatgtgtcaggcactattctaaatgtctcacaaataagaacccacttaatcataactactgcacaagttaggcaccctgagttttcgtgctttacacacaggaaactgaggcatggaaatgtcagctataaaatttgctcgaagtcaaacagcactagtaagtgataaagctgaaatctgaacccacttttaatcatctgagctacaaaaagctataaagtttattgcaattttcttctttatttcttatattttcacattttcctgtaatgaggacttactacttttatactaataaaaaactaaaatatcatttttactttgaagtatcaaaccaaaaaaataaatgtaaacaaggctttgaatatctcatgtatgaaatcacacctcatctgtcagaagctaagaggttaggtcagatgatcctctttggatcatctgccacaagatttcaattctatgccctgttttccattacacaggcagtaagggctgcagaaaatgtagacaaggcagcaattatgaacacatggtctggaaaactgatctgagatctagttccagtttgcaaactatagaatctggaataaatgcttaagccctgtaaacttcagttttctgataactgagtatagataactatacctgtctgccagagttagctcatgtaaactacttaaaaatataaatgtgcctggcatggagtaagagatcaaaaaattgtcaaatacaggaaaactaagctgtccagatatttgcctatgtaaatgattcctgggccagagcaatcaaataaaccaaataaagtgaaagtcgctcagttg

SEQ ID NO: 40605 - DNA, 1925 bp, Bovine  19866880632426
  misc_feature (1)..(1): n is a, c, g, or t
natggtgaagaattttgtcaaaggcagacctaaaaagaatcactcatgacttttctgagcctccacattgggttaacttagatgatgatgtcaaacatcatgaaaccaatcttgtttcatttaatagtttaggggttttcaagccactttcacacacctgtcatgtgatgcccataaccatgaccaggagttcgtggtcagacacgattgtcctcagttgccaagagaagaagctgaggcacagggagttaatgatacacagttaacggatctgtgttgaaggtttggatggtgtcaaagctctttccctaacctgtgcaaaacagctcgaggacaaaaaagcaggaatcatctgtgttctgcagacatggaaataattttctgtaagcattcatgccctcaaacccttaaaattcaaaagtcaaaatctccaaaacataaaattctaaatgaatagaggagactgctgacatcttcaaggctgaaaggcaacaaatgcagtatcaccatgataaaaaatgattaagtgctaatcataccagctgggatatcatcaaattttgcattagcagcatagtagagttattaagtacattatgttaaaagtgcatcctgccagaatctttgcatttttccaccaaaaataaaaaggaccttaaatcaacgttaaaaggatagaaagtaaaaagataaaatgatgtcatttacacacagagttggggaagtggcctcaatgaacaggcagttgaggcctgcagtttccaaatgtcaatttggagaatgtattaggcagaggtggggcggcggccaagaggagcaacccaacatccaaggagcagtggctgcatgggtgcaggagggctgagaggagctactccacattcaaggtcagcaggggtggcggtgaggagatacccctcgtccaaggtaagagaaacccaagtaagatggtaggtgttgcaagagggcatcagagggcagacacattgaaaccatactcacagaaaactagtcaatctgatcacacagaccacagccttgtctaactcaatgaaactaagccatgccatgtgtggccaccctagatggacgggtcatggtgggagaggtctgatagaatgtagtccactggaggagagactggcaaaccatctcaatattcttgctttgagaaccccatgaacagtatgaaaagacaaaatgataggatacttaaaggggaactccccgggtttggaggtgcccaatatgctccgggagattagtggagaaataactccacaaagaatgaagggatggagccaaagaaaaaccaatacccagctgtagatgtgactggtgatagaagcaaggtccaatgctgtaaagagcaatattgcatacaaacctggaatgtcaggtccatgaatcaaggcaaatcggaagtggtcaaacaggagatggcaagagtgaaggtcgacattctaggaatcagtgaactaaaacggactggaatgggtgaatttaactcagatgaccattatatctactactgtgggcaggaatcccttagaagaaatggggtagccatcatggtgaacaaaagagaacgaaatgcagtacttggatgcaatctcaaaaatgacagaatattctctgttcgtttccaaggcaaaccattcaatatcacagtaatccaagtctatgccccaaccagtaatgctgaagaagttgaagttgaatggttctatcaagacctccaagaccttttagaactaacacccaaaaaaggtgtcctttccattataagggactagaatccaaaagtaggaagtcaagaaacacctggagtaacaggcaaatttggcctaggagtacagaatgaagcagggcaaagactaatagagttttgccaagagaacacacggtcatagcaaacactctct

SEQ ID NO: 40606 - DNA, 1707 bp, Bovine  19866880674329
  misc_feature (1)..(1): n is a, c, g, or t
naaaacacatttccttaagtgcctagttcatctgagaaataagagattagtaccattaacaaaggctttgatcattttattactaagaaagttgttaaacatgcttgctatctctgatactgctggtgggtgagtgggccttatctgtggtcaaatctgttatgtgaaccatgaaaagcatccatccttgcaaagctgctccccacctctgcctcaaaagcaaacaaacaacctgacctaaagagagtatttgatcactccaaagtaaagccagtctgggtcaggtccatggtcttccctatctaagcaaatcacaagaaggcaaatatcacagattggagctgtagacacttaatctgttacccatgaccacaggtttatgaatctgagcaaattttgtaaagtatggcttacctttggggtttacacaaatcatttaaaaatagaatgtaaagaaaaataaaaactataaagctgatggctgaggtgatggtaccctactgtgcgaagagagttaagaccagttgccttcatctctcatctggacggcattttaataacttgtccatgaagaagcctccagtacgccttaggaaaccactatatacctgtccggaaatgtgaccgttggttaaggctacattttttacacgactgagagcttgtaagaaatgtgtgactaaaataagccttgccatttcctttacctgttcctcccccataaatctgcatgaaatagtcattcagatctccctctgcccacgttgctggcactcacacacagtttgatgggtgcttattttttactttaaggtagatagggacttgaaagtgcttcctaaccggtttgctgggagcttaaaatgcttaaaaagaattcgaaagtgaagtttagccttaactctttgaaatatctgtctgggatgtgggctaggtgtccgtggcacccaaagctaggtaaagagcaaggttttgaaggtactaaaatccgatgtataccgtgggtgggggagggaagaactggcagagggagagaagaaaggaattagcttctacagagcacatcctaaggttcctgagtcgctaactccatccctagccgtgtcgtcgctgagaaccagctggaaagggaaagaccagcgagcctgggtttgtgtcgaaagcattggtcttggtctcaatcgccggcctagacacctggtttctggggcccgcgagatccagcgaaaccctctctcccctcgggtcctgctggggagcaggcatcgcgctctcgttcccttcggagacctaattcctctctctccccaaagtgctaacttcaggggctcgggggtggtgaggaagagcagaccagtaggtaaagaccctgaggtctcagggaggtttaaggttgaaaagaacgacgatctccccttgcgtggccccgttttctcctggtcccccagccccatccccccaagtccgcagaacctgccgcgctgcgcttggcgccaggctggggtctctcacccgacgctgggctggcgcggaatgggtggggtaaggattggcgggtccccgagctccggcagcggatggctccagggaccacacgccgggcaggagcccacagtccgcccgcccgagagcggggggaaggcagggacgcgaacgaggcggggcgagtcgtggctccagcacacctagaggaccgagccggcggtc

SEQ ID NO: 40607 - DNA, 1298 bp, Bovine  19866880748921
  misc_feature (1)..(1): n is a, c, g, or t
naaataatatttccaaattatattactcaaagagctttcataatgtcattagtgagaaggaaagcagcagtaacatccaataaacgtccatttcctttgcctggagaatacaatgttcaattccagcacgagatttttattcttagcccacaggttagaaaaatgaaatgcttatctttgtttgccacatctaactcatgacacaaaatggagcagttttgtcagcacacagaacagtgcatgacaaatatttgaagaacatttcacgtattttaaaaaagtttgcatttcttctttcactgaagcctttggggaatcagtcattggtctcggaagtacatcctcttatcagattcagtcttgaactggatggctcccaacattatattagtttctgtacgagaaataaaaggattaaaaggaggaaatatgggagaaattcctgtctttatcatttcctcttttctttctacccatatcctagtcatgcatagatgaatatgtctagttttaataaaatgggaatttactatgcttttttaaaagctatttatccagagagagatgaaagactatagaaatgtttgatagtaaaatagttatgtctaaacttgctgcttttcacacaaaatatcacattaacttctattcccctactaatgcttcagtttgttgaaaatcatattaagccctactaagtcctgcagtctcataagattgcaatttcagtaagagagaacactttcttcccaaagatgaaataggatgaggcaaactacactttgaatcaacctggaggaatcatcttcaggaagaagtacacaaagtgtacactgagtctattacaaagtggactgttatggcacgaggaatatgaccacaagttggtgacgtgggagatacacgcccttagagagaagtgttgtacaaggtttgacaatgcagtggagcgtccagcccttagttgagtatctgatataggagaccaccagtatatatttgctgagaaagtggatgagtctagaactgacacggatgctagcccttccaactcagagttgcatagttctgggcgtggatctttcctagggataaagttaaggacagtgattacagtgatgggcagcaacaaactttctgttgtgtttaatatgcaattctattccaaaaatgtcaaagatattacttatttcagttgtcaccttaaactaacacaatattataaagtttaaaaataaaataaaatttgaaaataaataaataaataaattcagcttggggaaaaaaaaaattgtcac

SEQ ID NO: 40608 - DNA, 1631 bp, Bovine  19866880844477
  misc_feature (1)..(1): n is a, c, g, or t
ntctgaaaaaccagatctctgcagtcctcccatttgcccagtgtggctgtaagtttgccctgttctgtgcctcccctgtactttgcattaaccaggtaagagcgattttcttaccatgtcataataatacacttattgcttgtcatctaccatttgagcaggagctctttgcgggaccatttctatctgcttctccatggtgcctgacgcatgttttttttaaaattctgagtgaatgtcatgaaaggttgttctagggaaggtgttgattacataatttcattcctctgtctcctgaaagccaaggacaacagtgaaaaggtccttccttcaacagccaagccttaaccaagagcacagtcagtggataacagtgtgatagagacagagatttgaagatgaaagattctgttagctctgtcacttaattggctcaggaaggtcacttaagatttttgtgcctcaggtttcctcatatccttgggcaatagtaatgcctagttcactgggttattgtgagaatcagttgagacattttatggaaaagtagcttgcaaactggaaagcgctgcaaacatgagaagagaccttagaatctggtagaaagaacaggtggtttggccttaaataagattttcagtccagactccaccactaattatttgacttgcacaatttaactcctgagagcctatgtctttgcttgtcaaaggaaagcgataacacttaggcagcttaaagtaatgttgtgaaggttagatggaatccaggcaatgttccatttatagtccatcggtgtatgttcaacggttagcaaccagcgcttttgcacattgtatattcatacctctgcaccctcttttctatggcagattttaccccagggagagcaggcccttcctctcaggccagggagaggacagtaagggcaggctgctggaggaagttactgaatctcccggcctgtgaccccagctggcctgggtgtgccttgggacaggggtgaggcaaagcctcagtgtggtgtcccagcacattcctagggcagctgtttctactgcagcttcttttaccatttctttttgaagctccttattgaagttaaagcatgcataccaaaaaggtacatagcctaagtgtatagatcacgttttataaattgaatacacccatgtaaccagatcattcattctcattactgcctgatgttccactttgtaaatgcaccacatctgatttttctgttctagtgctgatggacgtttggaaaatctacagtttaggggtgttgcagagtgcctttgtgattgctaattcatgtcttttgatgggtatatgtatttctcatgggtgtatacttagcagtgggagtgctgggccatagagtgtgcatatattcagtttgggtaaatattaaaaaaaattttcccagcatatttgtataaattcatactcccaccagaagtgtttgacttctaattgctccacatcctcacctcttcagtattatctgtatttttaattttaggagttataagactgtgtagcattttggaggtggaatcattccctcagcccccaaagcttcaaatttaatatgttcattttcaggaaagtgctgtgtacagaag

SEQ ID NO: 40609 - DNA, 1271 bp, Bovine  19866880865261
  misc_feature (1)..(1): n is a, c, g, or t
naaataaagttctaggaaagaaaaaatatcagtttgaataacccatcataccaagggaatcctaactaaggcatatttttgttaccagatataacagggattttgaaacagtgcttctctcacagcatccaccaccatgatgagatgagaaaggttgatctttaaaattattttcaccatcaaatgatttttgctttatattccccaaagagtgaagtagaatggtgacatgttgtacacagaagctttataaaacatatcttagatgaggtcttcattttaagcctccccactggtactatctgctgttatattaggattctgaatttcaccgtaaacaataggctaatctaagtaagaatttctgagtctccatctgtaaattcagatttggcaaaggagaaatctactagagatcctgggtggtatgggacaaaggattaggggagagaggcagaagcaaggattcagggcctgtaatccaactattctgggggcttccctggtggtccagtggttaagattccaagctcccaatgcagggggcctggattcaatcccagtttgcatgctgcaacaaaagatctcacacatagtaactaagatcctacgtactgcaactaagccccggcaaagccaaataaatgtttttaaaaatgaactactccgaaatcactaatttttaccacctgtgctttccagtgaactgcctatgagtattttcagttgaaggccatttgccatggagttgatgctgatggttctaaaccagagaagcaattgagtatgaagcaaaactaaaagtgaggatcaactccaaccagcaagctccgatgtcccaaactcttctcagtgtgactctgctggacagtttgctcctggccattggcttagtctataaggatttttttgtaggtgatttcaagttatttaagtcattctcttggctttttcccctctaattcagaaagcaggaaatgtctttcctgtgtagcagtcacagagcagtcccctagggtttccagggggcttatcttccagttcctgttgctggtttctaactgttaactctatatttggtaacagcttgaccatgggctgttttggatttggtcataataagataacctggagtcacggagcagagatctaaagcaatcttatttttccaggaaagcagcgtgttgaccttttcaggatttcgtctattttattgaattatttgaataggatgggggatagcacaaggttgggtgtttatgctattggcc

SEQ ID NO: 40610 - DNA, 1645 bp, Bovine  19866880914435
  misc_feature (1)..(1): n is a, c, g, or t
nttcaactttgaacattaacacaaatttagcaatagttggtaaaaacaacagctgctaagcgtggtaaacccaaagagattattaggtcaaaaatcacacaaatacacagagaacatttcaaaattcccagcacaataacaacaaagcaccaaaataaatctcgttaagaaacaaaatgttttcagaaagaattttttttttgtaagactgcaccatgtgtaacatctccaaggacttcacttgaaaggaaaaacacagaatcaaaagggagaactacagaatggtttccttcctctattccctttcccctctcatcatcctctactgcacataccaggtaactctctgcattcttacaactcattctctgttcacacacacattgatagagactgaagaaaacaaacaaacaaaaaatcatttttcaaaaatgagatattgttagaataaactttctcttatctagacgctttaaggaaactaccagtcactgattcagtcaccttcatgcacaagacaagaaacaaaggagttccaaggcttctaacaaatagcaatggggattttataccatctagacttacgtggctttcatcagtatgttacccatgctgatcaattagcatgaaagacttttcaaagttaaggtttacatatcacaaaaaatatgcattaaaaatgtgaagcagcataatttttttacctgttcatttgctgaataattcaaggttgaatttcagagaatgtgaagattgaacaaatctcaggctaaaacaaagacttcaggcttttccaatctcctcctgggacagctataatttcttctaacactgtagtgttttttgtacagacaaattctttgtagtgttcctatacaatcaataactatccaaaagcctaatcttcaaggcttaagtaatttgaaactaaaaataaccagaaaaaagttcatctaaagcctagttaggtgaaacaacttactataaatcatcaaaagacaaatgaaatgggactggccctaatagttcctcctaggtagataagacaaaacaagcccagtgttctgtgaagcccttatataagtagctgatgtgaggctgaagtagtcaaattcactacacatactgtaacactcagtcatggaagctgatgctcatcgaagataatcatatgttacatattctactaagcctttcatatcaatgaacttattcatgctcccaacaacgccatgaggctatctccactttacacatggggcaactgagacagttatggaatttatctatgtcagcacaacaggcaaactcagaagactagccagaatgtgcataatcttcaaagagacatttgaggggaataaaaagtagctcagcattaacctagacagcatcttaaaaagcagagacattactttgctgacaaaggtctgtctagttaaagctatggcttttccagtagtcatgtatggatgtgaaagttggattataaagaaagctgagtgccgaagatttgatgcttttgaactgtggtattggagaaggctcttgagagtcccttggacagcaagtagatccaaccagtccatcctaaaggaaatcagtccgaatattcattggaaggactgatgctgaagctgaaact

SEQ ID NO: 40611 - DNA, 1025 bp, Bovine  19866881002886
  misc_feature (1)..(1): n is a, c, g, or t
nccaggctcccccgtccctgggattctccaggcaagaacactggagtgggttgccatttccttctccaatgtatgaaagtgaaaagtggaagtgaagtcgctcaatcatgaccaactcttcgagaccccatggactgcatgcccaccaggctcctccatccatgggattttccaggcaagagtactggagtggggtgtcaccaccttctccgagaaatctcatctagtcacttctaattcaatagagggaaataaaggaaaatctctactttcaaacttcatagaattttagtacactttactcatttagcagtaacaggcatttagcatttttgaagtgtgtgctaagttttgtaaatcctgacagtgcaaatttcctcctaagacacaatcttcctactgaacattcactcatcttttaacgaatcgttatgactactggcctagtacctgcactctgttagtcacatggaatacaacggtggaaaaatggacctggttctaaagcaatggctcctatggccaagtaggggagacagacacactaatcaggttattcggaaacactgtcacgaatgcttaagatggggatagacttggggctgtctggaagcaataggagctacaccttatccagtactgggaaggcaggaatgctcggctccccagggcagtaaggagctttgacaaggttccacagcccttgaaagtcctttgaaggtaatgcaagacaagaccagtaactctcttcagatgcagttccaacaagattatgacactgtcacagttttgtgctttcatcaatatatcattctcagttagatatgcagtaatggtcattccacactcagcaaccagtcacgcacgagtatttgaattaaatctgtccataaatgcaaagtgaaatattcctattttagtaaatttacttatcagaaattttattctcctctcttagttttgaacatatccacacaacaacatgcctctcttttttcctaaaaataagaaaatttaaaattaaa

SEQ ID NO: 40612 - DNA, 904 bp, Bovine  19866881025284
  misc_feature (1)..(1): n is a, c, g, or t
nttactcaataccaaagcctctaattcaacaaaaaataactcagctagtttcttataactcatcactcaatacagtcagggtcttttggaataaagaactcagaattcaaataaagagtcaaacaaatctgaatagccctaaggttttctgattccaaatttcctaacttaaatactatacatagtatgacaacattaacactaacacatccaaagactaaacaatgactgaaacaaggcagaatttcctttttacattggtacttaagatgggtgacaaaaaactgagatgcattcccttaatgtattttagatcaaatgaaagaggatactcaccattaaagctctgataagtatttctgcaagcagagtgtgtataatctatgaagacacatttaacagaaaggaattagtgcaatattagcaaaaatcttgaattatatacccctttactaaaaacaaacacaatttttaaactgccattaactcagctatctgcaaaaacagggcgttaataattatatataattcatagaggaaaatatatatccctttcatttcactatctccccaaatggcaggtttatcatccaaatcatagcattgtaaaaattagttaataaaacctgatatataattacagccaaaaaaggagatccagtactgatttacacagcataacaaaagggaaggcagataaattatatatcaaacaatgcaaaaaacagggacatgtgagaatttattctatatatttttttcccaacttactatttctcttagcacttaatttgctctctgaagagttcaagatcttatttgagaaatgcacatgcatatatgtgtacacctgtgtgtgctatttctatccaggatgtggcatcatcaccaaagatcataattt

SEQ ID NO: 40613 - DNA, 1039 bp, Bovine  19866881120065
  misc_feature (1)..(1): n is a, c, g, or t
ngaagattctgatttaatgatgaatctaaaaccgttatcaatgttgattttcaagacacttgtaaaagatgatatcagaatcagttttctgtttcagtaacttgtatttctcaaggagatgctgagtctagaaaaaaactttatagattgaatagccacacatttactgatcgatccctgtgtgtgaaactgtataacaactacaccctgaatcagggctggcacagacacatacacatctttcagctctaaaatctggcttggttccagtattccctctaactaccctgcagcccttgggaggtaattagctaatgactgtacagagcttttaaactgaaacatgttgtattatgctaaacacaggaagcacacaaaggattccaccgtctgccaatacttttcaaccagaaacagttgatgtatctttcagaaagtttctcttgcaactaaaatcttcctaatctgtttctaaacaaaaggagttcttttttcaaaagtgcccttcctacaaatcaaagacctaagaaaattacccctttgctctctctaaagtaaggttcctgcctcaacaaaacatgatacagtagtatggtttgtgtgaatgatgtttaggcagttgctaggtttgcttggatcattgaaggcaaagggaatcataccgagtgatctagtattagtcctgacaccaccctacacactgtctttggctttaaagcacataatttgtgcacatggtaatcaagtagtataaaaaaaattccagtgaaaaactataacattgtcttctcttgcttagttagcttcaattctctctacagaggaaaaaggtttacctggagttagatcactcagtctttacttttgctgcattctttctctctcttcttggattaccaactttgtgtgtggggtgtgcttagtcacttcagtcgtgtccaactctttgcaaccctgtggactgtagcctgccaggctcctctgtccttgggattcttcaggccagaatactggagtgggttgccatgcccttcttctg

SEQ ID NO: 40614 - DNA, 1770 bp, Bovine  19866881132639
  misc_feature (1)..(1): n is a, c, g, or t
nctctttgagagaaggtatgcatttgatgtactctaatggcacccctgactgaggggccatatggagccctggatgctgcataatttcatcttacttctcagttgagaccacctttctgccaaaaccatagcgtcatttaggtcaagcagttgccactggtatttcctactgttctcagaaggggaaaagttaaaaatataaggaggaccctggcaactgatcctggtacagcttttataattagagtctggcaaaatttgagcattatagagccttctggaaatgtatcatttcaaatacagagatagtcaaggttaacccgttatgtcacgggacagacagaggtggcctgtagaagaggtggcctgtagaataagtggcctgtagatgcactatgagaactctcaccagctcatactgctcgctgggagtacccacactgatttaaacagctaagtcatatgcctggccccaaaggaatttggggttttaggcactgtttaggcactggcactttttaagtggctttttaagaaatatctctaaaacagattgcactaatctgccaggagaaatatcaataacatcagatatgcagatgacaccacccttatggcagaaagtgaagaggaactaaagagcctcttgatgaaattgaaagaggagagtgaaaatttggcttaaagctcagcattcaggaaactaagattatggcatctggtcccaacacttcatgggaaatagatagggaagcagtgtcagactttattcttctgggctccaaaatcactgcagatggtgattgcacccatgaaattaagacacttactccttggaaggacagcatattaaaaagcagaaacattactttgtcaacaaaggtctctctagtcaaggctatggtttttccagtggtcatgtatggatgtgagagttgggccataaagaaagctgaacactgaagaattgatgcttttgaactgtggtgttggagaagactcttgagagtcccttgggctgcaaggagatccacacagttcatcctaaaggagatcagttctgggtattcattggaaggactgatgttgaatctgacactccaatacttcggccacctgatgcgaagagctgattcactggaaaagaccctgatgctgggaaagattgagggcaggaagagaaggggacgacagagaatgagatggttggatggcatcactgactcaatagacgggtttgggtggactctgggagttgttgatggacagggaggcctggtgtgctgcggttcatgggatcacatagagtcagacacgactgagtgactgaactgaactgcagatgtcattcaatatgtgaatggacaaatagtggtacattcatacaatgaaatattattcggtgatacaaaaaaatgagctctcaagccatgatacaacagagatgaatctgaaatgcatatttctaagtgaaagaagccaatctgaaaagagtgcatattgtatgattccaactctatggcattttggaaaagataaaactttagagacagtaaaaagtttatcagttgtcaggggttgtggaggagagatggtgaaaatatgaataggtggaacagagagtcttttgtataatgtaatgattgtgcataactttacatacttggaaaaacctgagttttttcagttttttcattaagagtgaagcttaatacaaacaatggacctttagttaataacaatgtgtcaactggttcaacaattgtaaca

SEQ ID NO: 40615 - DNA, 2046 bp, Bovine  19866881190675
  misc_feature (1)..(1): n is a, c, g, or t
natttttttctttataacatttaaataataataatatgattataacatgctttataaaatttcttttatcttaagaactgaggtgtaacactttaaatactgtcgtccaccattgtttagcttatgtgatttacatgataaataatacacggaaataaaattagctgtttttaattagcttaatagaataggtaactggtaactaagaaaaaacttttcccaatatgaagatgtaaaattatttacttaccatatattctacctaattgacaaaagatattttttccttcactcaaaccaaatgtgttctttcagaaggggcaattagttttcctgctttggggctgctttttgaaatttcaaaatcataaataactaaaagcaaacaagcagaacaataagagactcctggactctaaagaaattaaaattctgagatttcttaaacactttcttagttgtagttaataagccagcgacccatatggccttctcttattactgggcatctgtattcttatctgaaaacatttaaaaatgttggtttaagattgtttctaatttggagcaataaaaaaggagcatttttttttaacattcaaaacacgtttgagacacattagacagcctctaggtaacaccaaaggtgtgctccctctcctataatccaggatggggtactcacaagtaaaagagatgctggaaataattagttttaattgatttgctccttaaattccttaattagggcaacagtaggctgttctgtttattgcagtgacattatggggagagctgttaagtaaaaaagttaaacaaaatgttattaatgtgattatgttattagataccctttcaggataaataaaatcatcttcaagttcaggtacaagggctgactgaaacagtcactgacaacagatttatttcaaagattttgtttctaaattttaaatatccacatgttaattagagatgagtgtggcatttatctttagttgttgctttgtagattccttgggatatggaatcctaatttcaaacacaaagtctgtaagtagacatacttttacttcttcctttccaatctttatgtcttcaatttttttcgtccttattgtactggctgctaagtcgcttcagtcatgtccgactctgtgccaccccatagacggcagcccaccaggctctcccatccctgggattctccagacaagaacactggagtgggttgccatttccttctccaatgcatgtaagtgaaaagtgaaagtgaagtcgctcagtcgtgtccgactcttagtgaccccatggactgcggcccaccagggtactccgtccatgggatcctccaggcaagagtaccagagtggggtgccattgccttctcctacaaaatatggtataatgctaaagggggagaagacttatctttggaaaccagctaaagagctaatcagttaacttaggcaagaatccaatgaccttgaacccacattttttatctagcctaacaataatatctaaccatccactatgcttataaaatgtccctagtcgggatgaatttttaaactacttctgacctaccagaagtcttttacatgtaaaactaaaataaaactgtaacacagactcaaaaatgatttgtccaaaaagtgttttctaacagtttcttcagtctactagttatccatcaccatctccataggattaactttacttttgccctaatggcatgtagttagtctttttccatcttgcatttcattcatttattcattcaacaaatatttaccgatcctttgtgaacatattaggtactactgtaaatactggtgatatagaaatgaacacaacaaaacaaacaaaagtctagtatattttatgtttgttttatttatttttcttcaaggtacaatcctatactttccttaagtgaatttcagtgctcagttttgattatttccttcatttttattttgccaagctcatttccaactacttgcttcaatactacattatgcaccatggggccacatacag

SEQ ID NO: 40616 - DNA, 1335 bp, Bovine  19866881198140
  misc_feature (1)..(1): n is a, c, g, or t
ntttgttatttggctgcactgggtctttgttgcagtatggggatcttttattaatagttgcaatctcttagctgctgtgtgagaactgttagttgcagcatttgggatctggccacggatggaacccgggtccctgcattgggagcttggagccttagccacgggaccatcagggaagtccccaaggagtaattgttgttccctaccactcttagaaaaacaggttaagctcattttgaacgcttcccaaataatgtgattgggccattaatttaacacatgacatcatggaaatattcaaggagatgatagtaccaaagtatccattgcgttgtcagatcaacttgccttctgagtctaaagttctcatttatgggactgtaagagcactagagcttaagaatcctttaagtatattaataatagtttatttttcattttatgttttcaaagagagacatgaaacaagaaattctatttaagccatttgtttcttagtatatattttagattctttgcattcagatcagtgtgatgtattattgactaaaagctgtagagtaaggggtaaggtttgattagaagtcaagacaccactggctgtgttccttgggcaagtcacctaatctctctccactcaagtttttactcataaaatgagagttatggagtggatgacttctgaaagagcctttcagattctctgaacagttataacccacctctgagtttctttcaattaaatagatttctgtagaaccatataatcatggtcttctttagtggatttttctttaaaaaaaaattatcatgtatactgcaattgcagagtaaaatacaatccagagtcatgctctcctaagagagaaataaatcacttttatataattaggaaatctggctttttgtcctgttttttatttccatctttgcattgctaaaggaaaagtaattcgttttataattgatgttttgagcatattctgatgactttattttgattggtactgctgaaagaacccataaataaatcatggtattcctgtgctctttctgtcttgcacttctctgcactggccttggctgtgccagtgtcaaggccctgcaccgtgggatcttcctcccgtgacaatacttagacacccactttgcttttataatcattatttccaaaccaaaaggcaatcacccctcctatctttatcagaattactagttactcagtaatttattcagcaaatattgagtgcctaccatatgtcaagcattactttctaggtgctgggacacatcaatatacaaaataaaattgaaaagaaaattcctgtcatcatg

SEQ ID NO: 40617 - DNA, 888 bp, Bovine  19866881235147
  misc_feature (1)..(1): n is a, c, g, or t
ncacaccacaactagagagtccatgcaccacaacgaaagattgctcatgatgcaacaaagatcccacatactgcaactaagagccgatgcagccaatacataaatttaaaaaagaaaaggcagtatttatatgaaagaacaaaaagaaagatgtaccagaacgtgtgtttatcttgggggttatggcatatcaggacacaggattgccaaaactagcacgtacctgagggtttttttaaaggtaaagtccagcatctaattaaatctgtttcagcattttccaggctagctttagtagatggagtaaaactctgggccctcaattacacatttgttttgacatttgaacagattctaaagtattttctgagttgaaatctgggcccatctatagatgctctcgtggcttctgttcaagcaaagacagagcctttctctccaggtaggcttccttgctcagctttcacaagttgccccttgcttaactgtctgttaaaatagacataactattaatgtggcactatataccagctgctctgcaggtacttttcaggaactacatcttatcaaatatttcagctaaaagaaatgacttttgcaagaatttcctggagaagagaatcaaccatgatctcatggttctactcctgggttacaccaggtcacagagcactaggacagcacagtttcagctggccgtggtgaaaagtctttactgaaattgcaaattggcaagatgtaactggcacatcttcagggactgagtttaggtgatatggatgcacttgaaagcaaagacttgagaaatatttaggtaataaaatattttggtcttggggacgattggatgaagagaaagaaagagagaaccgatttcttttttaagt

SEQ ID NO: 40618 - DNA, 877 bp, Bovine  19866881245746
  misc_feature (1)..(1): n is a, c, g, or t
ntatatatcacataaatatatggatatttattgattcattattaactcagaggatatgggtatgattgtctttaattgcatatacttgtgatagcatttattcagcaaacctttgcacaacacaccttccaaacagtagctacatccttttacatttatgtacaatagtcctgtagagtcagatctaattagggggagggcactggtgtgctattacaagtggcattctattaccaatattgatgataaaagagaacagggctagagaaagcaccaaaacaagtgattttaaattaccctctcaattccaggatcaactttcattcaagtcattttactgacaggctggtatttctaaaaccactgtgttgatgagaactctggcctgcacagcagggtagctcacagctcccctcttctcagctgtgtgcccgtgcttcagatatggtccataaacaaggagcaggaaccagacgagctggaaggtctctttacgactcaaaatcggattctcttttttaacagaaacattattataaaatgaagaaaaacaaacctaagagaaatgagaggaacgctgtacgtaagagaatgagctttgaaataaagactagtttcaaattccacttgccccacttcttgtgattttttttttttttttgggggaaaatcacataacctctcatgcttcagttacctcatccctaaagtggaaacaagtccatcttccactcaggactgttttgcagattaaatgagaatgcatgtaaattccagggcatgggtttggaattatcagtaaatgcctaataaatgatggttgttattacctaggagtattccataaactcttgacctaagtttaaaaaactagtta

SEQ ID NO: 40619 - DNA, 1754 bp, Bovine  19866881276092
  misc_feature (1)..(1): n is a, c, g, or t
ncagaatagattagtctccatgattgagttctttttttaagtgtgttttagaaggttaaagaagatttcttagtacaagttgttaatccataatgccctaaaacagcacaaagatttattcacaagtttcacttcctgacaggatcctccaggatttccatctgtggactagagtccctggaagaacaaacagtggaatctaaagaattttccttcttcccagcaacggtgcaagtaaatctgcacccatttttctcaacactacaaacaggcttccacactgaggaaaaaaacaagacacttatagcattaagctaactaacgaaggggaaaatttttaaattcactttatatctgaaagcaacctaagtgttaaaaatttaaagttatactagttgagaaagacatggtccagatcacgttgggatgacaatcctaaggactgggataaaacctgatgaatcaaaagattatcttccccataaaatgttggaattccaggaacaatgggctatccctgggatgattgagggaaaaaatgattttaaaaatcccctttcaggctaaaagtctagactcagctagacacagagctctgctaaaaatcacctctcttctctcagagagggcgtatatacaacagattaaacaatggaaggattcttccccaaaagagcagataaaacttaaagacagcagcactagaaggaagggtcacagcactggtctggggttgtgtcctgctcagggaaagaaaggctaaaacacagcccacactgctctccaagcagcgtgcctggtggagcagatgtggcccccgctgccaccaacttcacacggaagggttgtgggggcagtgtcaagtggtgccaagcacaccaactccccatgagcaaagcaagctggtgtccagagccatctcggagctggaggccatcatgcataacccctcaaaacaatgctgtgctctggagaggggcagggaagagtcttggtttgtacaacggaaacattttcaattttcctggtttactttatgatgccagctgttctatctcccttcctttcctcactctatattctcctttcatttacactccaattctccttctgcagaagccacgagttgacgtgcacacgagggatggcaagacaatagcccccgcctacccacagaggttctgcactgcttctaaatgtgtatcagatcacaattttcccttctcaggtaaggcctcctctttctcatttctctcctattaccccccaaatcaattctaagatacaaagaaatcttcctcttctcttctgggatagatgatctttcttcacctccagcggctcttactctgtgttcggtatttctagggccacttgcctcccacagctgtatcttctacctgctttgctcccgtactctacatatttctccctcaatcattactccttagaaggaaaaccccatcaaatacatctactctggatataataaatcaaatttaaagagcagaaattattacattgacaagtatggggattttggtttgctttgttctgctttctgtgtgtatgtgggggggggtggaaggcaggggcagggggttacacaaaacaatgacatcaagttttcatttgtttcaactttttaaaagtgtattatgctttttgttgaatcctctgcttccatttacctggccactaaagagctatctatactactaagggcctaagaatcacaggctctatccaaccca

SEQ ID NO: 40620 - DNA, 853 bp, Bovine  19866881372446
  misc_feature (1)..(1): n is a, c, g, or t
naatgaaataaaatacagcatcataatggaccgagactttgaaccctgtgattttttttgtcacaaagaagggaacaacagattatttatattgatggcatttgaagagtatttgaaactagtaaatgatgcaaagttccactgtaattaatagtatatccaaagccagtgatatggaagggagaaaccagatgcttttagggacccattcttcgtgtgagagctgaatccccagagcaaaaatgaatactaatgaagagaaccggctagcaaaatagatgactggagctatcatacagcagttggttcagttccaactcaaacagcagatcaatttgtggcactctaatatctttctacagcctggcaccaggcaacaaatagcccatctgtattgctgagatggcaccaatgagagcagacatctatttacataaggacagattttaacggctaaaattactctatgtttggcatggtttgctcgtaaaaactgagcatgtaatatgccagtgggctataattggttctatgaattgttttcttcatgcatggtaaattttcagtatttttcaagagtctaaatttacaatttgcaagggcccaaattgttttaacttaaagcaagctaactagaaaagttattttacatgtttttggaatataactatatatggccctttgtactcaaaaaatatatatttactatttccttccaaaatcaagggttttttaaaagttttttctttttggttgatgaactgggtttttttgggttctggttttgtttttaaggcaaggactatggagtcctatggatatggattataaactactttccagtccttactag

SEQ ID NO: 40621 - DNA, 1121 bp, Bovine  19866881810388
  misc_feature (1)..(1): n is a, c, g, or t
nccctgaggctgcaagagctaaacaagccttatttgtctaccattaactttgacaagcccctggagaactgaaatttatgaacaaatacataaaagggcagtttctatatgcaaatcacagaatggaaattaactatttccagctgctcttactcctggatttaccctgaggtacttagagggccctgttctttcatgatggtaggatctctggatctttgcagactctgggctaccaaaaagctacttcttgtagagaaaagcccaaccaaacaggaagcaggatgaataatcctctccaattctgtttttatttttttcccttacggatttagatacagggaatattactgtgggaaaaggcatgggaatgagcaagaagtttggagtcagggggacaaagatttgaaatctatccaccaatgattattaactaaaaccttagaccatttccataacatgcctgtactcacttgtccatttttaacacagagtcaatactactgtgagagggttcagataaggacttaaaaattgcaaggtatataaaacgcttggcatacatttcaggggctgcacaccaaggctttatttcctcaccatttagtgggagggtgacaattacctctaagtgagggaacatgatgaaggagagcttcccacagctcagcttccaaaggatgatagaaaagcaaagataagggggaggatgcaaaagtgactaatacaggaagaggtcacagctgagctatcaagtaagcgaaaattaccttggttcatgatcagtaagaggaggccccagtacagcttagtgaggctgcttgggttttatattcagaaaaccagacttcctctcccagctctgctgcttgctggggagctggggcaagtcatttcccttctcagttcttatagggaaaatgtagttaataatacctgccttttaggtttattgtgagaatgtactgagctgcaagagtcccagtaagactcttaaacatagtagctcttctcaaccagttgagagcagctgagtcagcaactgatgagcaggaccgatgaacaggaacttcagttacttagcatttcagtcagcaaggttacattaggctgtgtcacaa

SEQ ID NO: 40622 - DNA, 1752 bp, Bovine  19866881901438
  misc_feature (1)..(1): n is a, c, g, or t
ntaacctgctaatgcaggagacataggagacatgggtttgatccctgggttgagaagattccctgaagcagggcatggcaacccccctcccagattcttgcctggagaatccaatggacagagcggcctggcaggttacagtcctttgggttgcaaagggtgcaaagactgaagcaacttagcacacaaaccatcatcagccactaacacttctttaatcgatttaaccggggcagagtttaaagggttaacaagaggagcgataagactgaaaggatgcaaaaggtcttctcccctccgctgagagtttggagctgtgggacactgaagggaaatatagggtcactgaagataaaaactcactgcaaatggaatacatctgagagaaaacccatagaaatattaaaaatttgcatatgcagagtacatgttactttgcattacatcttaaagtacatgtccattgttctagttgcatcataaaatcaaaataataatacaaaataatagtgaataataggtgggtctgattttgtcagaaatcaaatatcagaagtggtcatctaatcaatcattagtatcattgtgtcaagtattctatctaatccagctgtgatttctgaacctacttctgctgatatggataaggaatcactttttaaggaaaattttttaagttctcccagaaacttctatcagaccttaaaaaaaattgaaatgtcctatgctaaaaaattttcttgcatgacaaattaaagcaatgtgaaacccaagagattagaaatatggttcaatcatgttacctatcttggctggcactgaaaaagcagatattagactaaactttaaagcattttgttagaatgtaatagatctaaatttttctcaaatgtctttgttataacttccgcactgttcatatgacaatgaaatctctgtaaaatttggttttgggggttattaacttgtcagattgcattgatatttctaggtctgaaagcataacttctattttaggagattaggagagttttgtgaagaaaatcaccactttcaaatatttctgtgatattcacatggcacaccatttggaattgctggtgttactgagagagtaacttatatgttaatatattctgaattaggaagacacagtgaaaaagtgattttgaacttcaactaaacattcactgtttagttaggtgcctaatttatcatttaagtagaattgtagtcctgatgaatagcaatttctctttcaattcagttcagttcagtcgctcagtcatgtccaacacttttcgaccccatggaccgtaccaggcttccctgaccatcaccaactcccaaaacttgctcaaactcatgtccatcgagtcagtgatgccatccaaccatctcatcctctgtcttcccattctcctcctgccttcaatctttcccagcatcagggtattttccagtgagtcagttcttcccatcaggtgaccaaaatattggagtttcagcttcagcatcagtctttcagtgaatattcaggactcacttcctcaagggttgattggtttgatctccttgcagtccaagggactctcaagagtcttctccaacaccacagttcaaaagcatcaattcttcggcactcagctttctttaactccaactctcacatccatacatgacaactgtaaaaatcatagctttgactagatggacctttgttggtaaagtaatgtctctgctttttaatat

SEQ ID NO: 40623 - DNA, 1245 bp, Bovine  19866882171948
  misc_feature (1)..(1): n is a, c, g, or t
nacttgcttgtattctgtatatatattaaataatctcagaatgtcatcattttacataaatttcccacccatattgagaatgcactatgtatggctttaatcttcatgcctttgtgttaagtcccctaccccacccctttctttaatttcaaatgaaatggatcatgtagcatttccttggtgactgtcccttcattgacagtctctcatgagctatggggtccactgtgtggggcatggtttctacagagctaatagttcagttcttcagtctcttaggagttgaatgaaatgatgctcacttgtgcatttcctgggacctagcgtgaattaggccttttttttccccccaaatgtcttggacctctcctacttccgtttcttgatttctaaatctaccaggaaggcaaacagttctaccaagggaaaagcaatttctcaacattaaaaaaattagaaatgataatttatgcttaaaaaaataatgttagtccaagttttttgctctcttccctcttccttctccgctgttctttatcctgccgtgtgtttgcaaaccattctcatgaccttctgccggagcggcatatttgtagcagggccagattatacatacactactgactttttcatctgacctctaaattcagcctctgagccccttcatttctttgagttttgctaacaaagtcttcttgttgaaaggaatatcatttcccatggaaccttactgatggtccatgcaataataggatcatgctttttgaaattcagatggaaggtcctaaaatcttaaacatatccagtttactgttgcttactttacttagttcagtcttggcatttcaggtccagaggcagttactacccagtgggcactctcagcccctccctgaaaattaaagggagcacaaaaataaaaccaaacttcttgtttttcttcacctctctgttaatttaactgagtcagttggcttgccctcatttgcccttttcacagctcccaaattaatggtatgtgcaaatttgattataacagggtggacaattcctaagttacttttgactacaaactgaatactgttccttgtggttcttttcttcatcacactggtatatataacccggtgtttttctttccagcctgcttaactcctgtgtggatctggtagccacttaagtttcagttgatttggagatcctgattgtatgggacactgtatcaaatgcttcatcaagatcaaa

SEQ ID NO: 40624 - DNA, 1577 bp, Bovine  19866880349186
  misc_feature (1)..(1): n is a, c, g, or t
ncccttcccctcccctgcccgtcccccttcccccacctggtcagcaacctttgcatctttcccctcttctctgacctctttgggagcatcctgctggtgatgtccattccccccctctgtgcctggtgctgactccacttagcctctgtcttagtctgttcaagctgctgtaacaccacagactgggtagcgtataaacaacagaaacttacttcccacagttctggaggttgggaagtccaagatcaaggtgtcggaagatatggtgtcaggtgaggtcctgcttcctggttcacagacagctgtgtcttcttgctgcatcctctcatggcagaagggctgggggagctggctggtgtctttgttatgagggcaaatcccattcatgtgggattcattcaaccccattcaccctcacgatctaatcacctcccagaggccccatcatttgggggagctgggtttcaacatatggattttggtgagggggagacacaaatattcaatctatagcaacctctttcattgtctagtttacatgttttgtctctctcttctaaacgataagattctggaaggtctgaaccatgttttcttcattcactacctgccttactccatcagcaagcagtgcttgtcgctcctgtgtccacatccattcatctttgtagacttaatgttgagcaccctgcctttgaccaagaaatgaatccactgctattcagagattttcctgtcttctgactcctctttctcttccccaaccaagttgctttgggaactaagggaactagcttcccctcctctcgtagtgagagaggtctggaagtcagtctcatgggtaaactgaggcttccctagatgcctgctgtttcacataacaaattctcccagaaaaaccagttaagacattctggtctaaccacatctctctagaaagccctatacagagagtgctagcttcctatgtggtatccactctctttctttcttagagacagagatacaatgtaattccaggtggcatgtagtcagtcaaaggactatgattttctgcctcttttgtagaagatgaaagcagaaattgttggatgaaacttctgggaaagacattcttgcccttccatcctacctgccttgtttggggtgtggatgtgatggctggagctgcaagaaccatattgagttcacaaagaagagactaaaagaatcacaaagactcggtcctaattttcttgattctaattgattcataagccactgatctaatgccagtaattacccacactttcatttcacattaaacaatacatagaccattgtgtttaagtcactgtaaccagtcctcttactagcaactaacagcaatttctagctgatacactgaattagatgataaactcgaaggccttagttacagggagttgagctcttataaaggcaccgttctcagaaattcttcctttgctgacaagccctggtgtcaatactctctgagttaagtgaaatcttttttggtgttcccaaatttaacttcttcagtgaaagtgaaaaatgaaagctgctgggctccctcc

SEQ ID NO: 40625 - DNA, 1285 bp, Bovine  19866880492902
  misc_feature (1)..(1): n is a, c, g, or t
ngggaagtccccaagcttactcatgttgtcttgcctctgttggagttcactttcattgttgtggtctagatctgtcttcctgtgaatggaagaaaaatcaaactgaagaaaaatctcaaaacagtatcataagtaactttttagaataatatgttattagttattggcaggactggtgggggcagcataggtgggaatgaaaattagaactgagtttaaccctaaattttacagatcaacagcaatagtatgcataaatagataacttctctaagtataatacaaagagtgctgtgtgggtctttgtggaatggaaattattaatagtatttcaaattttgccagccggttctgcttttttacatgttgtagaaatgaccatgttttaggatgaaggaatcaatccatttcatattagttctgaacatatgcaattgaataaacattctaggcaagtctactgatcattggaatagcaactatcacatgtctgtgaaacactattttgtgcctgctttacttcactaatctactgttagaatctaggaatgtacttcagctagcttcaaccatcctagaatgctttttacatcttagagtgaaaatgagatttccttaaaattaaattttaagaaatttgggaaactaaatttggtgtttcctcaaatgtagtatgctagtatcttggatcatgttttctcttacagtagaagatttcttttctggctaaatttcctttcttgggttcttcccctgctttaccttttttaaaggcaagagacctgtgaaagctaaaccttttagagctcagagttgttgaatgtactttctcccatccaagtaactaaccaggcctgaccctgcttagcttccaagatcagacgagatcgggtgtgttcagggtggttggccatagacgaacttactttctgtccttatagttgccaagaactgctgacaacttaaaagctatcatatgagtgaataccagttgtctggttttttgatttttggacaagtgtgaatcaggatttcctgtaatttttcttcctcttctggggctgtgttgcctctatctctgagcagttttacacttggaaagaaaaagcaaggtcactggatctaaattacttttacttctgtgccagatgaaactttccttctgttatgtgttacagtttgggtatcttttggcatctagagagcttacatttggaaaggggagcatggggggtgtttaggagaggagttttgttgttttagcttaatcctcactttttctgta

SEQ ID NO: 40626 - DNA, 990 bp, Bovine  19866880506793
  misc_feature (1)..(1): n is a, c, g, or t
nctttttaaacttttaaaaaaatacactccttcgggtttagaaaaagatcttttacatgtccttatcctacgacagtacccaagtcgttcatttgtgcgctaagaatgcactacatgcaacacaccccgagagtctaccaattttgatttataaatatcccgccccatccttccaagccactataagtatcttaagcggtccagagcggtctcggcaacaaccccatacacaaaaaggtccaactcagcgtaggcaggaatgcgcccatccacccgactccatgctccgggctttgcgcaggacccgtcactcaagtgacgcgcggccccgcccctgcaccaagctagttcgacgcgtacaaacagatgatgtcattgtatccacaagcgcgtgacccgggatctctgcgccgcattgccattcgctgcgccgctcaatcgtcaagccatgccgcgctctgactggccgcggccacctgtctccaggccccagacacccctctccgcccccggcctccgcccccccttcaaataataaacaatcgagtaaaattcgatggaagggaggagaggacagagagacggcgaacccagaagccaatccttcgcgtgctgacggaagggagagttaaaaggaggagggtttgaaaggaccgggttgtagggggaaggagcagacctgaggcgatgtgtcccgcctcgttgaggtggcatcaggggaggaaagttggagagcactctgcggggcacgcctggtaacgcaggggggctctagggccccggagcggccgggctcgggactctggggtggtgcgctgccagccgaaggggcggagattgggcctcgctagcgctgcgcaggcggagctggcagacacgtgcgggaggagggcggacgcgcgcctcacgggctcgccctgggcacgcggctccgggagacgcgcgcgcttgtttaccagcgcacgtgggtgttatttttaaatggaatgt

SEQ ID NO: 40627 - DNA, 3425 bp, Bovine  19866880602804
  misc_feature (1)..(1): n is a, c, g, or t
nataattgtattagttttgccaaatatcaaaatgaatctgccacaggtatacatgtgatccttcttgatgaaagtgaaagaggagagtgaaaaagttggcttaaagctcaacattcagaaaactaaggtcatggcatctggtcccatcacttcatgggaaatagatggggaaacagtggaaacagtgtcagactttatttttgggggctccaaaatcaccgcagatggtgattgcagccatgaaattaaaagacgcttactccttggaaggaaagttatgaccaacctagatagcatattaaaaggcagagatattactttcaataaaggtccgtttttctagtggtcatgtttgggtgtgagagttggactgtgaagaaagctgagcgtcgaagaattgtgagtcccttgaactgcaaggagatccaaccagtccatcctaaaggagactagtccagggtgttcattggaaggactgatgctgaggctgaaactccaatactttggccacctcatgtgaagagctgactcattggaaaagaccctgatgccaggagggattgggggcaggaggagaaggggacgacagaggatgagatggctggatggcatcaccgactcgatgcacatgagtttgggtgaactctgggagttggtgatggacagggaggcctggcatgctgtgattcatggggtcgcaaagagttggacatgactgggtgactgaactgaactgaaaatcagaaaaaagaatgcttaggtagaataaaatgctacaatttatgatattaatatattttctttatattaacacaattgtaagctataactcttcacgttttttaatggagaaatgagccctcaaaggcaaaagtggtagagtcatggaagtcaaaatgcaaccctggcagtggtagaagtgggccagaacccaataaataacattttcaggattagcagaagtaggggagttgacagaggagtctgagaaggcctggctcatgacatcagaggaagactggagagagctgtgctttagaagctaagggcagacaggcttcaagaaggacacactgtttcaaatgctgctaaggcgtcaggttgtaaggggactgagacatatctatgggattcagtggcaaggtccatggtgctcttgatgagagcagtctcagtggtgagatgagaaagaaggcagagggcagtttttaaggagtgatggaaggtaaggacatggaaatggctggtgcagagtttggctctgaaaagggggctctttaaatggggcagtggctagtttaccctgtctccacacaagtatctgtctggttccagatatatgcagaattgtttcaaactataatactagggggactacaggctcctggtaccttatagcttcagagggacatgtctggagaagggagtgcctgcctaggagtccatgagctagcagagtgatgaagacaggagccaggctggagctgttcacctggagcctctatcatacccttccaactccagtcctaaatgtgtgactcacaaggaaaaacagccagttggagtatttgttcaaactggtttcaatggaccacccctcccttaatgtctgttgtacttctaaaattaaaagaaattgatataccattgatcatgggatttcctgtgaaagaaagcactttggagagggtctgactggctactgctgcttcactgctgctcccatgtggcatgagcacagtcctgggacgctgggagaggctatgggacagacgaagctctctagtccatctcccagatagaaaggtccttcagtacaacacaccactggtcaagtatgtagactgttcaccaagaatacctgtgtatttttgtctggtgtggcttgctgttctgggagaccctccatgatcgtatgatagttactcagaagaacatcttccattagcagttgcatgcctgccagctctccatgagccaccttgaggtcatggccactcagtccacaaaagcatagctaaaaacaaaaaggaacaaaaccaaaccaaaacacccattttgaacacttctatgtttcctttacatgtggtcctggggggagaaaactaggagtagttgtgtttacaagccccatgctctcaattatttaaaaaatccataaaaatcagagtaacatttttagttcaaaatcctccttgaacatattagacatttggctctgtatggaagtccaagttccccaaacgttatggtggtggtgtctgtatacggttgtatggatagtgtgatacacataagcacagggaaaacacaggagaaaaaccaatatgatctgtaaccatatcccaaagtgggggactctgattaatatttttaaaccatttttactattttacttaaaaaaaaaactttacttttggaaaattctgagcatatgcaaaggcaaacagaacagttcccatcactcagtcccaaaaccaccaacctatggccagttctgccccatcctcatcactccccacctccccattatttttaagcaaatgcatcattgattttcatgttgttgataatacttttaaaagtattttctattttaaaaaatgaaaatacaataatacttgcttgaacaatcagaggtaaacatacatttgaaagaaattctccttctgagttctgcttaaggagttctctttctgccactgtaggtgggtcacgagtcacacatctctgaactgccagtctgggagttaatctacgaggcccagagagtgaccggaaatggatgaccactccctgagatcattattagccaggagaatttcagctgattcaagtctgattccagctgcaaacatgattttcttctgtcataagaacacatgattcaccccacagtactgggtttatagcttcataatcaaaaaaacaccttgcttatctcatattaataaattattcaccactggctagagtatgaaggattagacctatggatgcagtgacatctgctctgcaatctgtattcagttctctctgtgacaagcaggaagaacaatcttacctgcatgtgatattctagggtatctgggctgctacttgtaactggaaatggtcctccatcttccagaaacgctctccaagggaacagcacaaatgcctaaaagaatcaaataataaatataataatggtgcataataacgtccaccaagtaataggcatttgtatatgaataagatgtcttcatctctacactaaaacattatgggattacttctctcattatatagaaatagttcttgatgaatagtctctgatgatgcagaggagagagtaataatcttgttttttaaactgatttttcagaaagcaactaaacatagaaaggtattaaagtttcagtgtaaatagtcagcaatagtgt

SEQ ID NO: 40628 - DNA, 1390 bp, Bovine  19866880628861
  misc_feature (1)..(1): n is a, c, g, or t
ntggtgttggagaggactcttgagagtgacttggactgcaaggcagacccaaccagtccatcctaaatgagatcagtccatgggtgttcattggaaggactgatgttgaagctgaaaccaatatttaggccatctcatgcgaagagttgactcattggaaaagactctgatactgggagggattaggggcaggaggagaaggggacgacagaggatgagatggctggatggtatcactgactcgatggacgtgagtctgagtgaactccaggagttggtgatggacagggaggcctggcatctgcgattcatggggtagcagagaatcggacatgactgagcgactgaactgaactgaactgaactgaacctctatgaggcaagaaggaagctgttttagaatcatttactaaatctttaatgagagagtcattttaagttttgacacaggaaatgggagcagtgtaatttcagagaaaaattttagttgatcaaattactgtagatttttaatgatgattgccttgagtaaacagatcacactttttctttcttctgtatcctttctcagtttttatttctgtggtctgataagcatgcatgctctcatttctctagtttccttatgaatcactagtttttacaagtttagagagatccttcttccctgcctttgacacacaggattagttcagaggcttcaatcagtttaaaatgagctttttctaactaagtctccaggttcttaaggctttttgttttagtttctttatcctatagtggctgaatttagcgcttggttttcaatattttaccgtaagaaatgacaagttgcttttgaccatttcttaagccagaattccttacatttagataattaaacattcataagatgaagatttactatttcgtcattgcttgctagtacagctatagtttgttttattttgaaagtttatgcatatccctaatgttttcaagtgccttaattgtttaatatctctggcttcaaaggtttctgggaaaaggtaggcttacctcacatttttgtgtctcagtagtaacagtctaggtacctcacaaaaaattttattatggtaccatggctgttagtttttagtgagtgcaatcccagggacggggatgcctggtgagctgccgtctatggggtcgcacagagtcggacatgactgaagtgacttagcagtagcataaaagataagattcagttgaaaatatttagaaatttcattctcccaaagtggtacaaattagctgcaatagcataattatcatttacctagataggaatacctttgtgttgctttgctaagtcacttcagatatgtccgactctgtgaccctatgggctgtagcctgccaggctctt

SEQ ID NO: 40629 - DNA, 1281 bp, Bovine  19866880635705
  misc_feature (1)..(1): n is a, c, g, or t
nagtaggcgcttggagccccatcctctggtgtccttcagttcaagaggcaattcaggaggcatttcagcctcagaggtactcagattggaagactgttgctgggcagtatctgcagtcacgaggcttgtgcaaataccagcctctccccacatcctgcttaccttcccggttcatgtaggttcgcagctcttggtccagctgccactgtttctcctccaagttcagctcctgcactctgtggagggcaggaatagaaaaggctcagatgcctagggtgagcaaagccctggctggggcctgcctgactcaatgccactgtcccccactccccaaccctgacaccccttacgtgatcatgagctcagcctcctcggccactaggctgtttttcttctggacgagctgtagcagctgttccacccataatgccttttgcttttcaggggaacctgataaggaaaaaagggggccagtcaggcctccagccaggatcataggagtcatggcatgaggaatagagcctgctgtgagccagacctagcagtttgggggttgctgggggcagaacacagtgccaggaggcagaggtctcctagttttatccctcccctatctttactcactgctttggctcctcaaagccagctccagctctgtgcccctggcctccagctcccttagagcagcctcgatctcatttagtcgccgctggatggcctgaggagtacaagacggggcccaggagtctcatgatcgctcaagaacagagtcccaggggagctcttatccccagtctcaggattctaaccccatcagaacctcggaaccctgaggccacacctgagccttgcagaaccgcttcatctcctcctccttggcccggcgcagcagagtccgacgccacgttggataattgttcatggtgcctgagttctcagccaagttcctcagaaactgtgacagagtcagtggataggggttggggaagctccatttaagaaggaccagaaagaccctagactggaagtggggtaagtctgatagaaaaggtagaggcttagggacatgaaagagtcagaccacgtgagaaggtaatttgggctcagaagaggctgggtgctgtgggtttctcctgggtgaggggaggcgtgtgttgagtggatgtgtgctggcttgggcagaataggtggccaggttcttcccactcccatgttccatgtctgagtccaaaggcacatcttcctcttcctctgtttcctcttcacggaggaggacctctc

SEQ ID NO: 40630 - DNA, 3214 bp, Bovine  19866880640838
  misc_feature (1)..(1): n is a, c, g, or t
ncccgcagccgtcacctcccccctgcgcttctcgtcctcaggggcattccctacctgagcaagcatcgcgccgaccgcgtgaagcgcctgggagactttctaaacatggagagcttcgacctagctctactggaggaggtggggtgcggaaccaggctgcaggggggcagcggcagtgggggcgctctcccagggggaagggccgggaaggtatctttaaccccttcccccaggtgtggagtgaacaggacttccagtacttgagacagaagctgttgcccacctacccagctgcacactacttcaggaggtgagcagccaactggcctggaagcctagtttcagaccttgaggtgcttggcctgccagcccctcctccctatgctgcctgcaccctgcttcctcttccccagcatcctctcctctgggtgtggaagcagaaggtagaatgaggaaaatctagctctgcagctcatcagacttactctcaggccatcctatcaccccacacaaacaactaacactttgtgagcttccatcagctgcaaaaagagaaaaaaaagctgataagagctgggggaaggggctgggtatttctctccctgcttttgtgaccgctaaccaggatttggctttcagtggcatcattggcagtggtctctgtgtcttctccaaacacccaatccaggaattcacccagcatgtcttcaccctcaatggctacccctacatggtgagcctgatctcgaactcatccaccaccctcccccacctccactaacacatggtaaaggaggtaaccttcccaggactgcaagggatgggcagagagagggttgcagtgctctgagttctgtcccactcctgcctgcagatccatcattgtgactggttctgtgggaaggctgtggggctgctggtactccatctaagtggattggtgctcaatgcctacgtgacccacgtgagtgaagcccacagtgcttagggctgggagaggcagcctggtcctgggagggagagaggggacacctttggtggagtctccttggggtgagttgtaggggcaggattcctaaggtcagtaggcagagttcacacattttaccaagcaccatgccaaatgacaaacttgatttacatctgcccttgggaccttgagtctcacctgttactgtctcctctatctttcgcagctccatgccgagtacaatcgacagaaggacacctacctagcacatcgcgtggcccaagcttgggaactggcccagttcatccagtgtgtgagcctgggcttaacaggggaaatagggtgggatcgagggattgagtggtggctgtaaggtcccactcttagggcagaactgatgagggaagaattcctgcctcaccatcttggttcctccagccacacatccaagaaggctgatgtggttctcttgtgtggggacctcaacttgcacccaaaggacctgggctgccgcctgctgaaagagtggaccgggctgcatgatgcctatctggagacccgggacttcaaggtgaggatctgtctaattatttccccacctacgccctcagcctctttccctcctccttcccctgcatcctcactcaagcccactcttcacctagggttctgaagaaggctgtacaatggtacccaagaactgctatgtcaagcaccaggagctggggccatttcccttaggcatccgcatcgactatgtactttataaggtcaggcctctccccgccgcacccaccatgtctcttcatctctcaccaggctgtgctgatcctttgtccagctggtctagtcttacgtcactggcagctggaaaatggatagccaggaactggttctctggaaacatacttccaaatagaagtttctctttggcccttttcctaggcagtgtctgggctatacatcttctgtaagactttcaaaactactacaggccatgacccttacagcggcccccccttctctgatcatgaggccctgatggctaccctgtgtgtgagacacagccccccgcagcacaaccccagccctacccatggtgagtcatccgcatccttttctttggcacttccgcaccacaggtacgccctccactctgactgttattctgcctccccactctcctgccttgtaggaccagcagagagctcgccgttgaccagtgtgctaagggaggcctgggcagaagtggaccagggcatggcccaggctcactggtgggccaccatggccggctatgcagttggtctagggcttcttctcctagcgttgctgtgtgccctggcggccggaggatggatcagggaagctgctctactgctctggacccccagcgtaggactggtgctgggggcaggtgccttctacctcttccacgtgcaggaggccaagggcttgtgtaggacccgggccgagcttcagcatgtgctgggaagggcaagagaggcccaggatctgggcccagagtctcagccagccctgctcctagggcagcaggagagagagagagctgaggaacaataaagcttgacacttttgtggctcggcctttttccttgtagaggcagtgactggggccaggggtcagtgtgattgtcacagtgtagacctttgggctcccacccgtctgccctccctgctcagtccccacctcacacctgcagctagccagaagtcctgtttatgtcagaaactttttattgtaaacactgaggcactctcccaggcagcccagatgaacacagggtagcactgtcctggggtaaggcggtcttcctggcagataagtcaggcagcctgccctcttctagccctggaccccgggctccgaggccagctcactgagcctgcgctcctcctggaggcggatgagagcatctcgctggttcaccacatccagtagcttcctcaggacctggtcctcagcctgccgatcggcagctgtctttagggtttctgaagggaggagatgaagcttagaggacagaggatgcggcagagaggcccaagaggcacagcctaatcctagcctgtgtgacttctataacccctgctgtttcccaccctgtgaaattggcttatcaacactaatggttttctagcattgttagctgcaacatcattcttaaaggaaatctggtgtaaaagctgagttgtgcagctcgactgaaggtgcagagtagg

SEQ ID NO: 40631 - DNA, 1831 bp, Bovine  19866880709871
  misc_feature (1)..(1): n is a, c, g, or t
ntctaaaagaagaaaccctgaaggagaaaagagagcaaaaatttgtcaacattcttgcttctttataagtaacataattctaaaaattaaattgaagaagtgaaaaaagtagaggacaaataagagaaacgatctcaatgtacccaaaacatgctgttgaaaggaaaaaagtgcttagcaggcaagctatatataagaaacaggaagatatcaactagaggaggaaaatctagacaaaattagtaagcagaagtaatattataaaccagaattcattccaaataaaaaatgttttaaatgacaatagggcatttttttcaagaagcttaaactacataaatctaacaaatcccactcccattcttaaaggagttgtttggtttaatggctgaaatcattgttatgtgtgtctaatcaattattaaatatttctattctgaagaatagatctacatatctacagtactttaattcactttcaatttctttagttaataaaaaaaaattcaaggtttaatatgtggccaatgaaagtgtaattacaccttttgccctgactagtattctattaaaagatatctattctttttcatgaattgactatatttttaaaagtctaatgggtttagggaagccacttggtcaagagagcatacaatttgagatttatctcctgaatttcaaaaacaagagtataaggcatcatttcctttctcaagtgcatggtggttgcatgcttagtcatgtctgactctttgtgaccacgtggactatagcctgccagattcctctatccttgggatttcccaggcaagaatacttgagtgggttgccatttcctactccaggggatcttctcgacccagggattgaacccatgactcctgtgtctcttggatcagcaggtggattctttaccactgtatcaccctacgtagccccaagagagacaaatccaccttcatccctgcactttgcttcatttccattgttcttcagaacaccatcttgcctttgccacagttacctcaacaatcttcataacacatctttgtacctctagttttgcctgaaccttagctgaaatgcaaatttgatgtcattacattctttaaaacttttagtaactccacagtactcttaagaatgaaatttattgtctttaatgaatcttaaacaaggtccctccttactgtttgacctaaactccatccattactctccaaactctctgctctagacaccagtgagtgagtgagtgagtgaaagtttctcaattaaatccagtctttgcttcccccatggactatacagtccatggaattctccaggccagaatactggagtgcatagctgttcccttctccaggggatcttcccaacccagggatcaaacccaggtctcccgcattgcaagtggattctttaccagcagagccagcagggaagccctccagacaccagttgttgttgttgtgttactcgctcagtcgtgtctgattctttgcgaccccatggattgtagcccactaggctcctctgttcatgggattctccaggcaagaatactagagtgggttgccattcccttctccaccagacaccagtgaacttcctttattcagcttccctctcccctgcctctgggcctttgcacagtgctagtttctttgcgtagaactctgtctttactctcccaaacactccaccaattttctttccaaggcctctctattaatcctctaagccctagctcagatatcacttacttcaagaagcccatcttgaaccaccagtccaagtctggactctaatgcttcatgggtctctg

SEQ ID NO: 40632 - DNA, 953 bp, Bovine  19866880791528
  misc_feature (1)..(1): n is a, c, g, or t
nagtaaatgattctaaaacaacttctttcttacctcataaaagttacattttaaaaaagctcagtggaaatcttaaggtacaacagttaggaaacttttttgaagtatgaaggaaaatatgattaaatcaactttatactttttaacagccataataaaaatttagggtggttcaatagctgaaggcttttgacttcctataaattgtttaagttactcggacttgaaataaagtaggtaagttttcagttaaatactaacagtgtagtatcttagagcagattttttattgcccacatcaacagttacatcctcagaccaacttctcccttctttaatgtgaaatagcaaatcaccagcattttaggttaagtctagactttaagggattattctttaatttctaagtgatacaaagtgctttataagtatgaacaataatgtgttatactttactatttttttgtcctttccattcattttttaaaatctggaacatggcatctttttttccatgtagaaaaaactgttatcaagcacaaaattttactctaaggatactaaattttaaaatttattccactttttaaatgatagccaaaaatccacctgattgatgctcatttagcaccttctcaattctggtcactaaaggtacatcctgggtttgaataaaaataatgcatctttcaggctttaaaatgactactttttaaaaaattttaattggaggctaattactttacaatattgggcttccgtggtggctccacggtaaagaatctgcctgcagtgcaggagatccaggttcggttcctaggttgggaaaatcccctggaaaagggaatggcaacccactctagtaatcttgcctagggactgctaagtgacttttcctgcacctgcaaaagggttatgaggctgtctgcacaggacagtgttttcccttccag

SEQ ID NO: 40633 - DNA, 3343 bp, Bovine  19866880797830
  misc_feature (1)..(1): n is a, c, g, or t
naatgctgttaattggactgttctaacaaatagtgaataaaggcatgttccttcttattctaccagctgggaaaagaaggaaaaaaaaaaaaaaaccaaggtaatacagaccaagatgcaaacatatgatgggtgcgattaacaagtccttgattggaaacaaatgctgacagaaaactccagaccagctatcacacacggtaaaaattctagaaaaaataaacagcaaaactgacttgtaaattacgctgaatttcaaaagaattaccaacaagaagttctaatgcaaagatgtcgagagagtgtttttactttatgagaccattacagcattagaggtaaaactgcattaaaaaaaaaattgagtaaaatagaagtgaaaattaaaaagagaaaggagaggaaggtgagagatggctttaaatatcattcagccaaactttatgtgaaatatggaactgaggcaattatttagataatttatgatgaaggaactatcattttttagaaattatgacactttgggggaaaaaaagcagttctgagatttgaattatgtgaattaatggcttaactctccatttgctctttttaatgtaataccaattttcaaggagacatctaagaagctgtactggatataattctatgccccccttcaacttcaggtttatacccagagttgtatctttacaagtccacaaggccaaggccaccttctctgtaactgcctttggccccaccacgctccccacacccgggcctcactcagttatcaggcagagcccttctgcctgctccacatttatcacagggtttcagtctatcttctggacactctccagacactactcacctatctttactctgaaactgagagttctaaaattttttccagcacacacatgggattagccttctgcaagctgtattttatctcagggcacatgggtgctgtattcctgtggccaattaaaaccatcattttaggtccagtcatacatattctaccttgaagacaaaagcagtaagtgccttaataagataaatcctttaacctggccagcagcttgcattttgcaagattttctgtctgtcttgctttaaacctgttagtaactgcaatggaaagggtcaaccacctcacaaaatatgcttaatacctttaatttttgagatctcattgggcttcgaccacacttctgccacaaaccttttataaatgtctttttttccctgaaatccatctttcttggtggtattatctccatccatctacctacctgaagcctacagaagtacagatataccctgttctcccaaggcagaaatttctgagagataatagcccagccctaaggatttccacacactatagtatcactctttttgtcctgaacactagtacattatctgacctatagtaaaccatggttaaacagtggtttactaaagcagcatccaaacagaaatacaaatccccaaattaaattgctccactaagagcccaggcactgattagattcttaaaattattcactcaggcaaaatcaagggcaggagcctaaatcatgggtctgtgtctactcccctccaacaccgagaggtatcagttaccccaagtgagccacagtccagaagataaacattcaggacagcattctgaaagatttccatcaggactgatggtaatacatacaaagaatgcggcacacagtagcaactttttcaatggcagctatttaattttattgttgtattcacccccaggcaaagtcccaccacactcaggaggcagcaaagcgtagcagaaaactgacgttcaaagaaaccttcctctgaatcccaagcaattaaatttctctgaactattttcttgtctctaaattgggtttatacttaaatgcttaacatgtaggatcaatattagatgtaaaaaatctacctgagtaattggcatatgatagtgttcaataaatcatagctactattattattataactaggcctcagaatatcttgtgtcaactcctctttttatcataaaaaccaaactgtgtttccaattgatttataaccctggctcccttttcccaaaatactattttgaaatatgagcataaacagatgcaattctaattctgaaatacttctgaacaattcaacccaaacaccttcacggaacctagaaaacacctgttgctacctgaatgaggactaccactctatgctccctcaggatggctgggttttgtagacataaatgtatagaggggatgggagcctgaaggctcgagtgttgacactttgaaagggcctgaactaagcacaggaggaaccaaggagactccagagacattctgattacccttactgccaccatggacggcagtgaacctgatggggcgataccttctcaagcctgactgggctggggaagagagaattcttcaaccttcttccgctgaggacccaggctgctccctccctgaaagactgactaccacagaccaaagctctcagctagaccttggccttaaacctcaagtccacactccccgagtacagccattccaccagcttcacgaaataggccacgaagtagaaagtgagtaagaagggtgggaagcttaggagcgagcccaaaatacacgctaaacggagggcggagggctcgctgcagcagcttgcactgggaaatcaggggaattcacacctcccttctgtgcctaacagcaggatgaagaagaaatttaagttaccagaaagtagcctaggagtgattacattttaattttaatctaaatataactttggagggagagggcaaaatgggtgaagcgggtcaagagagacaaacttccaattactaagtcagtcagtcctggggatgcaatatacagcttggtgaatacagttaatacctaggtatctgaaagttgctcagagagtaaatattaaaaagttctcaatataagaaaaaaaaaaaagaaaaatgttaactagacttacagtgatgatcattttgcaacatgtataaataccaaatcattatgttgtacacttgacactaatattgttatgtcaattatatctcaattttaaaaataaaataaaaccttcttttcctcttctgcaacccttcatgttcctctcttccatccctgtgcgcctatgtgtttcctagggctaccatgacaaattactacaaactcaggggcttcaaacaataaaaacgtattctcttacagtgctggaggctagaagtccacattcaaggtgtgggcagcaccatgctcctactgaaggctgcagcggagggtcctgcccggcctctgcccag

SEQ ID NO: 40634 - DNA, 989 bp, Bovine  19866880857571
  misc_feature (1)..(1): n is a, c, g, or t
ncttggcgtaacagactctgataagtgctgaaagaatgaattttgtgtatgtgaaatgctttggaatctgtaaagtgttatacaatatatttttttttctagtcctctagtacttcttccttaaatatttactttcctcttcctactttggaggaggaaataataattttccccacatttttcttgttgatgggctgccatacacagcagcaaaacagaaatgctggatcttaaattacttcagaccagcacagcatcttaggttcctgttccctttggcccaggtgactagttggataagatttgttttcctctttcccaagagatagaagtgatttccagaaacagaaaccgcacaccacatcctgatgtgagtgttttaatctttggtggctcagattttgctccacctgagctttacttggacattgagacttttgaactgatctttgaaatgtaccccagtcgtccagcaacttttaaactggaattattacttcctagaactatttttgtttcagttctaggaaatgtttctccaaggccagcttggattatagacacatgcacactttggacccgttatagtctcttcgtgtacagagctgtcacccagggactcagcaatcagtctgcagcccttatctttgtcctgagaggttagcattgcctttgtcttaaaagttggaaggctacgttgataattggcagagatttcatttttctgggacttatttttaaatttaatcacgttatgacttagtgtatttttggagaacatagaaacaaaaatctcaaaaaaagaaagaaggaaagaaagaaaacccctctctagtgacaaatgaactgtcacctgcacacacctctttgagtgttttttgatcactcaggagaggagcttagcaggaaactgtggccagccgcttcccccgtccaccaggggggagatgctgcttggaaccaggtagcaccaaagctgatggctgctg

SEQ ID NO: 40635 - DNA, 2500 bp, Bovine  19866880865670
  misc_feature (1)..(1): n is a, c, g, or t
naggcatttgggttctgtgctgagtcggagagggtgggcgggaagagccagctccacaagggcaaagcagcaggagctggaaagaatgaacaagctaagggctttttgtgccgcccgcccggtcaggggtgcagaccaaggccaaggccgaaaaaaggagcgagctcagccaaacgctcacagcacccactgggaatgtggctgccgaggggctgggaagacagccacagggccctcctgccaggctggaggaggagggcaagcggggagccaagtcaccatataaaggcgccggggaaggggtggaggcgcctccctcgccaatcctctgtggccccaaagaggatggaggagggggagaaaggtcgcgctatcctctggcctgctgctcggctgtggttgcactgaagaggaacagctccaaaaggggccaatgttttttgctttcagccctaccctctccagacattccgagtcccgttttcaacagcaggatgcctgagcactctgaatcagacagcgttcacatgccttgaagaccgccgcttgccctggacgagagaggctcagcttaacaagcagtacaagcacggacacgctgggggattcccagacagcgttctctgaggctgacgattgccctgcatcgggaagttctgtttcacaaaagaagcacaaggaactgagtgtatctaaaagtggggaggattagacagatagctgtttaatggacaggagtgatgggaatgtagataaaggttattattttttttttttggactgtgacctttgcaaaacattgccagacttacaagtcttatttgagggattttacctgatctcctgcccagtagatatttatagaagaaatgggggaaaatccttctgtgctatccaaaaaaacaaacccaaacatattttggtgagctgctaaatgtggcgacgctgatgtcagaagcacccctgaggcaggtctgctttgcaaggctgccacagaccccgctcacgccttccacactgggcccatctgcttgcacatttggttgtaccaaatgcagtttacaccataaagcatacaatatgtgcacagttcttaaatgagatttgtcatttcactgaatttcggtcagcattttaaatagatacatttctttgtgctctagtcgaacttacaaactgcacccggctgactgcagtgctgtgttttggtctcagtttttgtgtgtgtgggaactgggagttaccagttggaccatggatcctggacaaatcaacctcacagacagacatgagccaaagaagttgcccttgttctccctgaggaagtcctttgtgagagctgggaggagtggattccttttctctgagactgccgatgaaacccttggcttgtaccacagccatcatattctgacaagctcgcgtcactgaagggctatgggtgaacagagttgttgtgaacccaaccatgcgttatttaaaatgaacaaattgtcctcagctttgttgcaaacttaacaaaggttagatatggagatatactgaaatttctcaaagcaaaaataaaattcggtggttgcttcattagcaaatgagtcaagaacaacttgtggcttgtctagctaaccaaggataaggaatcctcccttccactgccagttcaaggatccccagggctcacttctcctcagtagcccagtgtgaccagtgtcggaagccccatttgtgcaatggcttgttctcagtgtcatctgttttgacacaagtctggcagagaaagtccctggaagggtcgaacggcccatctccttttctctggctaagaaagtgctccttggttaccttgtgcctcagcaaaaggcacaaggcgggtggttatcaccacttactggggaaatctacaccaacacctggcctgtcttgctgatttggttcctactttgtaagggagattcactttcagccacatgcctgaagatgaagattgaccctgtgtggctgctttgattaatcactttaaaatctcttgaggatttgtacaaaaccctccgctgtcaattttggggaaaacaatttgttttaaggggccatcttaataatttacaccacaggttcccacacctgctcttcacctgaggtacctattaaaaataggttcttgggctctgtcccagacctgaatcaggctctcccagggtgaggcctgagaacctgtatttttaaaactcctcaagtttaggagacaatgattcaatgattcaaatcaagaaagaattcaatatctcaccactttaatacctagtgtttttatatcatgttaaaaaactatgaatccatgtttcttttaaataattctcacaacacagacaggtagaaaataaaggtgaaaatgctctccccaccacctttcattatcaactgacctaataactgagacagattaagggcactccaaaaagaccaattttcatatgcgaagtcagacttttccttaaaagag

SEQ ID NO: 40636 - DNA, 734 bp, Bovine  19866881009468
  misc_feature (1)..(1): n is a, c, g, or t
ncttcttgcagatattctcctgctactcttgtcttagctatctccgaagtggatgataaccaaattggcaaatttagtttttatacaaaggaagccattcttaaggtaaattatttttttttctaaaaaggaaacgaaagtaaaattaagcaacttgtttgtgtattccttaaaaagtataatgtttaattcacattagtttgaccccgtatacaagaaaagatttcaccttcataaataatgatgatggctttccttgtctgacatataatacctcttgagataacctctgcttggtattaaaaagaaacccatgttgggacttccccagcagtccagagatattttcaaacctggtgttatttttccctgccactcagatggacttctttgcttctgtgtgtgtgtgtgcaggtttgtatttgtgtgtgtatgttttaaacattaatctaatgttggcagttttacaagagcctgcctttgagcgtatgtttgctagttcatcagagcctatgtatcctgtatctgacaactggggaaacctgatggtgtccagatacagagcaattcggcctagagcctgccctcacaggatgaaatactgcttagggagaaaccagctttaggcctgtcgctgaggagcaagggtctcagcaaatccaacagtttgatccatgtatttacgtgttgagtgagtggtgatccccaccctcaacttaatctctttctgtaag

SEQ ID NO: 40637 - DNA, 671 bp, Bovine  19866881013093
  misc_feature (1)..(1): n is a, c, g, or t
nggtgtcctgtccctctgaacccttccctggagaggaaacgggaggttagggcaggggagacacagcagaaagcttggctagtgaccacacagctcaagcttcaccaccttatggggaccctgggataaaacagggattccctacctccaggggcttgtgcaactagttgagcctgagcgaaatagagaatttcttgtcttggaatctgacagaagctaaaaggaacctaagaaattttttaacaatttcacacctgaaagacagcttagtaaattctagacttcactgtctgcttacacttcgctgcagtgccatgcccaatgcaagttggtttggatcccttaacatttgtaagcacttgtactttatggacacttcacagtaagcagcagtgttcagtcctctctggaataaccagagaggctcagtggaaactcctctcaatggaacaagtccaggaaccaccctggaatcccctgggaggagggagtgatggaaggacccacatggggctggctctggggaacacctgatagcagggaagggggcagatctgggggacttgggggaggttttggctgtactgaaattctcacttgtggggcagctggaccaggctccgtgatggcctgttttaggcatgggtctccatcttacagctggtcagaag

SEQ ID NO: 40638 - DNA, 1753 bp, Bovine  19866881106766
  misc_feature (1)..(1): n is a, c, g, or t
ntgaagaatcgatgcttttgaaatgtggttctggaaaagactcttgagagttccttggacagtatagagatcaaaccagtcaatcctagaggaaatcaactctgaatattaatcagaaggactgatgctgaagctgaaactccaatactttggccacctgatgcaaagagctgactcattggaaaacaccctgatgctgggaaagactgaaggcaggagtagatggggacgacagaggatgagatggttggatggcatcaccgactcaatggacatgagtttaagtaaactctaggagatggtgaaggacagggaggcttggtgaaggactgtgctgcagtccatagggttgcaaagagttggacatgacttagtgtctgaacaacaataggactgttaaataggcttatttaaacacaaaccagctaactaattgtccagatttctatataatactgctgtttattgagttcagagtcagaaatcagaatgtatagtttacatatattatactcacttctggcaatattcaactataacatctctcttgactttcccaatttcatcctgtgataaaagagaatgatagttttcctattagacaattggctataagaatttcccaagctaatacacgtgcacaaacttatagccaacttaaagtgggagtaggtcacacagttgagatgttctttctgaaggtcaacctactgggaggtactccccctgtgggtcttttctactcctgcacatcttgtgagtacaccaagaattcaacgccctgactattctttacctgaaccatttctcagggttatgtttgcagagagcagtctggaggaatgaggtaatgtctccctccatgaaatagagcaagtttgctataatagaggtagattcctaaactcagtattcttcaactctgacacaaaactgtgttcaacctcggctcctccatgttgcccctgggacttgggaggcaaagggaaatgacacaaacgtgaggcttatgatgctggctctgctgtgagtaacaaagtcgtttttctctgacctaagagtctagtgttctctgtcagcatcctcagagcagtaacaggctaccttcttagcttataagtgggctaaaatcccagaccttgacaaaactaacaattatcttgcctgaatcctttctaatctgataggcattggatattcctgaagggcagttaatgagctaatacattttcacttggtcagtatttttttaatattataaagagtaatttatgtatcaaagtaatttacttaagtacttatcagaaggagtcgtttgcccacatcattgctgagcagtaatctagaagccctagcttccatcatatccaatttgtagaactgaattaggtaaattgaagtccttccttttcagtaataaaagaacaaagcctagagattataaacctcgtcatttcattcccaaataactatatattagcctaaggactccctcatcaaaaaagtaatgaataatgaaatgatattcataaaaataagcaacacttttaattgactaaaggtttaaattttatggagaaggaaatggcaccccaaaggttgctgctgctgctgctaagtcacttcagtcatgtctgactctgtgcgacaccatagatggcagcccaccaggctcccctgtccctgggattttacaggtaagaacactggagtgagttgccatttccttctccaatgcataaagtaaaaataa

SEQ ID NO: 40639 - DNA, 791 bp, Bovine  19866881119990
  misc_feature (1)..(1): n is a, c, g, or t
nattatgggattggaggatgcctaaacttccgagtgaccagcatgtgttaaaaattttaagaccttgtctgaaaacattgtatgaacactaagaaggcttagcttctaatacgctccagtctatgaaggagagtcaacagttcccaatttcaacctcttttctcttctccctcttttcctttatctttctcttcctgtcttcccctccttccctctctatttttcaaactccaaagaaggtagaacataaggaagaagagtatgagcatgtccaagttttccacttctattttaaacagaaaaggacagaactaccctcactatcctaccaagggtttttccattgcttagaataatagaatggtaactgtcagagaggcagggcctctgcagatatgtatctgtaaactagggacatcctgttatatcctgatctcatctcactgtgacgaagaaagaggtttgtattctgtaacaattacgaatactctgaataactgaggcataccaatgacactctagtctaatcctggcaaatttagaatgaaaaagaaaatgacaggcaaatcttctctgctcctcaagatgccattaatctgacacatggccagagttcaagtgtcctaaatccacacttcagtgtgtggatgggagatttaagaccgatgtgtctagtcaagaggacccttacaaggccacatcaatccagggaccccctacagttcagaccaggaaggtacaaagggacactgggagtacaaacactgggccaggctatgaagtttgggagt

SEQ ID NO: 40640 - DNA, 1380 bp, Bovine  19866881141913
  misc_feature (1)..(1): n is a, c, g, or t
nattggagaaggaaatggcaacccactccagtgttcttgcctggagaatcccagggatgggggagcctggtgggctgccgtctatggggtcgcacagagtcagacacaactgaagtgacttagcagtaacagtaatcttggcagaaatcatctttaaactggcaaggggcattatgattctgtccctttgagataattagctgagaccacttttagagctacatctgggactgctccaagaaatcatttcacttaatcatctgaggcggtctattaaatattggctgttctgaaaaactggcctgcaatctgccaatactggtgacttattagaattgataaaagacaatcacctacaggatagatgtggatcccattaacccctctctggctgtgatgcaaatattgaacacgaggacctggagtaatgaggtgggggttgggatgggatcttcaaatgccaccacctattgattcccagggaattgattttgtccttagcaaagcacatagcaagataggctctgtgtcccttgtggcaatttgatgaaagtcatcttctatgcaggaggtcatcagcaaacactgggtgggggacctcaggctccaggggagatgttcagggattctccatcctgaactggagttagtgtccccttctccactccttagctatgaacctacacagactcccagccatgaccaagctcagaaggtgaaactgaacaactttaacactccactcataggtcctgactgctttttgggttcgttcaaggagtgctggagagaaagaagactttgttgaccagtgacagagtctctccatatacccaggcaaggaaaaccttcctaaatcctttctatactgccaggtcattccagaacaatgtcctctgagatgtatgtgggtcattctacctggaccaagttccgttgcctggggcaacagtgttttctgaaccaatatgggggctgggcgatctctaggtctggtatgttgcagtgtaaatggaggtcagacaagttggggctggctgagtcttggaagctgagggtcaccgtaaccacatctcacagtgtctctcctcctggaccaatatctgaatggtacacagctggcatctcaacacccttctacaggggcagcagtttgttttaagggcagaatgactggagttctgccactttgtggcacactttcaattattcataagtaaaatcaatgataaatcagatcacacttcacattagagcctagattcccatccacataagggtttcaggttatttttaagaaaaatctaaatacccacattcttaaaacgaagaaaattataccacgaccctaatttcccactctccaccttccccacccca

SEQ ID NO: 40641 - DNA, 732 bp, Bovine  19866881203999
  misc_feature (1)..(1): n is a, c, g, or t
ngtagacgaacatttttggcagctggaaatacttctgcctaccagtctgtcatagacggcatgtaccatgggttgccatcactgagcaactctccaatgaagagcatttttgcttcccagctcagcctaccacaaccactggatccacagagcctccaggtgtgttgagagctatttttgtactgagatgtgttgagagcacattttgtaataaaatgtgcattgtgcataggaggctcttcatgccgaagtacccattggccttggtaagctccccttcactcatacagtagagagggcccctatagcttgctgttatttctagtcaggagctctgtctccaaaccgcttaacaggctaattgggataacagattatctgctcacagctggtagcaaaaccaacacctgatctctttcatgtaataaataataatgatagcaattatgatacataaattaggtcagcagctgagttttgaacagcccaataacaatatgtgttatcaaatgtaatcctggaaactattattgctcctaggcaccaactctattacccacctgctacaactaaagagatcagactgctatgcagtcctggcaacactaggtcacaaactgtattagctttttatggcttcagagcaaattacccccaaatatagcatatttgatgcttttgaactgtggtgttggagaagactcttgagagtcccttggactgcaaggagat

SEQ ID NO: 40642 - DNA, 782 bp, Bovine  19866881254229
  misc_feature (1)..(1): n is a, c, g, or t
nttctggaatttcttcttctggttggacccactccactatgatttctcagaccagaacttatttcctacaatatttcaaaccaaagtgaattaaatttgttgaatttgtaagtcttgtggtactgacagtaaaattatctaacagctataactgatcccaaatacatgtaaatggcctggtaccctaggggtgagagagagtagaagggagagaagagaagagaacaagtaagggagcacatggaagagataccactttgtacaatgaaagggtgaagcactaaatgtgactatttacagaacagagttgtctaaagtgctctccgaaaaatttctccatcttacaaggtggctagttggagtgctttgtataggggcctctcaagaaatacagctgatgaacttcagggtacaagatctgaagaatcatctcagggtgccattctggtacgacctaagcagatggaggtgggctgtataagctgccctgtacaatgtattaatgaaggagggagaggtggagggatgatgggcaagaggggaaggaagagtgggaagaaaaaaagggaaatctgtatcttccaatattcctattatttatggaggataaatacaaggaaagatagatgggattcttttacatttttctaaaatactaactaaaagaaaaacattaagccttcaaaggaaagcccattctttttcaaagaaagaaggctttccacagctgaattactgaaggaaaggaaaatgaggcaaaagaaaaaaaatcttgagttaaa

SEQ ID NO: 40643 - DNA, 779 bp, Bovine  19866881299424
  misc_feature (1)..(1): n is a, c, g, or t
ncttttaagactattttccttgttttactgatctgacattctatatagtttagagacgttcaaatttctgctgaactgatacatataatagccacaactggaagaatcagttgcctactcgttttatcaaggtaactgacatagatagatagatagtgaagtcgctcagtcgtgtccgactctttgcaaccccatagatggcagcccaccagcctcccctgtccctgggattctccaggcaagaacactggagtgggttgccatttccttctccaggggatcttcccaacccagagatagaacccgggtctcccgcattgtaggcagacactttaccgtctgagccaccagggaagtccaactgacatagtggtggtgaatggagaaacaataataaacataggcagacattaagtagagtctcaaaataggagggcgctaggatttgaggagggcagaatcattgcccgctgaagtaggacccctgtggtaggaatgtgccagccaggcactaagcgttactgaggattgtgaactagtattactttcacatacatgtatcttaactccagtgaaaggccgaggaatatttgggactagcagtttcatgtatataatggcatcttataattggtttcttttatctcagccagaactgtactattcatattaatatatgagacaatatgaaactccttgggttaccacagaggctctggttttggcatatatgtggtctcagttgggcacaaatccagaaaatgaatatgctctcatta

SEQ ID NO: 40644 - DNA, 1421 bp, Bovine  19866881329925
  misc_feature (1)..(1): n is a, c, g, or t
ncttttcggccccatggactgcagcacgccaggctccctgtcctttaccatctcctggagcctgctccaattaatgtctgttgagtcagtgatgctaatggctcaccttcattgaaagcttactgtacgctgcacagtgttctaagtatttcacctgctcatttcatcctcacaacagtcttatgaggtaaataccattattatcctctttttctaaagaaggcaattcaagctaagttggtcttcaaggtagtcagcttggccccagggtccactccttaaccactaggcaataatgcccctgatgaatggacaaaggctcggcgactcatgctggtaataagacaactgggtttttcttgcttgtttagggacaatgatagttactggggtttccaagtcagagggagagaaaactctaatactgagaatggccctttagtcattcatttattcattttgttcatccgttatttcaccagtccaacaactgattcatgcgacaaatgtttcctgagcactctatctaggtaaggcactgtgctgtgcatcctcacagacagagaacaggatgcgtctaggtgagtgatgggattgggcatatagcagcgtcttatgatggggcttttaatacaatatgattaccgttactgccaccaccaacagtacttgtgcagcatcagcgtgtaccaagtgctgttttaaaagatttacctggattagtttattctgtcctcacgataattctctgaagtaaatactacttcagaatagtatcttcgatttgtatgtgacaaaactgaggcacagagaagtaaactaaggggtagaccaggattccagcccaaacaatcttgctccacggtccagaatgtttagttctgagaaaatgcaccacatccttaccttgaaatcataaaagttatcaatgagagttatgaatctccgagcttgggtcctctttgccagggtaaattgtggaatgtttcgtaaaaatactgtatcaaaattctttgacagttccaaatagtcactggctccaagtggctataattaaaatgaaatagagaacagaaaattgaaataagtcaattctggttgaaaatatctctttttctcatcatggtgtgatctaggtatcgctttgaggtaactttaccaaacacagtggtgttctcagagcaggctgaggacacgtgtacaccctacttactagggatataagcagaagggaagagagaagacgagcacatggtgggccgtgaagaacaattccacgccacctcagctggcatcctgtaggcccacatcctaaatctggtcttcatcgttttatttctatgacatgattttgctgctaagtcacttcagtcgtttccgactctgtgtgactccatagacggcagcccaccaggctcccc

SEQ ID NO: 40645 - DNA, 1610 bp, Bovine  19866881382655
  misc_feature (1)..(1): n is a, c, g, or t
ncatcaatctccaaggcatcactaacagatagtcactgagtgtaaaagtcttgtaagaatcgagaagttctcctaaaactaaatgctaaatatgattgttctccaaatgcaaataagaatgaatgtaaacacttcaaagggatccatttcaccggcagactctcattccaatagctatattccaatcttatcctccctctcttcccttgtttctgaatcctcaaatctttaaaaataataataataatgctcccaactgctctcaccttgactattcacccaaacaatttattcttgctgctaccttctatcttctaccattaaaagatgtgtactccttggaagaaaagctatgaccaacctagacagcatattaaaaagcagagacattactttaccaacacaggtccatctagtcaaagctatggtttttccagtagtcatgtatggatgtctgacttggactataaagaactgatacttttgaactgtgatgttggagaagactcttgagaatcctttgcacttcaaggagatcaaaccagtcaatcctaaaggaaatcagtcctaaatattcattggaaggactgaagctgaagctccactactttggccacctgatatgaagagttgactcactggaaaagaccgatgctgggaaagattgaaggcaggaggagaaggggacaacagaggatgagatagttggatggcatcactgactagatggacatgagttggatcaagctctgggagttggtgatggatagggaagcctggtgtgctgcagtccatggggttacaaagagtcagacatgactgagtgactgaactgactgactgatcttctaccacaccacatcagcccaaagtgctactcttttcacagcccaatccacccatcaagatgtcttcctaaacaccgtgaaactgatacaatataggcatgtcatatattctctatttgcctctctaaatcatctctctgacctatggactgtatcactggggttcccttgccatttggcttataatttcactcttccagtgagaggcactaacaaattaaaaggcagggggaagaaggtcagggtatttattcttccacttactctctgccaggctgagggctagcaatgaatatattcctctactgaaggccacgattcctgttaagcgggcagacttttcctatagctgtaaatttcatggagttccagtaacttcttccagaccttgtccctttacgttcatagctagttcaaaatgattattatcttgttggtttcccttaactctgcccacaccttcattaaattctcttcagacaccccatctgagtgtgccatcatttcctgccagaatcctggctgattcagcagggaggaaaagaaactaattaaaaattatattggcatccttagagagattacagagaatgaaatattcataatacaagaattggttgttctgagaaaggaacaatcagagaataagaaagagttcttgaaaattaaaaacattactaatgaataaaccaggggcttccctcgtagctcagatgggtaaagaatctgcctgcaatgaaggagacccaggtttgattcctg

SEQ ID NO: 40646 - DNA, 1284 bp, Bovine  19866881538120
  misc_feature (1)..(1): n is a, c, g, or t
natcagtcagaatttagtgtctcctgatgtatagaacagtcttgtggactctgtgggagagggagagggtgggatgatttgggagaatggcattgaaatatgtataatatcatatatgaaacgagtcgctagtccaggttcgatgcacgatactggatgcttggagctggtgcactgggacgacccagagggacggtatggggagggaggagggaggagggttcaggatggggaacaccatgtatacctgtggcagattcattttgatatatggcaaaaccaatacaatattgtaaagttaaataaaattaaaaaaaaagaatttagtgtctcatcttttgtaaatcagaaagtgtatgtaaaaaaaaatgtacagcctcattttaggtatgcagttatatataattaagctcactctttatgcatggatatgatttctatcagtataactacatgcccagggaaaatcattatcagaagtgcactgaagtgcctagggcagctgaaaaatcagaattctgcccactcagctatttttacaaattatatacctttgtcagtaggctctgcatttgccattaggctggcaaatatccctttccttcatatccctaagataattatgtgctcattcatataaagaaaactaagcttaacagttatctatctcctttaagaacaatggtcactgaggggtggggagttattgtttaatgggtacagaattttagtttaggatgctgcaaaggttctagagatggagtgttgtgatgtttgcccaacatgagtataattaatgccactgatctgtatacttttaaaaaatgattaaaatggtatattttatgttatgtattacttaaccacagtcacaaatagtctttaaataaaggagagcttattcgttgcaaaagaaatttcaatttaggctatcgagaaatatcacctttttctctaaaatcatgaaaaagaagaatgaaatgtactaatcaaagaaggatgtcttttccccaaagaaaacagctccagaaaggttaaaattaatttaaaatataaaggtttttctttttttttttttaataggtatttaaaagagtgtgttttcttattccagcttcaatattgaagtgtctaagaaatgacactcaacaaagatccctaggattgaatttggggagagataggggtttcttattaatgagaaacactatttttcattacttacgtagctgtgaatgaaaataccatagaaactttggaattatggtctgtcaggtctagtgt

SEQ ID NO: 40647 - DNA, 1433 bp, Bovine  19866881545588
  misc_feature (1)..(1): n is a, c, g, or t
nggagatagtgaaggacagggaagcctggtttgttgcagtccataaggtcgcaaagagttggacatgactgagcaactgaacaccagatgtctggcaattccacaaagaaagaatacgtagtctgtgcaaaggacctgtggccagagaagcacggtacccagaggaaatcaaaagaatacatgaatggctgggacacagtaatccaggtggaaagtggtaccaaaaaaaagtaacccaaggtttttcaacgttggcattattgacattttgggcctgataattctttattgtgagagactgtcttgtgcactgtggaatatttggaagcatccctggcctctacccactagatgccagtagcacctcccctaagttataataaccaaaaaagtctccagacatggccaaatgtcctctgagggcaaaaatcacatttggttcaaaaccactggaaagagataggcagggagcagaccatgcaggtccttttatggagttttgttttgtactatgagcaatgggaagcctttagaggctttagatgttaaaggggagaatggataacataatctaagctccatttctaaaagatcctctgctagtagtgaataaaatggaggggagaaaaagcccatgccagaaggaaaatggacagaccatttaacaggctaaaccagtttagaagctgctggactagttctagtgccagatggtgacagcttggactagggtggtgggtggtgtcattgcagttggatggatttgagacataggaagtaaaatcaacaggacttagtgatagattggacatgtagggtgagatagaaagagatatctggaatgattcgtgctagaggaagtagatgggtggtggtgatgtttactaagtggggaagctggaggtggcttaggttcatgggggagagcacatgatttgatcatgttaaatttgaggggcttttgagatgcccaggaacagatgttaaatagataattggatatgtgggtctggaattctaggaggtctggattgggatataaactggggagcaaattgtctaaagatggttatctcagctgtgaaagtgtacaatctccaagtgaaggactattggaagaaaagatggaagtcctaggagcttgagtgtgggccactatttgatgacctgataaagaagaaatggctgaaaaattggtgatagcaaggaaaatgtggagtcccagaaagccaatgcagaaagtgggtcaataagcagggaatgctaaaccatgtccaatcttcctgagagagtacataaagatgactatagaaagtctgctggatggtcattgttggtctttgtaaaattggttcgggtggcttgatggagacaggagctagatgggtgaggagtaggaggtaaggagaaggagacagatatttttaggaggg

SEQ ID NO: 40648 - DNA, 1571 bp, Bovine  19866882173542
  misc_feature (1)..(1): n is a, c, g, or t
ntttttcctagtactatttgtcttttatagtatgcttgagcatcagaaggtcttctctctactcaaaatgatcacatagtcatctctgccagtcaaaacactcatccttcaagtttttccaaatgtccccactctgtgctgccctttctggttccccagatgtgagctctctttttttaaaagtcctcctatagcttgttgaacctctattattccttgtatttaaaccacttatgagcctgtccccattttatacaccagatataatttctctagtattcttgcctggagaattccatggacagagaagcctggcaggctacagtccatgggatcacaaagagctggacacgactaagtgacaaacactttcattttcacttcatgaatcagacctcagtattatctgatgagcctaacttaaagtatgtactgaattaagacttgaggggttgaatttttaaaaatcaatataacttactctatccctattttctacttcagtatttgatttctatgggaattagtatttggcagtagaagtgaagattgaatattcttgccatacttatgaatgtatactcttttattaatgtaaagagtgaaaatagagaaatgtgctaaggggtaaaatgtggtaagctgtataggattcatatatcaagaatatagatgctgggaaagactgagggcaggaggagaagcaggagagaagatgaaatggttggatggcatcaccgactctacagacatgagtttgagcaaactctgggagatagtgaaggtcagggaagcctcgagtgctgcagtccatggggtcacaaagagtcagatatgactcagcgactgaacaacaacaatatagaattcataaggcttagagaatgtttaagaccatctggaaagttgacttcctaaagttatatttaattttgcacctaaattatattcacaagtatacacacataagagtgaactatataaagttgtttttggaaatggggggaaatctctgtgaattaattcagagtgatttctaggatatactgttaagtggaaaaaaatgccttagagtattatatacagataaaatcgaaaaccccttcatgataaaatcatcaaaaagctatgaataaaagtgaatgtcctcaacttggtaaaaaaaaaattatctaagaaaaactcatagctaacatcatatgtaatggttaaagattgaaagctttcctcctaagataaggaataagacaataatatccattctcactgtttctattcaaccttgtactacagtgtctagctagggcaattggacaagaaaaggtaacaaaaggcatccagaatgaaaagagaatgttaaatttatctctatttgcagaagacataatcttttacatagaagatcctaaggaatttacaagcttagcaagattgcaaaataaaagatcaattgtatttctataaattaataatgaacactgaaaatgaaactaacaattccatttacaataatttacaaataataaaatgttttggaattaatttaacaagagaagtatagaacctgtaca

SEQ ID NO: 40649 - DNA, 961 bp, Bovine  19866880345223
  misc_feature (1)..(1): n is a, c, g, or t
nacagttcgaaagcatcaattctttggtgttcagccttctttatggtccaactctcacatctgtgtatgactactggaaaaatcatagctttgactatatggacctttgtcagcaaagtgatgtctctgccttttaatacacgtaactaaaattaatatctatcctgacaatgttttaaaactattttaagcatacacattcaaaagaaaaaaaaagaagtgtataacagaatccaggtaacttccagccaacttcaaataattctggaattatagccaatattgtttcagctgtacccacttcctacccccagattgtttggaaggaatactcagacatctgatcatatttgaagatgtagttagcggaaagtttctacacagatccaggtgtgagttatctggatgcaagagcagaggttggcagacaattgtaaagaacaaaagaggcagaaggggcttctggtaggatttggaagcttgtagatcagagggcgtctggcaaagctaagcatgactgtggccaaggagatctgctggagattccaaagcatctggaagggacaatgtacaagcacactgctcagccatgacaaaaaagtgctaaagctccaccaacaagtaagagtgagcattcagcaaaatatttgggttaaccaggacaccgagtctcacttctcatcagtgcagtcttcttatccatggatggttccccccaccccgccccccgtggatctccaggttagcaaaggacatcgcaagacgaacgggctgaactgtgaccaagcttcagaagctgaatctggctgaagtcgaggggcataattaactctgtggacacctcgccaggcttgtcatttttgcttgatgccccttgcactggcagaaagaaaagtggcaatcgtcctctctaaaaccctctctgacttagaacaaaatgaactttcgtgcaaggaaaggt

SEQ ID NO: 40650 - DNA, 1573 bp, Bovine  19866880506657
  misc_feature (1)..(1): n is a, c, g, or t
naaatggaaagcaaaaaggtttacaccagtcttgccatggacgcttccatagttagtatttacattctaaatgaggatcacagctgacaggttttgttgtaattttagccataaggcaattcactgtaccaagcactgaatatatatatatatatacacacacatatatgtatattcacgtatatataaatataaaatatatatttaatatataataaatataagtataatacacatgtaaaaaagaattacatcaaaatttatctgggaaattaaaacttgatgttcaagttgatttaagttccaaaaatctagccacttgtcaaaatttcacaagatacatgctggacactgaaagtgtttagcatagcatcttttttagaaacttgagttcagtttacttctttttaaactaaacattcctaaattcttatcaagcaaaaataatcaaacagtaatgacaaatatttttcatgcgcccaggccacccaggagaagcaacataattgagattttcagacttaagaactcttacatacacagcagaaagtgttgtcctaaaggtccacccatgaagggaaaactagcatttttttctcttggttcttgaaagcatgctaaattagaatgagatattttatgtgataaacaagcagtttagcacattaagtacatttcacattcactggttactctatgtgaataaagtcattacaggtcatcctcaggatgactgagcctgagaaggactggaggctttaactataaagtttcttcctccactggctttatgcgggataatgacttttctcaggttgccttggcaattatctaacagtttggctcattgactcaaagctggtcaaaaagccaatttaataaaccacagaaatgtctttggctaagtgatggccccagatgaagggaccggaaactactcaagtggatctgacgacagccactgtgccacggtccactgtgctttgttcccagtccaactcagatgccccccggacagaaaacttcaggccactcagaacaaagccctgacttcagaaaagggtgatatttacaaaaagtaaggcttaaagcattcaagtgtcattggtttctgtagccttaaaaatatacaaatcactaacaaaagagaaagacttagagaatgaactcatggttgccatggagagaagggatagttagggagttctggatcgacatgtacacactgctatatttaaaatgcataaccaacaatgacctgctgtacagcacatggagctctgctctgtgttacgtggtagcctggatgggaggggagtttggagagaatggatacatgtatatggatggctgagtccctttgttgcccatctggaactatcacaacattgttaatcagatataccccaatacaaaacaaaaagtttaaaaaatataaaataaaaataatcttttaaaaaataaaaatatacaaactaagagagccacttttcctgcatataattatatataatggtctagaatttaaatatctatgtatacatatgctacttatattttcccaagagggggt

SEQ ID NO: 40651 - DNA, 758 bp, Bovine  19866880567026
  misc_feature (1)..(1): n is a, c, g, or t
naatagttttaaaactatttaggaaccaaaacctttcttctaaaccacggaaagtgactctacactaataatgtctgacagtgacctaattatagtaatttgcatactaatgagactttgaaggagataagcaatagcatgcttgtaatagataattaatttgtatttcaaaataagctatggctatttaacaacaactcaaatgacacatcaaattaaaagagttgttcaagttacttcttaacaataaatgcctgttacagcttttcaattttgcttaaacttcaagcggatgaacagatcccaagaatcaatttgtattcataaggtgactcttcattaagtgcttaattctcaaattcatcttcaaaataatatctctttgccaagaaattcagagtgatttatgtagcattaattagaatgttttctacctccatagtaaagtgcctctgaatagtacaatgcacttttcaagtaatcttacatcatctcccagggtcctaagtcccatgttttagttgtagaaatggtcacactgagagttatagcgattggggcaaattaaaatgagtcaggctgctggggcagccttctgcacttcgtattttgtctcctaacacgaaatgagatgtccaggaccttgaataaactgaccaggacaactaataaaacttgttctatacatccagtatactgtctcttattgatctttgaaagcataaaacatgtagactcactcaccagtaactgcattt

SEQ ID NO: 40652 - DNA, 606 bp, Bovine  19866880576227
  misc_feature (1)..(1): n is a, c, g, or t
ngaaatctctgacattctgcacaattacatgaacactccatgggttttgttgtttttaaacgaagcttcttgtgcttgtccacgagaccataaaatgtggaacagagctggaggcctctgctatttttatctgaagtgcacagaaagtatgacttttttttttaaaaggaaatgtcattttggtgatgtgttgctagctcctatctcacacacaaggtgacttttcaagcagtattttaaagtgcccaaagtcagaaactcagaattttcagcatcctgaaagaagcttaatgattaagacaatatttctccagtaaaaacttaaataagtaaaaacttatggttttatagttgtaataaatgctcatcagagttggcagactagctatctgaaagtgtgtatcagtggaacagggtgtataaattctgaacaaggcattgaatgagttaggattctgaaatctaaacacaagtgcataggaaacttggatgtcttttgggggaaaagatggatcgttacagaatggtaccggttcacctaagtctctgtctgaaagtcaaacttagattacttttatgtttggaaatatgtgagatattttagca

SEQ ID NO: 40653 - DNA, 757 bp, Bovine  19866880588795
  misc_feature (1)..(1): n is a, c, g, or t
nctgagattctgagggacattctctactctctacagatgtacctggatcataaccaaataaggggttcagaaaacgtctgaactcagtttatctttgaaaagaaggcatctttctcaacctcactagggagagccctgcggtgttctggcatgatgtaagggcctgacttctcagggctccgtgtcttggcacataaggcagacagataccaacttagcaatttacgagggcagtgttacaaaggtttgaaaaatgaaatgtagtgtgacagcaaaagcattaacacatgagtttcatagcctctcccctttcattccccattaaagataattctatttttgccagtcttgtgcagggttttatgtgcagattggccacagtggggtgtaggggggcaggttggaaggggagaaaattaaagaaaggcaaacacaaattgattgtgttggaaaaggtagagaattactcctagagaataaaacacgtagaaagtggaactggagataaacataggagcaatactactgtgttttagagaggtgagtgacttgggggtttgaaagagatagcacagctttgccaaagggagtggaaaataaaaggatggaggagggaaatggggtctttcgaaaaaatgttttaacattgcatgtgtctatgatcttctcagaaacaacactaaatatttaaagtgtttaaaaaagctctttagatataggattggggattttattgtaatgcaatgttttataaata

SEQ ID NO: 40654 - DNA, 1057 bp, Bovine  19866880592566
  misc_feature (1)..(1): n is a, c, g, or t
nttctaaatgtaattatttctttatgcatgctcagtcgtgtgggactctttgcaaccccatgcactgtggccctctaggctcctctgtccatgggattctccaggcaagaatgctggagtgggttgccatttccttctccaggggatctttccgacctgctgcgtctacagcgactcctgcatgggcaggcagattttttaccaccaagccacctgagaagcctcagaaatatttcttacttggttttgagcacattattattattactattattgttatcatattttgccttctgaccgtattttgaggctcatggtttaagctgatatttttcctcctgctccagctctatatttgaaatggaaattgtgcacaacgagaaatgctttcatcgtgccttttattcacagtaattcgaaaacttgctcagagatgaatgagttggttctccctgcagcagtacacgtgggccctctgtgggccgggtggagtggggacacagcctctgaagcccctacacctgctggagcctggatctttggtaggtgggctggggagatggttcttaactgactggcttcccagcggaaacaaagacaataatttgctctattagatcatggcttgtcttggaaataatccagcttgggaaacgctttaatttttgccagcattgtgaagagttcatcagtgaaaggggatactgtgtgcatgggcgattcaggaattaaaagaacaatggcaaataacagactagctcggaactgcaaagcatgtgaaatattccgagaggaaatgtctcagaagtataaccgtacctctcacagcaaaaaacatcactaaatgatcgtatcaaccaagaattaggaagctacccagaggtatcagcattgttttaagaagagattgaatcacatatttatctagaaaaggaaaacttcatgcctcatttttgctatccgtttgttcatattgatttttttatcataatttagaaacagagtcaaaccctcctaaacacaaaagcagaataaacctcgctttcttattacacca

SEQ ID NO: 40655 - DNA, 2626 bp, Bovine  19866880599922
  misc_feature (1)..(1): n is a, c, g, or t
nagctcacaagccttttgggcaacacagtagttctggttttagttttttaaggatccttcatactgttctctgtagtggtggattttaataacatcttgctttgattttttccatcaagattcctcttggtttatagaacttgacttaaaaaaaaaatgtatgatttgaacatttcacaaaaccccagtaaaatcagtggatgttacagccagttttggatagaatgacattcttatctgatggggggggcggaaatgggctgttgataaaatatccatttggattttttcctgtaatatcaacaaatattaaaggcacttaaagctattttaataggtatttaataaaactgatataattgacctatgtatttaatataaaataattaaataatatacttaatatttaatataacattgtgtgagagtatgtgtgtgaaagttgatcagttgtgtccgactctttgagaccccatggactgtatagttcatggaattctccaggccagattactggagtgggtagctcttcccttctgcagggaaccttcccaattcagggattgaacccaagtctcccacattgcaggcagattctctaccagctgagccaccaaggatattaaacccacaaaacaacaagctgataagttgtcagtttttatgagcaatctgatttttgtttaaaattacataattacaaaacatttctggctgtagatttgggaggatgggactccatgacactgttgtcttcccttcgtatatgtttgaaacttttcgtgaagaaaagacaaacaatatgtgactatacatatctctttccaaagaagacaaaaatatgggaagaaacaaaaataacattgtcttatttatacttttactaaaacttgtatctgcatatgaacatcttgagaattttcaaaggtccattaacagtcaatggtctttccttttgagatcaaccagggaagcatagattagattacaacaaatctgtgatattttttcagcattttgacaatagagtctgtcaaaatgctattagtttgaaaatatgacctggattcttagtctatgacttgcgtcctcttcaaaggtcctgactcatttctagcctgtggtttacctgccagtgacattttcgcacttaaaatacaactacttgagcttttagcaatacatgccttccactcatttttctagaagaaaaatgtcaacatcaagagattagacatacaatgtgctgaaatctatggcatattttgcatggctgcttaaaagataacccaagcacaatgcatgcagtcacttgacttgtaactccgctggatgagagaaaatgtgtttttatccacaaagcattcaggagtgtttgtgtaagatatgcacagtccaagtaacatctctgaccaagaatttgacttcccataatggcatcccgcttgaggcatatatcaagaaaaatatgcttcctggatcaatttagatatggtaaaacaggttgcacacacattactatgaggagggaactcagccttcataaaccatgtagcctagtggaatgattgttgtgccacagtgcacagttggtgaaaaaatactcagtgaggagccattatttgtatggcatgatcccggatgctgccttgggtaccaacataaattaaagaacatgcattgccctccagcaccttttattctgtttgggagatgtcatacataaactaaattaatagctttcataaaacaaaatagactaagtagaaatatagtaactgtgtacatgaaaatcatgtttctcctacaatatggctttgctccatgtgcagcaaacaactggttttagagtggaggataattcatggaaaatgcatttttgattaattttgtttttataaaggaaggttttagcttccttcagatggacatgggcatgtaagatagtgggatcaggtcatagaaaaagtaggcaaaaaattatgagatataatctcaatatggaagagaaaataaagtaattggatttcattattagtactgagatgtgtcataagaagatgaggccttaggtgacacatattatagtttattatttcttcctctgctatttttcttgatgagttatcttcccaactagtacaaatacaaaagtacccaccagatattgaaaccagatgaaacctttgaacacaaactgtgcattttgccccttctgtacttattatgagctgaattgcctcctttccaaaatttttatgtgaaagtactaacccttaaaacctcagagtgtgattgcattcaaatgtaaaatctttaaagaagtcccttgaactgcaaggagatcaaatcagtcaatcctaaaggaaatcgatcctgaatattcattggaaggactgatgctgaaactggaattccaatatttttgccacctgatatgaagaaccaattcactggaaaagaccctgatgctgtggaagattgaaggcaaaaggagaagagggtgacagaagatgagatggttagagagcatcaccaactcaatggacatgaatttgagcaaactccaagagatagtgaaggacaggggagcctggtggctacagtccatgggatcacaaagagt

SEQ ID NO: 40656 - DNA, 1404 bp, Bovine  19866880614017
  misc_feature (1)..(1): n is a, c, g, or t
ntgaactgtggtgttggagaacgctgttgagagtcccttgggactgcaaggagatccaaccagtcaatactcaagtaaatcagtcctgaatattcgttggaaggactgaggctgaagctgaagctctaatactttggctacatgatgcgaagagatgattcattagaaaagaccctgatgctaggaaacattgaaggcaggaggagaaggggacaacagaggatgagatggctgaatggcatcactgactcaatggacatgagtttgagtaagctccaggagatggtgatggacagggaggcctggcgcgctgcagtccatggggttgcagggtcagacacgactgaaggactgaacaacagcaacaaagcaagtgaagcaaaggatcacacatcatacaggcagaacgaacagtcctgtaacacacacagaccaaaagagaaattacagttgagaagaacaaccatctcctaacaacactttcagagattatccttctatgtattcttttttagcagtttccaaagatataaaatagtatttattttatattacataaaaagtatatgttgtaataaacataaataagacactgtacagaagaggacatttaaacccaacctgttaacacctcttttggtgttatcaagttgttggtctataatggagattccctatatctttttcactaaaaaaaaaaaaaaaatggcttgaaaatttttctagccggttcttcatgtcctgcaatgtaatatttataggtttcttgacagcagctctttcttctgctctgctttctctgaaatcccacctcttgaataagagtatggaaactggcagtgcctccaagaacgcagtgttgagatttcttaggctttattgttggtttccaatgctgatttttaattcaggtgtttgtatttcactgtccccataagactataagttgaaagtcacagtcctgctagcaataattagggttcaggagtacccagtttgggttccaacaagtagtagaggtgataaatagtaaatgactctaattaatgtgggatgtttcgtggagtgcattagaagacaaacaagacaaaatattattagagaagtgcccaaagctaaatgccatcaatgcagcaagcaatataaatcagaaaactctatttgcaaatatggtgacttgaatactgaataataaagataagagagcaacagagagaataacaagttagtctggataagacaccattttataaagggtactgcttatctgctttaattttctctccccccaaatcaaaacaagtcgggcaggaatagtttggtgtacgaatctacccataaaattattttgaaatgtgtttctaaaaataacatgggtatcatgtgagcaggactgaatataca

SEQ ID NO: 40657 - DNA, 1668 bp, Bovine  19866880622606
  misc_feature (1)..(1): n is a, c, g, or t
naacctccataaaacagctttactagttcttaagagaattggtttctttgtctagatatttcatacactaattgttcaatacgtcacccctttaattagcttattcatttctttaactgcagaggtcaaggaaggcagtctttaggacagtgtattttaaattaactcaatggtgttccatgattttggagaatttttctgtattcatctctggacagaagagtctaacaagtgagtcttcaactggagtaacaattcttgggatttttaacactgagtcagcaactattgtttttctcatgtctcaagcctgtacttcaatttgtggaccagaagcatataacttagactgtggagaacatttatagagaaggagttgaaatagtagcagggtactcccttacctgtgagtaaagccttttccttgcacactctacagtggagtttccgctattgtgaaaattctgagtctctaacttggaagattcatatatcatcgagacgatattgacaaatattgtaatacccactctcactgttctactataaaacatcccattcctctaaagccctattaaatattaaaaagaatggcaaccacatggtaaaatgaggttactagaatgtaaaatagaatttaaatattttagaaagacatattgctaacctttagcaaagtgctgcctcttaaaaaagaagacaaggtctctatcctgaaaaataattctttcaaattagcatctccatggctaaagtcaaaatgagtgagatgagggttaaatgtccaattagacagcacacagttttcacgattatcagaaagttgcactggcaaaagattttggtcttggctgtgttccatacgtctgaaatgaggcgactgtcttctacaaatcccagactcagtgggttttggtaaaaagttactgggttattatttatttctctcctgtaacatagggaaatggaaagatttcatcagtgatgtaggggaggaaaaatgattttccctctacccttctaggttcttggctgagaatcctctgtaattaaaaaaaaaaaaaaaaaagcagaacaggagaaaaacagaagtttaatagcataaataccttctgtacacatgagaaatatccaggaaagcttaagtaactctcttaaatgatacaaaccaccactttaaagaccatcttcagctaaagacacaagaaggtactggggtagggaagccggttatgggagattatcaggcaaagcacagtgaacaaggacatgggcactcagttcagttcagttgctcagttgtgtctgactgtttgtgaccccatgatgcttttgaactgtggtgttggagaagactcttgagagtcccttggactgcaaggagatccaaccagtcaatcctaaatgagatcagtcctgggtcttcattagaaagacggatgttgaagctgaaacttcagtactttggccacctgatgagaagaactgactcatttccttgatgctgggaaagactgagggcaggaggagaaaagggtgacagaggatgagatggttggacggcatcaccaactcaatggacatgggtttgggtgaactccaggagttggtgatggacagggaggcctggtgtgctgcagtccatgggcattaggcagatctaaggtt

SEQ ID NO: 40658 - DNA, 1773 bp, Bovine  19866880731843
  misc_feature (1)..(1): n is a, c, g, or t
ntgaattgaacaccaactttaaataagggcaggactatgtgcctgtccaaaggatcagaaaatagaagtgccaagttcagccttgtcgtagaaaaattaagcaagtgaaatatcaatcaactatggggaattcagggcttcccaggtagctctgatggcaaaatatctccctgcaatgcaggagacctgggttcgacccctgattcctatccctgggtcaggaaaattccctggagaaggaaatggcaacccactccactattcttgcctggagagttccctggacagaggagactggcaggctacattcaatgggatcacaaaaaattggacacgacagagcgactaactgcatacacacacacacaggaaattcaagactcgtatacgaccaaaattcactgtgaatgacatcacggggattcctcatgtctccatctgggggataatctgcttgatgtaaggagtgatgaatcaagactttcacgaaatccatcttatagcatctccaggacaggaggcactaaaacccatcattttgccaacacagattaaaaccttaacatggatattaactcctgagatcattattcaggaaaaataattattcatgttgacataatggatatttgaaaggaagaagtatgattagatcatcaagtttattttccacaggccagagcaagagaagcttttcaacagtcacctggcctcatgttttctaaggaagttcctggcttctcctaattgggatgactgaatatgttccaaatagattgtttgttatcttcttcacaaatgatcacagagaatatgatgattcaaagtgacttccaaatgcaaataactcaattagggaagacacgattccaagaaaaataatatggttgcaattcataagttagtcaccaaaaatactcatttttcctgtaccggtgttttgaaagtgctaaaaagtaacttcatccttttcattgacatagccaccgatgagcattgtgttaaagatattacttcttaaactgaatattttacttttttttcccctttactgcaattgctagcttttctattgccaggaaatttcccaatttgaggctgagcatagcattagagtggagctgttgtctgcataacaatatttttgaaaattaattagtcattgagatgatgatcctttttttctctccttaggagtctcacttgctgagaaatagtgtgaactgttgtttttttttccccccaaatggagtggtggcttttacagaacaatgcgaaggctggttcagtgtgggtgtcttttgttttaaagtggtgtcttctattgtgaaattaaattaagcaagccatgttcaatattcatgctatttccctttccttaataggttcagatttaccacagtgtgaaaaaatatctggtttacattggtcagtggatctcttatttacaaaaatgtaagtttattaatctgttcctcaggttctaatgtcaggagactaaaaagtaggtatgagttatgatttttttttccctcctcagtgagtaggtagctgcaaggagtgacttagccagctttttaaatcagtctttctccactaagctgccaagaagactcctcctaccccagaatattctgaagtcattgatctggaaggatgcttggtgtggcattttgttaagctccctagatcagacccaccacccacatttcagccaagcaagcccacccttcatgtgtccacgtgttctaaggtctgcattaagtgttccca

SEQ ID NO: 40659 - DNA, 1319 bp, Bovine  19866880737757
  misc_feature (1)..(1): n is a, c, g, or t
ntagaattagcagaagctttgaatgtttcttttatatgttaacatatttcagctttcaagggactaaagcaggagcataaatctagtgtttaactggtagagttaatgtgatcaaattgtaaagccaattgacttaattatcaaatgtttgtttgctgggtaatcagagtaaggagaggtttattttgaaactccatcagaacctagacaacaatgttgccattccatgtattagaaagagttcacacgtgtggaggagaaaaaaacagaacaacccgcagtgccttcggagacttcaaatgggaccgacacggggaaccaggatgaaactgtgctggtcagagggcagagttggtgggtggaggaaagggctagggatcaattaggagatcacaaggcattacatctaggcttggagtttttcatctttactgaagaacatatttagttattacttctgaccttggggttatagtgtgccaattatttccattcgttcattttgtaaaattcgctatgattgactatataataggaaaatgttagattttcaactatgtagaggaatagatgttctttacttctttaagacgttctgaaagattataaaaggttaaatgtgattacacttgagtttaaataaatgcagattctgtatttagaagaaatgtagtgtgacataacaccctgatgcaagacgaaaggtggaacctattaatgtcaattattaggactatctacaaggtaccacactgtcttatgccgttttcacttacacgtttaacagtaggagatgcgtattcaataaagaatggggattccttttggtcactagtaactgattaatgtacttcatccactgaagtcatctggagtttttcagatgtctgttgtgattctagaattccttatattaaaacaaacaaagttcatagagcaaatagtttaacagcaagtcaaatgttcctgaagtataaaggtgctaggcaatgtatgccttagaaaaccctctgattacaactgatataagttttaaaaataaccagactttaatagactaattgtgaaagattagtctatttatctgagcttgttaaacactgcagtagactggaaccaattaaataaataactctaattctatattattaacttcaaaagtccctagttcccatcattgcagtgctatgataggtaattttttttcaaagcacaattcttttcccccacaaaaggaagtgtaattggcacatttttgagtgagtctacatatatcagactaaatacggtcaattgaatttgccatattagccccaagg

SEQ ID NO: 40660 - DNA, 1067 bp, Bovine  19866880803046
  misc_feature (1)..(1): n is a, c, g, or t
ntttaaaaatgtaataggagggagattcctataatttaaaattgtattgaaaacataggcacatttttcctcttggcataaaaattcaaacatagttttagctgcctgcctgttgaatacttggcctttccaaggcaatccattatgtgtaatgtgtaagcaatggcaaatggtaactatcattaccaggtggttatttgcaatgcaaattctaaaccctaactcatagatggttggctctagcagttgccaaacagctgggttttgaacccttaacccatagaatagccaacactataattccacaagaatttctccaaaaatattaatttttctcagtgtcattcatcatgattatccacggcacctagtaatccagtgtggtgttagagacaccatacaattgaattagataggcagggtcctttttccttgggaaataattttcaaataaaatataacacatgaaaaattgaggatattcattaaatatatctgctatttataaatttaaatttgtctttatttgtcatacaaatgctccacagttacttttgttttggcattttccctataatattactaaaattacctgcaaatattattgacaacttaatgaccagcattagctcttaaccttcttgattcgtctgcaggtactatgattgaccatcccttctttctttccttcttcttttgtttgagaatttttttttcctgcacttttcaaggataatctctcaggacacagaagttgctgtttatttctcccaacatttaaaaaaaaaaaaaaaaagactttccagtcttattgaagtgtaattaacaaaattgtaaaatattgactatttaaaatgtacaatgtaatgatttggtaggcattatgaaaagatttttttccccattgagttaattaacccatccatcccctcacgtacagttgatccttgaacaacagagttttgaactgtgtgggtcaacttatatgtagatatttttcactaaatatgtgcttcagtactacatgatctgtggttggttgtcccacatccatgatttcaattctt

SEQ ID NO: 40661 - DNA, 3318 bp, Bovine  19866880843220
  misc_feature (1)..(1): n is a, c, g, or t
nagaataaatgattctatatggtttccaagatgattttctttaaatatgtttaataacttaatttaaaatatgttcctgacctcaccaccacagaatcccataagaattcaaaagttcaaaaatagtacagaaagaaaaatgaaaacagagcactagtcacagactctgcatcattgctcagaatatgcgtctgatacaaatgtgaggcttgttcagctattaggacattcactgttgcctaaacagtgtgaacactaacatttttatctcagaactaattgagaactcagaggctaaattccagaactgaactttctctactctgtcttggttaagctagaaaacagtaaatatactactgatatcttaaaatgaggatttaaaagaaaatgatttccatgagaaatatttgttaattatttgaatgatgtggtttgatattaaatattaagacaaatgtcctttacagatgactaatatgatagtaactaaaatgttcctagaattgagttaaaaagaaaatttggatatttgttgcctagatttacttttcaaaatctggtctccctaaccttctctctctctctctctcatccatctcacaaatgtgaatttcagagctgcttttccataagttctgatgacaaatacattttagttgaaattcttccttcccagggaaattttgcaaatcagaaattaaaagctgaaagtttctggacattatagttaaaagcaagggctttttctgatacttctttcatctctttttatccacctgaattagattccagatccaactgtgataatgttgaaccatgttcatccatgtgtcagaagctaacattgcttcattgaaaatttctttcaaggctcctatgccctttgctatagagtattttatttttgaaaaaaattaaaattaaaaaaaaaggagagagagagagataatttgactattaaattcttcctttgaccaaggccagtgaaattcatctgcaacatgaattagagatgcaggagacacgagtttgatccctgggtggggaagattccctggaggagggcatggcaacccaccccagtattcttgcctgcagaatcacattgacgtaagcacctggctggctactgtctatagggttgcagactgaagtgactgagcatggtgaaatcctagagcccttgaggaaactgtccaggccctggtgtcatgtcctgcgcccagaagcttctgtccatgtgagtttccacagcttcctggaagcaggcagtgatgcaaccagagatgcttgtatcagcctgtatctggctcacaacatttttattctcccaagtactgagtacctgtacatgtccaaaaacccttgaagaaaggagtaagtgagttttaatatgttgaccaaaaatgcaatgtttttaaacaaggtactttattatggagcttccctggtggctcagaggtaaagaattggtctgtaatgcaggagaccagggtttgatccctgggtcaggaagatcctcaggagaagggaatagtaacccactctagtattcctgcctggagaattccatgaactgagaagcttggcaggttaccgtccatggggtagcaaagagttggacatgactgagcaactaacatttgcacttttctttctttttgtcatgcattgacaaactggagcaaaggggtaaaaaataaaagaaaaaaaaaaaggaaatctgtttgttatcaaatggaaggtctttgtccttttctggaaaataaagatgagcagaaaaaaatgggattacaagaaaacaggaaataacagcctttatgtactgggggaagtattatttagaaaatgtcatctcttaaaggaacaagttcacattttgagatgagaattaatgagtagtttagatagacttcttaagactaacccatgactcctttgggtaatgtcctaatgtttcttttgagaaaaagcccaaagatactaattcatggtcatcatgctgaccctttcatcctaaatcatgtatgtcaaatgtcagctgattaactctttgctcattttctagagaggacactccagaggtggcagggggcggcggggtggggtggggtgggggggtgggcatagaaagggcttatagacagtaatcggtgtcccagactctgggaaacagatcaactttcaaccaagtctgttaacttactttaaaatatttcttcattcttttactattacaactatggtttttaggcagttgactttgcattattggaccaggcactgggaaataaaccactagggaaatgtcatgtaagtttaataatttacactgtaaaacttgcccaggttaatttactaactttttagattcccctctgagaccatgagtccctgtttagagtacagcgctaaattagttagtgagtattttaatttgtgttctatatttagtttctaaatcaactttcttgtaaatagaatgactttcttcgcttctgttgctgttatttaatttaaaactgcttagcaaaatttctaataagttttgctttaattctgtagttgtcattttttgacactgcttttcaaggcaaatagagtctagtgcctgattccaactttataacaatattcctttcagtctgtacactgtgaactctcagttttagactctttgtgattaggagatgctggccttcatgtggggggatctgcaatgacccaaaggttcctctcgttagaacggactctgtgccaacgagtttgtgatttgtaaaatcgattcagtctcaatattggtactaagtgacagtgagatcctaacagtttggtgtgttctatcgtgttccatcatgactctgtgtgactccatgaactgtaccccactaggctcctccatctatgggattgtccaggaaagaatactggagcaggtggccatttcttagtccagaggatcttcccaaaccagagctgaaatctgcatcttctgcattggtaaggaagactttttaccactgtgccatctgggaagccctcctaaaaaacataaaaatcagcacttttaaaaacttattaacagacttctcttctcttgaaaagtcagcaaagtaattaatgtttcaactggaaggcaaaattatttcaactacatatttataaatataaattatattaatgaatattcattaaatatggtacattatattcattatcactttatattaatttcacacaagacatttataatgttatctgatctgaatcatgcagaagaaagattacattgtaataacttttcatatgtactaa

SEQ ID NO: 40662 - DNA, 758 bp, Bovine  19866880924426
  misc_feature (1)..(1): n is a, c, g, or t
ngcaaatatttatgctttgtgagagaatatcattgggtttctctcaaagtttaggttaaaattagtactatgccctttttccctcactggttaaacattttggttggaatatgaaaagatttaataagtcctttgacattctggtgaccaccttaaagcaccaagacaataaaataataatagagaaatgaaaacaaagaagacagcaaaacagctcgtctaaaattttgcttggctataaaatttataatcctataagaacatatctctattggaaatcataggaacttgggagtaacatttccacagaatgtgcttaatgtaaggcttctttatctacatacttgcatgctcaagcacacacacacacacacacacacacagagttttctttataatggttaacagcatttttcaaactggaacttgtacaaaactggacttgtggattgcacctgcattcacattctactctggttatgtaaataggaataaaatcttttctttttaaaaaaaaaaaaatcaaagcataactgtaatatttttcgtgtttatttttgtcctatttttgaaaaccatcaaatctattttttaattcaatatcagtgtaatttattttagagcactgattcttaggatattcatatattttttaaaattcttaatggtagagtgtatagcactgtgagatacataatttgatgatttttttttgatggcaaagataattaatttcacttcaataagaacattttgtt

SEQ ID NO: 40663 - DNA, 747 bp, Bovine  19866880957622
  misc_feature (1)..(1): n is a, c, g, or t
ntgtgatgctaaatattgaccatttaaaacctaataagatgctgagtggaagagattaataaatcagatgtattaacattgcaaatgtctgtgaatgttgcaggttgccatcagagcacggcttttatttgactccatggtaccattatgctagctgctgctctaaactcagctcatcgaatgcctgacgaaatgccatgtacggcaagtccattataagcacatccactcttgcatctgcagcctgcaagtttagacagttgttctttcaaagaactcttaatgggctttagcgtttgataagctgtgaactagtttacccaggacaaggctcttctagtcaaacaagcgtctttcctcttctaatgtaaagatcacagcaaattcaaacaaagcactggcacttatatcaaactctctataaattatatacaatatatatttattatatatttatagatatccaatataagaatccatgtactcaaataaaatataaaatcacaatgccaattctatttatttaaaagtacagaagcctctaataatagctgtagtagcagcagaacttgtagtagtagtataaatagctagtagtagttgtaacagatttccttatggaatacttaggttaagggaaaggctggcatcgtcaagacattaaacctcacagcaactcttcggggtaggtactatttcccttcttacaactaaggagattaaactccaaataaatcaattactttt

SEQ ID NO: 40664 - DNA, 894 bp, Bovine  19866881038371
  misc_feature (1)..(1): n is a, c, g, or t
ntgcctcagaggcacagcttgacagtttcttaaggcctaataatgtcagagttatagtttttcagaatccatctgatttgctcccaaaaatgggacatgttttgaatgcaactgacaattggaggttctggaatattaagttggaaatttctgctaatttatgtcaccaagagttctgatttgagactagcctttgaccataggaactgcgtaattaacttcttatcaattacttaattgaatttatagattgaacttgtttttcttaccaaaatctgagatttactacttataattaatcataatccccttaaaatgtagtacaatgtatagaaacattataatttaataagtatgttatatctttgacttttattttcagagttaacaagatatgtttttaacaaaagattgagtttagataagttacatcaattcagttcggttggcatttcataagcaataagttcagacagtttaaagttactttttattttttaaagaaatattattggcaacttatttatgtagtacttccttcacatagttctttcacataaagacttcattggtggatttacagtaaaaatattgaccagaagtagacttgtgttcaagactaacctctcctactttgacataaggcatagtatttctggtgcattgtctccacgaatctaaatataatgacggaaccaacattatttggatttttaagagattcaaaggaaatattacatgcaaaatatgcaacaaaaattatactgactcccttttggtaaaaaaaaaaaaagaaagtccatttggattcagttcagttcagtcactcagtcttgtccgactctttgcgatcctaggaacctcagcactccaggactccctgtccatcaccaa

SEQ ID NO: 40665 - DNA, 2107 bp, Bovine  19866881155714
  misc_feature (1)..(1): n is a, c, g, or t
ncccatgagtcagttagttcttcacatcaagtggccaaaggattggggcttcagctttagcatagtctttccaatgaatattcagggttggtttcttctgggattgattaggttgatctccttgctgtctgtccaagggactctcgagaggctactccagcaccacaatttgaaagcatcaatcctttagcactcagccttctttatagtacaaatctcacatccttacatgactagtggaaaaatcataattttgactatatgcacatttgtcggcaaagtgatgcctctgctttttaatatactgtctaggtttgtcacagctttaattccaaggaacaagcatcttttaatttcatggctgcagtcaacatttgcagtggttttggagcccaagaaaataaaagctgccactgtttccacttttcctccatctatttgcaatgaagtgatggaattagatgccaggatcttagttttatcaatgttgagttttcagcaggctttttcaccctcctctttcaccctcatcaagagaccccttaattgatatttgctttcttttttttttttcacatcacctaggccagaccacagctttgtgagttctccagacaattatagcctcagggcctttgtctgcacttttttctttgcctggaacccacttcccatggatacatacatagaaccaccttcattcccttcatgtttccgaacacattctgcctcatagcatgagttaatagccaatattcagtattaatttccatcttccctcatggttaattgtctcttcctaatgatagcaatttctttctgtacttaatattttattcctaatctggatggttcttgacaaatgttatccactcctataaatatttaatgaataaatgaacaaataaagaaatgaaagcaataagtctcagaggttttcaaatgggaaatccttgcagtagttggatttctctaaattgtagacaaccattttcttcaattgcaataaaaaaggaaatggagaggtgagttactgatgcataactgatgagttactgatgagttactgttttagtttttaaaatgacttttaaagaaggcaatggtaaacatatagaatgacactttctcattacctttaagcctaccatcttctttgaataatttctacatcacagtatttctaggtatgtttttaaaatatcccataaattataattgtgaaaataattcctgtccatgaaacgtttagataaatcctcttcatttaatgagctgactgcatctgtgtattacagttgaacctcatatttgcttgactagagagctcagatattgattttgccctgtttaatagttaaatctctagttacttcagagactacttacttaccttcatgatatccacccttggagaaaagagatcaataaggcactcctgtctgtgatcctcagagttgaatttctgccattttccccaaaggacacacatatctggaactcatttcctcttcgttacaacaaagctaaggtccttggccttcggggaactactcaatattaatttgtttagttaagcttttacctaactgatgaggtggaaagagtaattgaattggtagcaaattctaatacatattcatattgctgtacttctgaacatagtcatacatttccaccacagcttcattttattatttagattttacaatgatgactactcagtatttccttaaaatctaccgtgaatgtatttctcatttctgaaattctatttttcaaacatcctgggcagattttacaaggcacagctaggttattaaggtttctgctgtgttatgcatttaaatccatcatggggtattttatacatttacattagtaaagaaagaatctgatgggacataattttgctataaaataatagccatgctgtcctgaaaacctagtgttactatggttcttcactatatttaaaaatacaacaggaaccaaagtgatatttagttcagtagaagactactaaacatggggccttccatggtcaaacatgatttcattcgaaaaattatttattagacgtataggaaagccagttgcattatga

SEQ ID NO: 40666 - DNA, 1207 bp, Bovine  19866881164809
  misc_feature (1)..(1): n is a, c, g, or t
ntacttatattttctatagtgattgatctattaccctagaactttgaacttggaattgcatgatcagcctgctcagtaccacagggtctcaaaatcatgtcctatggacaagtcattgatccaactaaaatgaaaaactgcagtgtagccaaggtctaatcactcccaaacgtgtcaggattttcagaatgtttttcatgaggaaataaaaagctgcagaggatatcaaagagctttttgagcagtgtgccacacacctaataactcagctgcttgctcttcagttgagatgagaaaatgctaatgtttacgtaaaccaagtccacgcagaatgataagcagtagtccacaaaatggctagaaagtgaaaacttaaggcagataactggaggagtctttctattttttagctacttatgactatcaaaagcattctggtacatatgaacttgctatgggaatttaaaaatcaactttcataggaattttgtacacaattgtaattttttatttagttgattcaacacttcattctgacccactctttgacttgcaaaagtcagaatcttaatgtgaggagttacaccacttagtaaataatgctgctttgatttatttaaaattaacccatatttctctatatctcaaagtcaaggtctagacagtggaggtggaaaacgacattagaaaatgatttaaaagtacatgtgtagaatcctatcttccttgtgactcttcttctcagaatatgaagaaattggcatcatttttttttttccatcatgtagtttgtccttaactgtttgttgttctgtttcacagacttcctcctaaacttctggaaaggaagtaaattatgtatgagtataaagaaagaacatttgtagtcaaaacgaaattaattgcattttcagattatgactgtttaatttgggggaggaagcaaaacaatagccaaaatcttctaaaatcagcattaactaatcttcatagatttttccatatatgttttaggtcttatttttatttcttatggttctagttcatagcaattatagatttaaaatatattttacccttgtgactatatttgtaagtttcttaagatttgaaaatataggaaaaccaataggtaaagttattagtacctaagtttgaaccatatagtgtaaaaatttcaatactataataatatgaggggcaaaat

SEQ ID NO: 40667 - DNA, 2163 bp, Bovine  19866881273693
  misc_feature (1)..(1): n is a, c, g, or t
nctgcagtggcagtaccaagtcctaaccagtggccccactagagaattcccaaataacttcttttcttaatggaaaagtaaagggatgaatgtattcaacctgaagaacttaaggaaacccatttattgtgcaaagctcacagttcaaaggtagaagttttcagggattagctgtgaggtattttctcttgtattgcacttctgcttgcagagtttaggtgttttaaaaacagttgcagtcttacaaacttcctagacaagtcatagcagaagaaagtatcaagaaactaactcaagcccattttagaaaaagaaaatttaattacacaaataaaattgtagtaagagcgaaactgtaagtagttaaagtgacttgagcagtaaaacatctaagccaagtggtggcccagccctgagctactagaaaagttcccacatgttgtgcttagtgaaaaattaggtaggctatgtgtggtcagaaggaaaattccttctggtctagtattacacattttaggtgaattatgggcctcatttttcttaagcgtttaccatcagccacctagagttaatggtaagtgttagatcattaatctaggttacatgagcatttaaattaattggattacactgagatttacatgattagaacttggaagtcaggttctagattcctggttaaaagactcttaaccctctaaagtaggtcagccctaacattttaggttttggttttaaatgattgttgacattaattttatttataaagaatacaaggccttgtcctgggagccacttattcagcaactaaaataaatgaatttagatttaatgctttattttaaaactataatgtttactgaagactaataaagaatagcatcatacacaataaagcatttaaaatgaaatatatacatatattacatgcataggtatgtatatatgcatgcatgcaaatatatgcacatgtatactccaaacataaaatagaaatctaaaaacatgaaagaaacatacttagaactttagaataatgtttatctctaagcagagagaggaagaatttgctaaggaatggataaaggcattttagctgtttattgtgatgtttcacttaaaaaaaaaaaaaaagatatataaagaacaaattaaaaaaaagaaagttggtgagtcacattgcagaattctgaaaataatttaggaacgtatgtcaatagaatgaaatcagtttattatggcagacatacgccacttttattcattatacatggcatggatgagaataaagcttagaggtgaaaatatcttaattattcttccttcaatgccctatattcttgctcaatattgatattcttgcccaatatcaatctctgcctaaggagaattgtgtgctacctgaacatacatctgttattctaggtaatgggataattctgaagaaaacacatcaaagaatgactttaacataagagaatgcttgttttttcagtggacctgcctttctttaaaggatggaatgtttgctatattttctctatctacattttgctcttctcctggcaaagaaacaacaacatatttactcttatcctggcaaagaattgaaagttacttcttttacaaattagtgtactacaaaaatcaaaaaataaatccaaaatttttagtgtaagcttttactctgaatataagggttttgtggagcgaaaagaaaagattcaagagctctcatccactgatgctcacctaggtgaagagagaaagggcagagacacgcattaaatcatatccatctctttctctaataaacacgcctgatgtgaatttaggttcttttattttcaaggcggccggtcacaagtagtcaaaattaagtatcagagaattgtgtagggcattttcaatgaaaatctgcagctgtgggtcttgcgttctcctggcagtttgcctaaacctaagtttggagactggtgcatgacacgtcatcccctaccctttcttgactggagcctaaatcaggaatgctttctttataatagccagaggtggttatcaagaaggatggcggcggtgtctgctgtctgggttggaaagctatagattaatgtgttggtttaaagtatgtaatgtgcccataggctgtagcaataaggaaat

SEQ ID NO: 40668 - DNA, 1369 bp, Bovine  19866881273717
  misc_feature (1)..(1): n is a, c, g, or t
nctagtttacataaacatatacttttatgttaaactttctctaagttatagtaggattatagtattcagaggtagaaaaatttgcacctatggaaattaggcttttccagagtttcaataattgcaggttaaaaaacaatctttatgattataaaaattatctgatattacaaatatttttgttgactatctttttacattggatctgttaattgtgatcctactgtatctcatcacaatctaaccttctacactttgcagctgagttctgataaagtagttcagaatctgacacaaagctttactgtatgtttcaaagacttacaagtgtcttgggaagtatataattttaactaatatttaagatatttccataaaattccctgatgatttcttatatagaagaataccagcctttagaaagaacatgaataaatacatatataatacattattatagtaaataaatttataaataaattcagtacttggatattaaaataatacataatttaaaaccacttctataaaatgcttaaaaaggaaatcttatctccaaacttgtacaatactgttataaattaatacctttaaaaagccactcactcataaaataagtagattattttctttaaaaattatattgtctctggatataactgatatattatcaacttaaaaaaaaaagataaatttgccctctaagctaatgaagtagtatttccactttatgtcactaaatgccttaggccatatcctgaacttttcaaccatatgttcatcttgaccaagatctggtacacactgagggtttctgaaatatttgtgtgccctcttgattctcagcagagacaaactctcagacaaaatctcatttgcttagcaatattaggagaatttgtacagagtaagttattaagcaaaatcttaataaaatttatactgaaataacagttgtcatgaaaaatagtctctttcaagcgagtgacataacaacttttatttatccttcacttttgagaaaatatcaggcgaattatgatttggaagacactcataaaaatgagttgggagatcattagcccaagatctaaacgtatttcaaatatactttaatatatgatgtgaataatttattatttaaatatgtatgttttcagctgtttgccatttgacatgttttatattgtccttgacattgaaaattttatgattaacatgatcaacattaggcaaacattactaaatggaaaatagctttctaagtataaccactggctgtagaatctcactgccacaatggttatgatatgtttatgtatacaatactacttttataaacctgcaaaacattaggctcctaatgggt

SEQ ID NO: 40669 - DNA, 758 bp, Bovine  19866881349011
  misc_feature (1)..(1): n is a, c, g, or t
ntgaactgtgtagggatctgagaaatttgggtgttttcaagttctttttgaggttacgaaagcttcctaaaggaaatatattgtggctttacaaatttgaaggtgacaattatttcagtatgccaagatcaccatggttttctgttggtattacttctcggtatatgaaagggaagacgggaaacaggaaacagtttttccctaaaactgtgcactctgggttggcgaaatcagccagtgttatcctacaatccaaatacagcatttcgtgcatcactgtagttttttttttgaagtaacatgcagatttaaccagagcaggccactgatagcaatggttgccatacagaaatcttcccaagggtattactgaatataggaacagtgtgtttttgaacaatcacacattgaataaatgtcttttgaaagatattttttaaaggaccaggaagatggattaggtttaaaataaattgtgtatttcttacaaacttcctcctcccccattcagtcactgtgagagtctatctaacttaagtcttccctcaatgctcccatttggattttgtgttcctataacaccttgccttaatatttgaatatccctagatacttgcctatttccctccctagatgttgagagccttaataatagggactgcacgttattcctgaacatagcaaactccttccttgtaggagatagaaacagctattgtttattgactagagggaacacatcttattggattcaatta

SEQ ID NO: 40670 - DNA, 1551 bp, Bovine  19866881354541
  misc_feature (1)..(1): n is a, c, g, or t
ngctaagtgacatgcatatcatcagagggtaaaccgaccgaagtttcaggatttggcccgataactagaatgaccttgagatttaatcgcaagtcttgactttcacccttttaggggctgttaactgaagtgtggataagtgaaccgactcccccatctcagtgatgaatgtccttgaggtcagctgaacatccatctgcccctgcaaatcagacatgtttccttgtctctaaagtaacttgatgcggatgcttgtaaatcagcgtattggcatttggcctcatttagtgtgagaagaacttagaggagtgcctgattctggtttattttaactttcaattttcttaatcctctcccttccccctcccccatcttctttctgggaactcaaagagtttggcctcccagagtagagccattctgaggaattcacgcccacccttttagcatatgcatgaatcccagaaagtctcaagatttgattctgtccacaagggaatgagcattaattacatcagttacagatctgccccctgctgttcagggagtccaaagtccaagttcttgggtgcgttgagccattaaaggattttacaatgtagaacaaaagccatggaaactcaattgctagaataatttaagagctcttcacaccacttcagctaaatacccccatcctccactgataagctctagggcagttaattaaaaccttcacctttgcaatcttggagagtattgaacccagatgatttctttcccaaatgaattaattttaagggacagggaaaagaaggaaacagaagtcatattattgcccattaaaaaaaaaaaatcagacatgcatttttttaagccaaaaagaaaatttcagaatagatttttaatttataagtgcagagcatacttgttaagggaaaaaaaaaaaaagatatcagtgttaaattttgaatgcttaccctcaatccacctgtaaagtatataacttccccaaaacttttagtcagtaacagcttctttattattagacctttttatgggtttgaaatgtattctatatgcttagtgatcctaagtcaaacgtctctgattgccactttatgtaaactatgtgaagtctgaaccaccagtaaatcaaaattcaatccctttttatacaggtctggacacttccatatttcaacttagttcacatcaatcacctttttcaacatcttgcctctctataatttctaatacatttagccttcaaccatatcctggctcttactcctaaaactgaccctcccaactcagtttcttatctctgttttcatatttttgattgttttataaagtgcctagtttgcaaagtttcattaaaaaaaaaaaataataaaacctcctagatgcaatatcagagctatttgttttcagaatatcgcatattttccaatgtttttttgttttgttttcatagcactcctgtaaaaccaagatattataatacgcaatttacattaagccattcacacagaagatgttaagagatatggcaaagttaatgcaaat

SEQ ID NO: 40671 - DNA, 1860 bp, Bovine  19866881392946
  misc_feature (1)..(1): n is a, c, g, or t
ntttgtagaggttctattagcaaccattgcctgaaaagcatagtggcccccacctgccacctccccccagctctttcacttctcccagccgactggaccagaagtgcagcccaaggccaagtccacctgacctgtctaaaaggactcaggggcttctagctcgttgttggaaactgacttgaagccggtggctgagcaatgcccttctctaacagaaggatttctcaagcacagagtgtagagggcatgttccttctggaacacaagaggaggtttgttctctgctgcttcccagcaatgtcctcattgagcgtggtggtttagatcttgtgttcatattgcattatgaaaatagttactcctaccacccttcgttggaatttctcaagtgtttttctgtattttgtaaccaaagaatcttgactagtgctgatgtgtaggatgaagccaagtcatggtgagtcaggaaagctgagcagaggaattgtgtttagttgtaataaggaatgacaccatcaaagcctttgaataggaacccgaagtgatcaaagttgttttaagaaagagggagttggcagtagtattcaggattgattagatgatcccagaatcatataagccagctcaggggttcatgcagcgtatggagaatcagatttgtaaatgtgatatacatttatttagatgtgatacacatctagataaaattaatactcattattacagaagtaacagctaccagatgatgagaatttattaaacaccaagcactgtacttgctaagaactttaagtatattaatgcattctatttttacaatcaatattacccttttatcttatagcaatttaataagtttaacaagaacaaacatctagttcagttcttcaacggggacttaaacccaattctatcctgtaccaagaaccattccccttcatttcccagattttcaataaaatggacatgattgtaacatacatcttgtctcacatcctagaacctggtttagatgctggcatgtaaaagtgaaccaccgtggcactctgagaagttcataccaactgcagtgcttttccaaggaacattaccaaaaaatctttgtgtatgaagtttttgtcattttatgtaaaacaatagaacgccttaggataattggctcaaaaaacttcgaatgtaattatcatgtgtaattatcacatctccagagaagaacagcatttacaaagaaaaacacttaattacgcttatttgaaagagttttcttgaaataacaggcaagaccacaaagggagaccaaggttgtagaaaagcaggtgatgggaggggttaagtaaagactccagttctggaggacgtgacaaacccagagtaggtgcttgagttctcttgggagtgggtacaagcatgagaagggacatgggtgagtctcaaaatctatcatgcagctctatgaaggagtccttatgagccaaaactccaatactttggccacctgatgtgaacagccaactcactgcagaagctctctcacctccaatctggccagaatttatacttagattctgggctttgatcacctttatagatgccccaaaccaagaatggccatagctactcaaaaaaatacaagtgaaaaaaattaagatagctatagaatatatgctacaacaaccaaaccagacaacctagaacaggaggtacgattaatacaccagatagattatgaataaaataatacaacccaagaatgacaaatatcttttagtgaaaagaaccagatatcttaaaaatgaacaaagaacaaatattaatcagcttcagaatttgcagcttaccagagataagtcttaaaacttt

SEQ ID NO: 40672 - DNA, 1004 bp, Bovine  19866881457108
  misc_feature (1)..(1): n is a, c, g, or t
nctgaaccctcctccctcctcccttcctaccatccctctgggtcgtcccagtgcaccagccccaagcatccagtattgtgcatcgaacctggactggcgactcttttcatatatgatattatacatatttcaatgccattctcccaaatcatcccaccctctccctctcccacagagtaagtttaaaaatttgactcaatttcaagcatcctttctcaaatccttgtaaagtcaaacaaaaatcatatcaaaattatacttttctaagcatattaattatgtactaaaaggaacatgagatttgaccaaaagatgagacaaagaaagtcattcaaaagctctagcattgtgagaggaatctgcccttcagctcagcttctagactatagagaatttaggcaatctgagcaacagaaatggatgttttttcccatagaaataatttccttaggctataaaattgcaaattgctttgaactgccttttttgctcagtagggataatcaaaataatattgcctgaacagtgttatcacacacaaagcatactctttaaaaataataataattctgtgccttggtagaatttttaatcccaattcatgatcattaaacattcatccatcttgagaacacaggtaaaatatgcaggtgagggatactaatttcagcttgcaaaacaggaagagaaaacaaatcctgagaaacaataaaagccaggcaagtgactttttatgttgatttgatggctcaagaagtctttttctcatctaaggccatagctctttattttgagaggggtaccagccagactttggaagatcacttagtaatccaggggaggctttcatggtccaagattcacgtaagggaaaagcaagtggagaggtgagaatagccctggtttaagagataaaactgggagaaggcaatggcaccccactccagtactcttgcctggaaaatcccatggacagaggagcctggtgggctgcagtccgtggg

SEQ ID NO: 40673 - DNA, 1427 bp, Bovine  19866881568348
  misc_feature (1)..(1): n is a, c, g, or t
nactcataatattcttttgaccaataaatggccgacttacaaaataagccacaacatgagagtggtaagctaagttttatttggggcaaaatgaagactatagcccaggacacagcatctcaagtagctccgagaaactgctcccaaagaggtagagaagaaggtcagtatagacgtgattttggtgaagggttagcacatattttttgcagaaggtttctgttccctgtaggttgctgctagtcctaagaagtctcaccgtaaaggatttcggtgcttttctagatatgagaagactcaagaattggactcataaaattggctactgaaaatatttatctgaaggcctgttctgccagtttttcccaggctacagagtggcttgtttcttatcttcacatgaactactttcaggggtattgaaagtcagcagctgcagcaggacatgatttaatccttctagaggtagttgggaagtgccaatttgtagttgacaaaaccaccatgctccttgacagttcctcccttctgcatttttaaataatagtgattttcactgaaaattgataggcacttctctctctgagatgtgtttgtttatgtaattactagaagtatacaatttggaaaaccaatccaccactgtctcaaatcctgccccacttacgcagttgaaaatgaatcgagctatagaactcaagtgctctgtcattcagtcttgtctgactcttttgcaaccccataaactgtagcagccagggacctctgtccatgagattatcctgccaagaagacgggagtgggttgccatttccttctttaggagaactccttaagggcctcaggtaaatttcactgaattgtaattcaatatttttatttcaggccacacaactagatgtattggtgagattggacactctcatcatcacagtaaattgcaatgtctcatctctgaattaaatttaaattgaatttgaaaagactttccagcccataaaagaaggatcagggaaaatgcttcatttatctccatcttagaaactgaagggaataggttgctgagtgttttatcatcaaaagttcatattctataaatctgaattgggaaatgtgaaaaaatcaagccatttaaaatttattaggaaaaggaggagaaaaagctagtcaaaatgtacagctaatcattttcagtgattagctgactataccctgattccagaagcacacacgaaaaatcattcctcattctttcttcaattgtgctgtgaaaggatacattttaaaatatatcttttgctccttaaaaaaaaaaaaaaaagctgtcctgtcaaaataagagctgcctttcaaatttccagattacaggtgttcccgtgatgtaattaacttaaacaactgtctttctgccatgatgacaaaggtgg

SEQ ID NO: 40674 - DNA, 722 bp, Bovine  19866881798701
  misc_feature (1)..(1): n is a, c, g, or t
ntagggaatttaattaatgatattttctattggcctctattttatatacttgaactgtctataaatgcaattttaaagttcccaagtgtagcaagtaggccagatatgaatttcaagtgtctcattagtgagaatcgtctttgaagttgcaaatgggggaaaaaaaacacatttatttgcacatagaatctttccaacagaggatctcaaaacatatttaattgtgacatgatttatgtaaagcaagaacagtgccaagaaaagtctttatttttttcttaggcaagagcatgttacaagaacaaacgatcactgaatatctgcttcacaaactactagctcagtttagaaacatttttcaccccaggaagtctgcgctctaatacttaatgctgccttctcttctcatttctgatttcttccataactcattagacagctgatggaactacacatggaataaagtagctgtgcttcttccctcatattaaataataaaggtcatttgcctcgttttttttttttttttttatgctgccaatcaatttttcttgtgaaattctaaaacaatgaagaaactcagactatgggtataattttcaaacaaaattcatatcatttcttaactgatacaatgtgttcaatctactttcttttccctttttattgcagtatagaatggtttttttaaaaagagtccaattaatagttttgaagtagca

SEQ ID NO: 40675 - DNA, 742 bp, Bovine  19866881808974
  misc_feature (1)..(1): n is a, c, g, or t
ntaagtatacatttaggaaacggacacaaattcagcaaattttacattacatatttatagagcctttgtctgcaatttcttcaactggtaaccataaagtcttcatgctgatatgacaggtaatggatgcttttatttgcagtttgataattcatcttagttcccgtgtcatttaaactctgcaagaatatcactgcattcacgaagggttttgaaatgttttaacttttgatgttatgatctgcaaggatctctgatgaaatgtttcatttaaatgtgctcagattcatggacatgaaattttgtgtcagttgatagaaaacagcttacaagcttgacctatgctgaaggccctgtgctgattaatcaagaagagactgcacctcctcctgctaatgacctcatcaacagtgggtgtatttttaagatgaaaaaataaaaggtgcatcctgattataattattttcagtttgatttgctccttagcttccatggtgaggctctggagaaagaccgtctgggttcagagactaatggtaacaactcacatttactgaatcattgttactaccaggcactatacagaacactgtgtaaataaatcatataattaaattatcacaacaatactaggaggttggtgttattactaccattgttttatagacaaacagatcagatcataggaaagctacctaactagttcaaaacaatctgtctagttcatggcagaagcaggatt

SEQ ID NO: 40676 - DNA, 825 bp, Bovine  19866880450207
  misc_feature (1)..(1): n is a, c, g, or t
naccgtgaccttgatcttgtggaggtgatggggcgttcaccacgggagcagcctcagaaggggagtagtcgacaagaatggtaaccacctgcttcataagggcggactcgccagggctctgggcagagaaaaccatgctgaaggagaaggtcgttgggtggagagctgatgcaggaatcttggtgagaggatttccaagagggctgtcagcagtgaggaaccgtgggtgggggggcccaagaacccccttgaagctgagttctcatagcggggagtccactgagctttctggaaatctctttgacaccttctcttaggagacagaaggcctgccaagccacaaagcttttcttttctttttttttaagctccaacttgaaaacaaaatctctgaccccagacctgtgctttatctctgatatcagaaacagaatggacaacaggtggatcaaggtgtaagaaaaaagaaaaaaaggaaaaaaaaaaaacaaaaaactagaaaatgctttcaaaaccttccccagtgtcccatcctggaggctggagttcccagcggccaaggcgggctttagatggttcctgataaagtcccgggagagaagtggcctgtgtttgtcgaaggcttagagagctttagccgcgtctgcacacaaaggggccctctgtcaacagtccttcaggccactaatagggctgaacaaacaccagggtaacaagctcttcacacctgtggggcttgggaaaggccggggcccctttgtcaagacagagtacaaaagagctctctcccccacccagccagaccctcctgggcttctgaagcag

SEQ ID NO: 40677 - DNA, 2675 bp, Bovine  19866880457432
  misc_feature (1)..(1): n is a, c, g, or t
naattttgttggggtttttttcccctcaagacaaaaaaaaaaaaattacagtgataaatttggctgtttaaatagtcgaagtttcatcatgccctcattgaggctgttttgcacccagcagtaggaggacagctgtcatggaccgctttcatctgattttaccgcctccgggtaaactgagacaaactctagtggtaaaaacctagagtggttgggaatctccaggcaaacagtttggtttggtttctgaggctgtgtgtggaagaatcaaatctgcagtttccttgaaacggagcagaaacatttcacggtcagtgctgtggattgtccccagacctccgatctcctttctcagaaatcacctccgcccctctgtcccagtggtcctggtcatgccgtgcctccggtgtgtggctcttatccacgcatgtctctctcaaccatcctgtcatttcctggcacttctcacgtctcctaccacactcatcatttacaacctcccacttggagaaggcaatggcaccccactccagtactcttgcctggaaaatcccatggacggaggagcctggtaggctgcagtccatggggtctctaagagtcagatatgactgagcgacttcactttcacttttcactttcatgcattggagaaggcactggcacccccactccagtcctcttgcctggaaaacccccatggacggaggagcctggtaggctgcagtccatggggtctctaagagtcagatatgactgagcgacttcactttcactttcatgcattggagaaggaaatggcaacccactccagtgttcttgcctggagaatcccagggacggggggagcctggtgagctgccgtctatggggtcgcacagagtcggacacgactgaagcgacttagcaacagcagcagcaacaggtctgagtctctgacctgtattatttcctctctctgaagaacttttaatatttctcatatggcagggctactggcaataactttctccaatttttatttatatgagaaagtctttatttcttctttaattttgaaggataatttcacaaggtacagaattctaggtgggaggggtatttctctatcaatatttaaaatatgttcactccactctcttttgtttgcacagtttctgaggagaatacagatgtaattcttatctttgtaagtaagatgctttgtttctctggctctcctcaggatgcttttcttcattttttatttcgtttgaatatgatttgcctgaatctggttgatatgccccctagtagttgtttgtttgacatttatcctgcctggtgttctccaagtctccctgaactttggtttggttttgacattaatttgggggaaatttccagtcattattgtttcaaatatttcttcttatctcttttctttttctttccttctgtgtttccattaatgcattgcaacttttgtatttgtcccacagtccttagacactctatttttaaaaatcttttttctctttgctattcaatttttgaaagttctactgatatgtcctctaaatcatagattctttccacagcattaattattaataaactattcataagctcattaagggtgtttttcatttctgttccagtttttttgatccctagtactcttgcctggaaaatcccatggacagaggagcctggtaggctgcagttctgggatcgaaaagagtcggacatgactgagcgacttcactttcacttttcactttcacgcattggagaaggaaatggcaacccactccagtgttcttgcctggagaatcccaggacgggggagcctggtgggctgccgtctatggggtcgcacagagtcggacacgactgaagtgacttagcagcagcagcagcagtggtattgctttatggtcctttcttagagtttctatctctctgtttacgttgctcatttgctcttgtatgttgtctgcttatccattaaagcccttagcatattaatcatgttgtagttgttcagccctgtctgactctttgccaccccatggactgcagcacatcaggcttctctgttcttcaccatcttctggaatttgctcagactcatgtccattgagttggtgatgtcatccaaccatcttgtcctctgtcatccccttctcctcctgccttcaatctttcccggaatcaggatcttttctaatgaattggctcttcacatcaggtggccaaagtattggagcttctgtatcagtccttccaatgaatattcagggttgatttcttttagcattgactggttggatctccttgcagcccaagggactctcaagagtcttctccagcaccacagtttgaaggcatcagttctttggtgcacagccttttttattgtccagctctcacatctatacatgactattggaaaagtcatagctttgactatagggacctttgttgacaaagtaatgtttctgctgtttaatgctgctgtctaggtttgtcatagcttttcttcctaggagtaagtgtcttttaatttcatgtctgcaatcactgtccacagtgattttggagcccaagaaaataaagtctgtcattgtttccattgtttcctcttctatttgccatgacgtgatgggaccagatgccatgatcttagtttt

SEQ ID NO: 40678 - DNA, 1549 bp, Bovine  19866880474392
  misc_feature (1)..(1): n is a, c, g, or t
ntgggagacgtagcgagcacagagggttgtgggtcttatgatggtctttggggcagcaactgcaaacgctaatctgaaaccccagaagtggtgggggaaggctgggaaaccaactgaaatagcgtttgatctttggcctctctgatcttaaactgggccgcgcccccagctgggttcacgaaggccactgaacagctgtccggatgataacggctttcagagttgtcagcagtattcggttagagccagggatggggctgttccctctctgcggaggtggaaaaagagtccatgtttcccttcgtttctacctctgccggggctatcctaaatgaggaagtcatctggatttgtaaaaataatcacttcttggcgtgttcttggagtctgttgaaatgttatttcggaaacgagaatttggatgcccggaggtcacaggaggaaatgaatctggcaatttgaaagtgcacctgctgaagttccaggccctctcagtgttaaaataattcatccatccttccaaacatcttttgtgtcttttatttaaaaaaaaaaaaaaagaattctaagttattacttagtatgaatcagaaaacagccctgcttcttcagctgtggactctgaggggttttctccagcactttttcacaattcaacaaatgcaaacttaagagttgacctgatacctacacagtgttctgtgaagcatgtgtgtgtcagtcaggacatcttgggctgcctgaaacagaaagtccaactccaactggatttaaaagtagaaacttgtctcatgtgaggagaaattcaggagtagctccagggggcagctgattagaggttcgcaaagtcacttagcaaccaggttccttccacctctgtactagtctcctatctctactgtaacacgtgaccagagacttactggcttcaaacaccatgttatcttacagaactggaggtgggaagtctgagctgggcctcgctgggttgaaatcagtgtgttggtagggctgaagcttcttctgaaagccccagagaagagcctatgtccctgctttgccagtgtctagaggctgcctgcacgccatggctcatggccccttccaccttcaagtccagcaatggctggcggagtccttctcacatcactctgacactggctctccacctccctcttccacttttaaggacctttgtatgtcgggcccatgcagatcatccaaaataatctcatcttggggcctgtacccctagtcacatctccaagtcccccttttctgtgtaaagtaagagagtcataggttccagggaccaggacatgaactttggggccactactcggcctgaaaaatctctgtccttccagcctcagcaaaggcttcagcctcctaaagtcacagaatggtaattagaagaggttctgagagtcatgtgagttacctgatgaaagtgaaagtggagagtgaaaaagttggcttaaagctcaacattcagaaaacgaagatcatggcatctggtcccatcacttcatgggaaatagatggggaa

SEQ ID NO: 40679 - DNA, 1044 bp, Bovine  19866880488029
  misc_feature (1)..(1): n is a, c, g, or t
ntttttggcctggagaattccatggactatatagtccatggggtcacaaagagtcggacatgaccgagtgactttcactcctaagagagaccaaatgagcaagaacatatcaatgtttgtggaaatcggggttctcactgcaggaaaaggaaaacattaatttggaatggggaagttacaaagaaacctgtgatgctggattagaatcaaaggaattggcatggactcaggatttgctcaaaaaaaccttgccaaatcccaccactgtcttttttacagcccgaaagcaaaggatgatcatgtttaaacgtaaaatgtaaaaaaagaaaaaagactatcatcgtttttttgagaatggttactcaaagaggtgagaacttgcctcttgttctgcagagcctgatagatttaccacctgggggacagtgtaccaactctggaactagactataaaactgtcagcagcttttaagataaaataggagaaattaaagagatgccctgcttcatttggtctcagtgattaagttaacaatgaatggattggttgtaatgtccatttgacctatggcaacccactccaatattcttgcctggagaattccatggacagaggggtctggtgggcctacagtgcatggagtcacagagagtcagacacgactgagtgactgacacacacaggttgttacacatacagcctctgaaaggggagagttttcagacctcagagctcaaacaaatcctctgaagggcccagtctctcctggccttaccttggttgtattttcaccatttctttcatactgatttcgctgctgaattttctcggcaatctcttgtgcaatttggcaggtagaatcgtaggtggagaacctgcgtcagagtcataaagggacagacatgttgaaagttccttaaaggaaatgtcagcgtaatctaaagttgcagtgtgtaattctagtcatgacagtgaacaggcagggaggatgataagaggggcagtgaaggcgtacacgcagtgaatggtaactcactatggga

SEQ ID NO: 40680 - DNA, 2586 bp, Bovine  19866880777304
  misc_feature (1)..(1): n is a, c, g, or t
nccaaggcagccagctggagggatgtggaggcgaaggtggctccccagcctggcacctaaacttggcccatgaattttctccttgtcgtctgtgcagggcagagggagtgttcctcatgctttctacatccttctttcttcgccccccaccccttagactcttgcttttggactcattttctccatctgaacccgaggctgcacctggtggttttccttggactcaagtcttgggaggaggtggaacccagagaccttggcatgcctggtccctttggtacaccaccagggagtcctcttacccatcccacagggcctctagaatgttccatctccaccctcttcccaaggcttgtgtaggtgacgtttacctaaacccaagtggagagttgtgaccaaaataaaaatcttcctggaatttctaggcactgagagaacagaaagaaatatccctagagtaaaaaaaataaaaaattccccaaatcgcatttgacattttcagagatgctctggaccagaagaaggagaatctacagcttaaccaagagtctgcagtcctgtcttggacgctgccctgtgtgaccctggccaggggcttggttttttcgctcatagaaccagagttctggctctataatcccccagcaccttctggcagtagtaacatgactcgaagtggttcccttctgttgttacctagagcaacataaatcgagagctgagattaatacccttagttaagtctctggagaactcagacctgaggaaattgaaacacactccagccaccgtgggactgggtttacagtgggtccattgaagacctcgttcaaggcatcgtgacttgagaggctccggagtggctggggaacctggaccttattaaaaggcattttctgtaagatcccagaaagcctgtccttgagggaggcgcagtcagaaagggagatggagcctccacggggcgcagtggaaagaatgcaagttagaattgttagtttcaggtgtgcctcctggtcccctcatggctgctgctttctggttattttcattgtccccatcacttttcctctcagggaggaagtagtcccttctggccccagcattgagcgaccttgtgaatttcatcacgcctacggttctcttggttctaaggtttgtgcataagttaaaaggaaaacgcaagtgaaatcaggagccaaactgcgtccctctcggtatacatcttcccaatctctgatgactccagatctttagcttccacatcatttttactgtcacctcctgtgaagcgcgtttgatcactcacatgtggcctgtgacttttttttttttaatttttctttattttttggctgcactgggtctttgttgcgacccatagacttttccctagttggggtgcatgggcttcttattgctggcttgtcttattgtggagcacaggcgttagggtgcgcgggtttcaatcagcgtggcacatgggctcagtagttgtggttctcgagcacaggctcagttgctctgaagcatgtgggatcttcccggaccagggatcgaacctgtgtttcctgaattggcaggtgaatactttaccactgagccaccagggaagccccaggagtttctgatcttatttggagatctctgtccctgagagctgtagctggggtggccacctacctcctgggcagacctgccactggctgcccttcaaactcaaccgccctgggctgaatccatctgctcccctagacctgtccccactgtgggtttcctcttggtccttgacatctctcggtccctaaagacctcagggcatctcagatgtctcccccttcttcatgagctggtgtccaacctcaagatggaagctgttgtttaacctctgcctaaatccttccagtggctgtaccattctgattcaagcccccagtccacaccatcccacccaagttggcagggccttgtggcacaggggttattcttatctatcatgagagtggtgtcccaattagcttagtgtcttgaacttttttttatctctgcccgtatttcctgtctgttttctgactgactctttgcaaccctgtggactgtagcctgccaggctcttctgtccatgcggattctctaggcaagaatactggagtgggttgctgtgccctcctccaggggatcttcccaactcagggattgtacccaggtctcccgcattgcaggcggattctttaccgtctgaaccaccagggaagcccaagaatactggagtgggtagcctatcccttctccaggggatcttccccaacccaggaatcaaaccggggtctcctgcattgcaggcagattgtttaccagctgagccaccagggaagctgtttccaacagtgacctccatgctattcctccagactgccaggcacattcctgccactgggactttgcactggctgttccttctcctgcagtgctcctcccctgtgtgtatctatgtggctcacacctcagctgttttaaggtcttcactcacaggtcacctagcgggttaccacctctgtgatactcacagcatacctctcagacact

SEQ ID NO: 40681 - DNA, 2780 bp, Bovine  19866880781246
  misc_feature (1)..(1): n is a, c, g, or t
ntaatacatgaaatgtaaaataatgacgcaaacgaagttatgcatggaacagaaacagacacagacacagagaacaaactggtggctgcctagggggagaaggctcgggggagggatggattaggagcttggtattagatggtgcaaactattacacacgggatggacaaacaacaaggtccaacagtacagcacaaagaaatatatgcaatatcctataataaaccattgtgaaaaagaatatatctataactgaatcagggcttccctgatggcttggttgtaaagactcaacctgccaatgcaggagacgcaggttcgatccttgatcaggaagataccccggagaagaaaacagcaaccctactccagtattcttgcctgagaaactgcatggacagagaagcctggcggattacagtccacagggttgcaaaagagtcagactcaactcagcaactaagcaatgacaataactgaatcatcatgctgtacagcagaaattaacacaacactgttgatcaactatacttcaataaatttttaaattaaaaaaaataaaaataaaggacagataaataaataaagctctcacagagcttccagtagctagaagtgtaggaaaaataggcacatacacggcattcacaagaacactaaccacaaacacgaagcatgtgccaggcaccagaagatgtccacacagaccaactcatttaatcctcacatcatccctgttttacatccccattttacagataaagacactgagacacagaaatgtgaagtcatctgtccgtgtatcatggtagaagcagagtcagggttcagacggaaacagccaggtcccagggtttgagagctcaaccactcggctctacatactgccaggctcctctgtccatgggattctccaggaaaggatactggagtggtctgccatttccttctccaggggatcttcccaactcagggattgaacccaggtctcttgcactgcaggcagattcttggcaccaaccgagctaccggggaagccaggtaccaggacaaggcattgtaaaagcaggtttctctaactgcccacagcatctcccactgttcaggggacagggtggtgctcagtcattaaactatgatctgtgaacaggaggcctctacaggatctcctcttcagcatccagctactgcctggtcatcaccaaagtcactgtcatcgttggcatcgttgtcagaaaagaaagagctgctgagtgtggcccaggccatattaagccctgcccaaggtgtggctacacagctcttgggagtctgggcagaccacccagcaggcttccacccacaagttccctaaagctcaggaagtggaatctggagacaagctgcccgaaggagggcaccggaggacggtctgtcttagagactgtcatggcaatagcccagggaggggagcagggaaggggcgtcccttacttgctggaccttggtgtcctttcccacatttccaccctggatttcccacctcgggaaggaaaaagcaaggatcgtgcccggcactcccaattatggaaggaaagcatctgggagtcagataacatgattcagcagaaccggattgctgattttttaagaaaaatggatatgactatgagatgtgggaatggagggacctgggctgacacagacctgcctttccgggggctcgggcgctgtgcgaggctgaggggcaagggataagccccatgctgcccacagacctgagccctcgaaagctcagaagacaaagtcattgtacttcaggatccagagaaacaagctttaaaaaacttcagtgagtgtcctacatacaaaaccttcaagttgcgaactttcaaaagaagctaacgtgcgatctcatatccaatcacataagttagttcacgtgtcaggcgtacactgtcatgtgagggcatcctctacaagaggttgtgctattgtgtgctgtacagtactgtacagagtcctaagggaagtcaaccctgaatattcattggaaggactgttgctgaagtcaaagctccaatactttggccacctgatgcgaagagccaactcattggaaaagacgctgatgctaggggaaattgagggcaggaggaggaaagggtgacagaggatgaggtggttggatggcatcactgactcagtggacatgaatctgagcaaactccaggagatagtggaggatagggaagcctggtgtgctgcagtccatgcggtcacaaagagtcagacacatcctagcgactgaacaacaacaacactgtatagcgtacagaagtatggcatctttatttcaagcccaggatgtctggaagcaagtataaaagcagcagtatatagctggttatgttaggtgagtacttaggcttacattgttgtatttgcaaacaaatgcacttaatgaatgcactctaggaacagaactccttcgtatgtaggggacttactgtatgaatgtgttactctcaccagggaggatggtgattataactatattcaaaaacttggtacagcaacatgaatactcctttgctggtatacagatcaccaagcctcctgaagttttacagtgtatcctgagccccaagagtcaaaacagtatgaactggcataagaatagagacaaaacctaatcaaacagggagtctaaaataagatttgcttatatccagcaagtataaggcaaaagttgaggcaaaaaagtcgaggaggaaaagtagaggcaaaaaagacagata

SEQ ID NO: 40682 - DNA, 1733 bp, Bovine  19866880798456
  misc_feature (1)..(1): n is a, c, g, or t
nttctaatttattgagccaaattgctgctgaagtctgggggaagtgttctctctcagctggaagcaacctggtgtcacatttctgggttttaaaggagatgatcctcaaggacgcgcaattactttgaacaggtgtgacattccaggctgatggggattcgtacctgtcaacagctgtgcattagcatttcaaaacccttctgactttttcactagagcactcagcgtgttgcagagatgggaagactgagtgcaaaccagggttaaaaccctttctgtcaggaagtggtcaccaaagagatgttaaagacccagctgccgaacatggctttacagacctataggcccaaccctgccgcatcaggaaatgggaagaacaccgctttaagtgctcaagtggggactctgagcggtattgaccgtacctagtgcaaagagcgtgaggacgagatgggatatatgataatacttgcttgtcaaggtttttcaccttcagaatcacttgtttattcatttccactcattcctacaaggtcacggctagaaatggcgaggcggggagacggacccagaataatgaaatgtctgttttaaatcaggcacccatcccccaccatccttctttccattcttccttccctttcctcctcttcattcattcaataaacaccgactaagcctccctgctgtgccccccaaacccccgactcaggcactatgctgagtgatggttcttcttctacactgtggatgctctgagcccagggaccaggtctactagacatcctggaaaccttgcacagttccccagagcacagaacagacgccccctcggagacggacatggtgggcatgaggctcaggtccggcgcaccatgggtgtccatcacagcccagacctggggagtcagggaagacttcagtcgcccaggttctcaacgtgaacatcagaatcacctggaaaactttaaaatcccaatgttctgtattccagagcaatgaaatcagaatttagagggaaggggaatccaggcaacgggaattaaacaaacaaacaaaaacctctccagatgattctgatttgtctggaactgctgttctagatccttcctgcttggtgggtggcccttggagcagcagtgtccacgctttctgggagtgagtcagacacgcagcaaccggaaccccactccagaccctcagaatcagaatctgcattttgatgagcttctcaggggccacgtatgagctgctctgggagatgtgctatccacactgaatgctgaaggcctagaaagccagcagaggggaatgaagaacagaaagcagcttgtgttctgtggggagagagagtgagagagagagagagagtgtgtgtgtgtgtgtgtgtagactgcatgtgtgcatgctgggggcactgtatcaagcaagtgtgtgtgtgtctgtgagagagagagagagtgtgtgtgtgtgtacactgcatgtgcgcatgctgggggcagtgtgccagaaggtcagggaccagatttgctaggctacgaaaccacattctgggctctggactttatcccctgaaggatcataagctggggagagacttgatcagattcccctgaagacccaccgttttctccacttgtgctccatccactcactccactccctgagcctgaagtttcttaacccagtgccaatcatccgtgtcccacccatcttgtctgcaataactcaaa

SEQ ID NO: 40683 - DNA, 1790 bp, Bovine  19866880837542
  misc_feature (1)..(1): n is a, c, g, or t
nctaactggttttccattttccagtgtgccccgctactgtgtgttcttcatgctgcagccagagggatcttttcagaaaggaaataagattgcatcaccctccctgctttaatttcctcagcagcttcctgttgcatttacaacagaatccagactcctatacagctgacggggccctaactggctgacccaccaacagctctgcctggtttctgcccctcactcatgattctcagtcacgccgggctgctttctcttcctttaatggccaagggtgtcaagaaggcacccacgacccagcaagaccacagctggctgttggccggagagaggagcttgccctgctcttcatctgacctgattgagaccaggaaagatctttttctatgtctggatggagtcaaagctcctcctgaaacttgctctcagaaaattgggctgcctgcagagggctggctgtgaatgcttgaaggtagaagagcagagctgttggactatttggcacaaactttattttcgctttccaagaaggaaatagactgcccctgtgtacctctgaacaatttttctttctgaggctatttctgtttcaaacatatgaaagccatgtagctcaatttatttgaaactagaacaggaaacatgaggaccactttcttttctgttaatgtaacaaatgttttcatctggtgaatagggcatctttttactatcctgtggacagtgtgacaccagcaatattttgggcagtttatcttacagaaaatgccactcttgcaggattaagaaagggactgaggctggggagaggaccaggaacctaacatctattaagcacctactatgtgccaggcaggataccctcatctctttttatttaaatgatgactccctgagctgacgtaatactcctcttccttttaggtgtggaacaaggctcagggagatagtcaggatcactcggctagcagggtagccccagcctggtccgacctgcctgatacaccatgctttgtgagtgaccctccattgcctctcaccccagcctcgtttggaattttctctttacatacccctccttggacggtcctgtatgcagccgctcccaacgcatgctgccttatcatcttttttagattttctttttttttttaatgtggaccattttcaaagaattgcttctgttttagttattttggccctgaggcatgtgggatcttagctccccaaccagggatcgaatccaaaccccctgtattggaagttcttacccaccggactgtcagggaagtcccactgccctatcatcctgatggagaagcagcctgggtcattgtgaggtctttggttgtgaggaatggcagccaatcagccaactcaaacaacaaaggaattagttggaaggcaaagggcaggtgtgaagaatggaaatgaaggctggagaccaggcttggaactgtcttgagccagatagctctgggtgtggggaagggtggtcagtggcaggaatggctcaatcctctggcctggacacttctgccagagttcgcagtttgcggcctgtaggtcagtctgcctgtgattgacatgaagagcagggacatctcatccatcctgcttggatcacataccagtctctttggtgagggaggaaaggatccctgatgaaagagccttgccccctccccccggactgaattcagcattcccaaagtgagggctactctcagtgaagaggaaaccatcctgggcagccccaaatgcccacgtctgctctgcatccatggtct

SEQ ID NO: 40684 - DNA, 992 bp, Bovine  19866880844065
  misc_feature (1)..(1): n is a, c, g, or t
ncctagtgggctcagtcctggtattgcaaagagttggacatgactaagttactgagtgtgcacacacgccctgagtgtgagcacagattgtgggcagtgtgttatcagtaacaggcagaccagaggcagaaatggatttagccaatcagcagaactttttcagtaggaagcacagaatgattaaataactgtatttaaaaggacttccagccaaaataatttttacgtgcgtgctaaaaactcgctcctgtattggcaggtaggttctctaccgatagcatcagctgggatttttcgtgtgaaaattatgatggaatctcttttttcaggatgaaaaccacgttccccataattggaatgactgtgttttctttgtaagcgaatagggtgatttacatgttctagaaaccttgacagcagacacgtactttccagcagtgacaaacatctcgtcgcggcacttggagaagatgactgtggtggcgttcccgacattgaggccggctgcggggctgccacagatggcctctctcttggctatgctccagacaaccacactgctcagacgaaaggacaaagagaatcagggggaaacgggctttcaaaataagaaatggctcttttagccgttctagaaggaaagaaatacaagaggttactcacaaagaaatgaaagaattatattgaccatcccccctaacccccaagacagctaagtctcttactaaaataaagagatttttgagacaggcagggcataaaagtttaccactcatttatcgcttgtaaaaaattcccttggggaaatactccagcaaaaaaaaaaaaaaattgttaattagaagcaataaaagagaatgacatagggatgttttcaaacttcaccatgccatgtagctgattcagctggaggacttgccaaagcaggaagtgctaggacctgcccccagacgttctgattcagtaggtctggggtggagtctgagaatctg

SEQ ID NO: 40685 - DNA, 934 bp, Bovine  19866880900388
  misc_feature (1)..(1): n is a, c, g, or t
nggctaggtgagcaagtgtgatgcctgtcgagatgctgggtccttggccagacccgttgtgaccttctctgggtctccggatgcctgggatctctcatgctctccccagggaacttgggccagatccggatcacgggctttgggactctggggtctgccacagcaaaggccttgcttgcctcgtctcagcaggagggaagttgtgggcaggaggccagggggccccctgggaagcggggcctgggagctcagtccatccgagcctgtcgattcttgcagtgtttgaatagggaaggcctccatgctgggctgcctgagaaaagcttgtttacttttgcctgaggaacgaaggagaattaataaagccgagaatttgtcctgaaagctgatggacataaccttaccctgaacccacccatccccttgaagggccagttctctctgggaatgctgtccacctgctcactgagccagctggtaccccattctggggggaagggaggcaaggaaccgtgtgcctgtgggagacctggggctgggagggagataaagaccacccgcttcaaacccaccgatttgtagttgtagtgacctctacccctgcgtccccttgccatgcatcagctccaagatatcggtctatctgcatgtttggtttgtagaggctcctgggtttagcagaataagcactgtctcaaagccaggagatctggggttgatccagcattgacagtgaagccttgaacagagcaaagactgctttctgcctccttgaaggatgaaaggatgggaccactggtcctgggcctccctgccctgcgtcttctgggaggaatgaacttctgctaagctttcttcttccgtgtcaacacctgctcactcccctgctccctgtggtgatctgcttctcccacgagcctcgcatgcccccgtg

SEQ ID NO: 40686 - DNA, 1372 bp, Bovine  19866880907649
  misc_feature (1)..(1): n is a, c, g, or t
nttgccccaacagccctcagatagctctgagccccgctccagttttcatccttggtgatgacaggcgtgcggcccgaagaaatgtttgaactcgcgttcttgaaagttcagtttctgcaggtgagctggcacaccctgtgatacggctgctctcagggtataaatttctccagcccacagaatttccttttcaccacgcccagctcattcccaatattagttcaccaaactcagagccttctggttttgattggccagtcaaggttcatggaggcaaattctttcctgagatgggcccatatgttctggaaagggagtgtttgcgagccgcccaggcggtcacggagacgcgaagccagaagacagcatcatgttgccattttcagcaactcccggtggacagccaagcgggatgattaatatttgagcgtctttgttcttgctgttccgttagaaaaccagcgctgtttaaatcactctgaaaataacacgcctgacatttccacggtttaaaaaagaaaaacaacctggggaagtaatccaccccgcctattaccgaggaagtgttttcagtgagaaaggagagaaaattgtctgacttgggggagaaggctaattccgaagagcttcatggcagagaatacattaaaacctatgaagctcagaggcgtgacccagcgtgtgtatttaagaggctgagattggcctcaggaggcacttaagctccatctctggtccctgcgtccggccaccgagcttgtgttgaatgtgtattatgcgcccacttctgacaccatttgctggagacatgcacctgagatttttcagcccatgaagccatttgggaatgcgtgttatattgaagcagtaccagaggccagagaacacagtttaatttcatatttaagaattttgtttccttcttgtgttgctctgtaaatctaaagggaaagtacgacctactcgggtgtgtgtggcatgcagctaagtttgagacctgcttttagggaccacattgagctgtggacctggacgcactaaccatttgcctcatgtcgtagctgtgttcttaaaataattgcatgtcataattgaaagatcataattacggatctcaatttagatcaccccagtgtatcgttctatttataaggttgccttcattgcttcagaaaatgagcttcgactctttctgataattgcctcttgcagctggtgatttttaggaatcagatttaaggaagctgcagagcatatatgacaactgtctgcaagcagcatgtttcagtcccatgataaataaaatatttaactttggggagttaacattattttgattcagaagagagaaattaatacaaaaaaaaagtct

SEQ ID NO: 40687 - DNA, 1111 bp, Bovine  19866880918428
  misc_feature (1)..(1): n is a, c, g, or t
ncgtgtgtccgcgggtggctgggtttgcagttccatgccgtggtgaaaactgtgcttcttaaactgagggctgttgccttaaccaggggcctctcactttacagagtgctggtcaccagctgggggctttagtcaagaggaagcaaggtgtggggggtggcgggggggttggaggtaggagtcagatgacagagcagacacaagatgtcaccccaaatttgggtgaatttgggtaaatgcgtttcagctgacgtggggctggttagcacattccttgtgctttgggtcactctgtcatcttgaagtcatactggccccccacctaatttctgtttttctctgtcacctccaaggtgacagggactatatataaccaagagccacagtggggaggacagaaggatgaccgctaagagctgtgggagaaatgaaaactgagggctggggcgagcagccaggagtggtcatttcacttgaagagccaagtctcttaccagagaaccagaatgacgtcctggtccctcagcttgtctgcgcagtccgtccccatcaacgaggcagcccaatgagccctactgtgagctggaggtcactctggctttcaagccacagccattaagtgatcgcaaattctctgtcccaccacctcccagcgccggacgtggtacttcccaaccgtgcagcagagggatgggggacgggcgtggacacacgctttccctccttgggaggccgcagagcggaagagccagagctgcaccgtgggtggagacgccagatggctcgcattcaaatcacaactctgtcactcggggaaggaaccaatcctttgagccccaagtcgggagaattctaaccctgagctcccagggttgtcatggagacgccacgaggtaaaaggcctggcaccgagcacatgacctggtccacggcacgttcttgagtgacactggctgctgttatcacctcctataaactggtgtggctacgagcatggcactcagggtcctcaacctttggccaggagacactttgctctgtccctcatctgtgaccccctttagcctccagtgctgcctagcctcctccagctcacaataccaacacccag

SEQ ID NO: 40688 - DNA, 1658 bp, Bovine  19866880944931
  misc_feature (1)..(1): n is a, c, g, or t
ntttcctgggtcacggatttgcctgttctaagcatttcatataaatggaatcatatgagacacggcttttcatgtctggtttctttcacctagcatgatactttcaaggcttcccatgcataaggcatacacccactggtactgcatccctttttacagctgaagaacttaccagtgcaaggataagaccagattttttttattttggatattatttgggttgtttctggccattatgaaaatgctgctatgaacattcatgtataagtttttgtgtggacatgttttcagctctcttggataggtatctaggtgtggaattgctgggtcatgtgccacacattcttttttatttcctacctgaaccatttgctactaatttgtggttccacctaacagccaataagtcaacatcttcaaagtaacattttgtcttcctgtctcctttgtcttttgatttttatgggacttcaacttactggcagtgtgaacgactgtctaacccacttggcatttgccaaaattctaagagattactggtatgaaaaactgctgagaaataagatgtgttgtataataaagtgttacagtaacattacaaattaaaatgaattcttggaaaggaaaaaatacaacccccacagaaatagattaatagtaagatttacagtcttgatcaacagcctttaccaaaccagtcaatcctaaaggaaatcaagtctgaatagtcactggaaggactgatgctgaagcttcaatactttggccacctgatgtgaagagctgacttatccgaaaagaccccgacactgggaaagactgaaggcaggagaagagggaagcagagaatgagatggttagatagcatcaccaactcaatggacatgaacttgagcaaactccaggccacagcggaggacagggaagccagcccatggggtcacagagtcagacacgactgagcaactgaaaaataacaacaacccttccattaagagagggtctgttaaagaaaaattatacagccaaaataaaaaacatgaaaacacacacaactaattcaatcaactgaatgtgccaaataaacgcatctttttaatctcacatttgttcaacacagatggatagatgaaaacagactaatgttttcagatgcagaagtttcttagggcaacttttattaactgagaattatcagagttgctctctctggggagttagaaaagtacccaattatttgtaacaaagaaaagctcagagaatgcttttaaaaagtgttctactggaaaactgatccggaaactcacattagctcctggtgtaataaagttaagtgggaatctactcatttaaagaaaaattaaaaccagaaatcaagaaaagtgccgactatttggcaaatgaatccaaaagctcaaatcctggtttaatcctccaagctgggcttgcaaacataataaaacgtttatacacacgaattctttgtcaaaagagcttaaaaacaactcccagctctcctgggtttcagctgacactctcaaaagacagtggcatttctcttaaaaataaaagttatttcagattgtttttctactaatccatgaactcagttgtcctttttgcaaattaagtcaccactgcccatgttcatcctcttg

SEQ ID NO: 40689 - DNA, 1152 bp, Bovine  19866881093477
  misc_feature (1)..(1): n is a, c, g, or t
ntgatttgagtggagcagaatttttagccctttttctgtttcttattagcaagataacctttaggtggttgaggcaggtaatgagtcgaggttaagtgaaaagagtgtaatgtaggtatttttcattcataatctgtgtctctgctaggtaaagcagctccagggctttgataattttttttttttcctaattgaagatcatagaggaatctcctgttttcttcttatatattgttttaccttttaattcatactgacacttgaccctcagttgtatatatagattatttgggagatgcatttagagttttccagtaacatcggtcatcctatagcagcactaggttgatgatagatttttcttggagtccatccaagaggttgttactgaagaccaaaaggacctcattataaagtgattttgctataaaatggtcccatggaatgatccctagagatagcaggtcatttgtatggttaaaaaaagagcacatcgtgtcaaaaaatgttactaaggggtccttaccccacaccattagtttaaataaattccagatgaattaacaagttgagtgtaatggcttaattccataaaaaaaaaaaaaatctagaagaaaacctaggaaaaactatgcaaggaaatgttaatgtgatcttgggcagaaggacctttgtgatttctgcttttatagatgggccatcatgtgaaacagacgttttaaaaaccccaacaagtgaagctgcgaatggcagagggctcggtggaaagagtcgttcgactcggccttggagagttctttccagtgcacctgtgggcagaggaaaaaagtacagggatggaggctgcctagagttaagaaaaacaaactttaaagatcttgagtaacttaagtgcttttctctttgaaaatcttaaaatccagaaaaataacacattacaacaagattttttttggccacacgatgtggcgtgcaggatcttagttctccaagcagggatcaaacccatggcccttgaagtggaagcacagagtcttactggaccgccaggaagatccccaaaaataacatgttttttaaaagcaaaaatattcttttactattgtatatattggtttgtattctactttttttttttacttaataatgtta

SEQ ID NO: 40690 - DNA, 1878 bp, Bovine  19866881105321
  misc_feature (1)..(1): n is a, c, g, or t
ngttattcctatcagtcccgctctaaagttattcctatcagtcctacctcctggccccacacagctgagcatcttggtttctatctgctttcagaagatatccccagcctcctgtccatcctgtgagcttccagaatctttgtaataaatttcactttgcttacatcgaagaattggtttctgaagtttgtgaccaaagaaccctgtatgacacatcacccaaccagcataaggtaggcgaagcccacagtccagagttctgaatgctccaggatgtccctgggtgtggtgtgctcagtcactccagcagcgtccaactctgtgcaaccctatggattacagcctgccaggctccaccatccactggattctccaggcaagaatactggagtgggttgccatttccttctccaggggatcttcctgacccgggatcgaacctgtgtctcttaagtctcctgcatcgacagatgggttctttaccactagcgccacctgggaagccagaggtaatgcctcagggtactcagcgtcactgcttcaccccagggtgctggggcacagaataagaaaatgtactcagtgacgcacgaagcagactgacatgctttaatttcatccttcccacaacctggtaatacagggatttgttgatggtggtggtggtgtttagttgctaagttgtgtccgacccttagtgatcccatggactgcagcctgccaggctcctctgtccatggaattctctaggcaagaatgctggagtgggtagccattcccttctccaggggatgtttccccacccagggattgaacctggacctccagcattgcagggggattctttgccatctgagtcactagggaagcccatagtgaagcacagggaatttcaagtcaaagtcctggattcacagcaccgtttgccacttattggctgcattgttttggcaagacacctgccacacatccaagataattttaaggataaagttcagcagcagcagaactcatatacaaaggtttcagttcagttaaactgctcagtcatggctgactctttgtgaccccatagactgcaacatgcctgccctccctgtccgtcaccaactcctggagtttactcagactcatgtccatcaagtcgatgatgccatctaaccatctcatcctctgtcatccccttctcctcctgccctcaatctttcccagtatgaggggcttttccaatgaatcagccctttgcatcaggtggccaaagtattagaatttcagcttcaacatcagtccttccaatgaacactcaggactgatctccttcagaatggactgggttggatctccttgcagtccaagggactctcaagagtcttctccaacaccacagttcaaaagcatcaattcttcggtgctcagccttcttcacaatccaactctcacatccatacatgaccactggcaaaaccatagctttgactaggcgggggtcaaaaatatgtaaagtgataatgattatcttccatgtaatgtcatgtttctaaatacatttttttaaaaaattgggttggccaaaaagtttgtttgggtttttccatgcatgcgtgtgtgctctggtgctcggtcatgcctgactctttgtgaccccatggacagtagcccaccaggctcctctgttaatgagctttttcaggcaagaaacctggagtgggttgccatttcctgctccagaggatcttcccgactcagggatcaaacccacatccccctgtcattggcaggcaaattctttaccactttgccaactggaaagcctattacatcttaccaaaaagctaaaatgacctctttggtcaacccaatagtacagcagatctaatc

SEQ ID NO: 40691 - DNA, 1222 bp, Bovine  19866881109069
  misc_feature (1)..(1): n is a, c, g, or t
ncgactgcccgacacagtaaggaaatgtggtttccaaatattcacattaaaaaagtcaccccacattaattatgcctcaagaaaaaggattaaaaagtcactctcttggcgatttatggacacacatttttctaagaattacaacatccataaagtatacctaataaaccacagtgaagactgtttaatctttctgatgattaagaagggtcttgaggatttgcattataaacaagatttgtcttggcattacagcaacacgccaagtaatagggaattctcgctgaggacaggtcatgtgacggtggactgtattctatcactaaagtagaattcagcttttaaacaactggctttgggtccagacagccctgcattggaatcttggctttccatttctcagcggcggggacttaggcaagttacttaagctcttaaagattcttctcctgggtgtgaagaaaattcctctgctggaatgctgaaagtaaaagttattaatttacattagtgacttgaggcacaagctggccttggcctcagtaccttttttgtaaagaagggaaagaacccacccaaacagtctaataataggagcctaccaggcctgacaagttgctatatgatacatcttaaatctggatgataactgccctagaattatctcagataaccaccacagaattatcttaaatgtttgggaagaggaaggtcagggagagggaagatgtaagaaacaagactaattaaatagaggcctgagtaatacagaagctacctccttcttcccggtctaagaaaccgtctccctgaaaaatccagaggttaatgagcgccccctggtggctcagatagtaaagactctgcctgcagtgcaggagacgcgggttggaaaggtcccctggagaaggaaacagcaaccgactctagtattcttgcctggagaattccacgggcagattagcctggcggactacagtccatggggtcgctaagagtgggacaggactgagtgactaacactttcactttcccatagggcgattctctaaattccatccctagctgtggttgccgttccagtagaaagaggctctattattttatttaaaaacaaaacagaatcttcaagaaaagttgttatattccagttgagtgcttgatttctcctaggaaagtctaaattattcacatgatggtccttaaatactttcataatata

SEQ ID NO: 40692 - DNA, 1745 bp, Bovine  19866881139529
  misc_feature (1)..(1): n is a, c, g, or t
ngcgctgctggaacttgcgcagccgccgcgcccatgtgtcccgccactggatcaccaggctgctcttgtccgccacgatgccgctctggtcgggtgagtcctccgcgttgccgagcagcaggtacttcttgaggggcttgattttcgggcacttgcaggcgatgtcccgcgagcggatccacaggttctggtcaccccggcggatgcggctggtgccctgcttgtacacggagatgatgttcaccgtgaacttccaccagtccccggccttgtctgccttcaggatgtggatctggacggctgcaaggaagcacaggcagggcatgggcctcggctgccgcctgggccccctggctcctgccgccaagaggccccgggatggggcggcctgtttgatggagaaggaataggagatccagtgttgggaggtgactgcagcaggagccccactgggggaatggtgtgtggaggcaaagctgaccctagaatcctgcctgctgatacgtcggccaaggccactgctcggataagtcttacttcctgcctgtgttgaaggtgccacccagccctgtctttggggacaatccccctcagagtccaggaagacactataggaactgaccacaccccatgaattctgggcagaatccagctgtttgggcaggtgccctccatgagcacagtgctggccactggggtggaccaaagcgggcagtacctcctgggcatttccagagaccccaccacctaacatcaagcctcatgacacccccagacaaacaccttgctcttgatctaatctcagactggggtctcagtgcccaggggccatgcaccctgaacagccctccaaggcggccacagcaccttttctgaagtccagggtccttgtactatcccctcccatccctgccaggcctccgtgtcctctggaccctccccaagcccccaggccattcccttccctttcagttctctgctactgtttccctgagtatgggggctctctagctagggcaggcatcagaatcccctggacggcttgtcacacacacatcactggcctcgccccgatttccgattcaccagctgtggagtggggcccaggaaggcacacttctgactaactcccagatggtgctgatccaaggaacacactttaagaatcaatgccctagtgaatgtcaacagatgctatttctgcaggatataaggtatattataagagaaaaacatttttaaagggtgggggatggattttgttcaaaccactaggtgaaatagtgggttaaagtcaaaaagttttcttactgagggacttttcagagcctttaatctacaaattatgtgcacctgcacagctgtgggcttcccaaacaactctgactgcagggccctttgggtggttatctcaagtcaccagagccccacagggcctagctgaggaacattctgggtgcacgggacacataccattccaggggctaagtgcagaagtctacactggactaatgtccagccaaaggaaacttgcactcctcctccatccccatggtcagaacccggcaccctcccctccacccctggtcaggctgaagcttctcctagcagctgtgcagacctgaaccctgctgagaaaggggcttgtctctacaggtgaagacaccgagacaaggtgggctcagtggctccaggagccacgcagacgtgcacccaagggaaggccgagcagtctcacctgccct

SEQ ID NO: 40693 - DNA, 1589 bp, Bovine  19866881198422
  misc_feature (1)..(1): n is a, c, g, or t
ngggagcagcccctcttcccacttggaacaagagggtgccaggagtccccagcacgctctttcttcttgctgaacaagatggattggaaaacaaattggctcaaataaagcatgtaattagattaaagcctcttgcccagagcctgggggactgcaaaagccctcccgactggaggcgggagacctcggcaagctcaaccagtgcctggacatcgagaattttctctcagccctcagctgcccatccccagtccttcccagctggggcgaagtacaccgaggggcttcgtcctatcccagaggtggtccccagtcctgtgctgccaccagccccgcaggcctggggtcccctctctcctgcctgcagaccccacctcagcctcagagggaggctgtgtccgatactcaagccccacgggagctcagctgaacagctgagtgggtgctatacctggacagtacccgccagagcactttccacccatgaccccatttgagctgtacaatgaccagtaagaagccaggcaggtggtattaggaccaccatttccactacacaggagaacacaggcccacagtgttctgcatcccaggtcacgtccactggggacactttccctgtcaccaactgcccctcactccaggttagggccacccagaggggtctttgtccacaaagccttgggcaacctgatgactgagcactgacccttaacctccccctacctctgatgcaggggccgcccctcctcaagggaccacactctcggcttcctgtcctcaggcagaatccctctgcccagaccccccccaccctcagacatcccatcacagcccttcccatagagccagcatccatcaccatgcccagtccttcctcccaccagccatgcccttaggaaacacaacctggggctgtgatcacaggttgccagaggaaggcaggagcaggcagaccaagtcaagaagctgctgcacccagagagtagattgcttttcctgcaactgcttctgatgtagttccccatcaaaataggagatgagcttctggcccttagaagcgaatgaaagccttggcagagaaagcaggcaggacactctggagtcctagtttgaaaaggcttgatgaggagcaacttatctctagaataaacacaacggctgcccaagaagacagtgattgggagcaagcgtgaaagcaaaaaaagcaatcagacagcatgcatgcttaatttccatgtccaagctcatggcagacattactaatcaacctcagaacccagaggcccagaactcaatcatgtgctcttgctgctcagtgagaaagctgtcacactcctaccaggtggcgttagtggtaaagaacctgcctgccaattcaagagacgcaggtttgacccctgagttgggaagatcccttagagaaggaaatggcaaccctctccagtattctggcctggagaacctcatggatagagaagcctggtgggcctagagtccagggggtagcaaagagtcagacacgactgagcaactgagcactcctgccattcctggtttattctgccactttgtcaccaactgataga

SEQ ID NO: 40694 - DNA, 903 bp, Bovine  19866881202990
  misc_feature (1)..(1): n is a, c, g, or t
ntggtcggtgcaccaggttgtatcctggggtcccaggcagaggcatcctgtcctacggacactctacttcccaaggagaatgggcaaagccttcatatccagagctcagggtgctgtttccggtatcagctgcgcctcctggcagaggcatcaggacctaccccccccgatttctggagtcactcaagccctcgccagcccaaatcatgccctctttgttgtcgaagagcttagcagatttaaaagatgcctgaatgcccaggctttctcatgggtgtccccagaataatcgagaaggatgcttgtcttttgtttggggagcctgatttggaagtttgtctgagcagtcttggtatctcacagggacaactgcattcagcttttaaaaaaattttttttaattgaaggaaagttgctttacagtgcgttcaccttgttttgcactgtttgtggacacgggcttagcgggtacccagaatttacattccagtgagttccacgggagttcagtggtgacctccccgcaccaggtgctgggaaacaaggttccagttccctgctgggtggggaggcagacagataattctagaccacgtcctgagtgctgagagcatagagggcggcctgctgtgcttgagggcccaagaggaaggctggaaccctctggtggctttgcattatatttacgcagaatccaaaccttatccagccctgccctgaccgtccagctggtgtgacttttcttctctgctcctcccctcgctcactctctgtgaaacttcctggctttcattcggacctggactctgccagggtcgatcctacctcagggtctttgcacaaactgtccttcctgctggaaaccgtcttccccaggcccttgttgtcctggcctccctctca

SEQ ID NO: 40695 - DNA, 1715 bp, Bovine  19866881212468
  misc_feature (1)..(1): n is a, c, g, or t
naaaagtcattggtcacagaaagactaaccaatcaagtcatccaggtctgacagtggagagatgggtaatgctgcaggagcctccaggtttggactgacatggagctcttcctcacatttccattaactgtctcctcttcctgtggttagacctgaccatacgccttgggcttagcagaagcaccactccatgggagtggaatgaagctttctgagaggctgctggggttcagatgatacaaccccaaagttgggggaagaggcggaaatagctctcccaagtggagaaggatggcccatggggaacagaagctaagaagaaggtgcacagagaaaaccccttgctctcccgtggactacgcaaaggcagggctcctctctgcaaaccttccagagatgtgaacatagctgctgagcgaccagttcactgtcagctcagggttaaggctagccagcatcacacggggcatcttcttttgcctctcttccccttctcacccatcctcaccactttggccttgaaagtgaaaggtgttagcttagctgctcagtcgtgtctgactctgtgtgatcccatggtctgtccatggggttctctaggcaagaattctggagtgggtagctattcccttctccaggggaccttcacaacccagggatcgaacccaggtctcctgtattgcacacagattcttaaccatctgagctacgagggaagccagcatcacagggcatcttcttttgtctcccttccccttctcacccatcctaacctttaggcttatacctcctaaataaggtgttaacacttaatccttgtctcaggctctgctttctagagaaacagggctaaggtgcctcccaaaagatcctcgttctttagaaatgaaagacaacagagcagtgtaagtatcagatttagagtatacggaaataagaagtcaaatactgacatacactaaacaaaactcatattggccttcattgtgtgcagtgtgctaagtcacttcagttgtgtccagctctttgtgaccccttggaccacagcccaccaggtttctctgtccatgggattttcctggtaaggatgctcgagtgggttatcatgccttcctccaagggatcttcccgactcagggattgaacctgcgtctcctgcactgcagtcagattctttactgctgagccactggggaagcccttggccttcattactggctggaaataccccttcaaaatccaaatggtaaaatatatcccacacaatatctaaaaagtcagcatctctgcaaaaagaagaactgaatacctaggactgtagcactgtgaagtgattaaacatgcatatctggccttccaattatacacagaacaaaacaattttgtgctatatttcttgaaatgcaactatctgttatacaaataagaggtctcccttcacactagtttagattcttgaacaggctagttattaacaagtcaaaatccagaaattaaacacaaccctcatttttagcaactgagtcaactctgggtggaatggagcactttccagaacagcagagcatgaacagcttcctgataccagaacccccagggttcctgggcctgggcacaggaccacccagcttgacaaaatgcttttgggagccataaactgtgagaagatgaggggagatggggacttccctaagtctcatgctctgatggtcttg

SEQ ID NO: 40696 - DNA, 1667 bp, Bovine  19866881221733
  misc_feature (1)..(1): n is a, c, g, or t
nagcagggaaagcctggaaagagtcatggtgttggagagagctggatgtaccagaatgatgctcaccctgcaccatccagcttggccgccgcctccttcaagtgctcaggagtccgtgggaactggtgcagtgggctcctgcctagatctcactctccttgaagatctcctccatggtgtgcaccagggtgaagtagccctcgctgctctccgacaggctgctgccacggggccaggctgcgtggccttgacgaggcggggtgcctgccacccctaggccctccttggtcaagtgcaggagccgcccaccaccaggccagggccgcgccttctgcagcgacccggagttggtcccctcagagagcttcttgggacatttccccaggaatcggaagttcttccccagcacccaggccctgcagcctgagtggtgggctagcaagaagcgggcccactgttttcgcagctcagccttcacctgccaggcgagaagagagcaaggttactgcccgggaatcattgaatcctgcatccactcagcaaatgcgtgttgagtggctactcaggaccaccctacagaaacttgcgttctcactaggggaaaggaacagagaagcaaacagacacatttgagcagagcagagggtagtaacacccaaggctgttaagcaggaccacgggaggaggtaacagtgtctagaaaaggactgtgtcaaggtggcatttgaggcctgcctgatgaatcaagggtccctgtgtgaagatatagaaaaggcagcagtgagcaagacagacgaggttttgctgtcaagcagcgtacattctagtggaaggaggcagagatcaatatttaaacctggggtggggagaggggaaggatgaaagggagctagaaatcccactggctcctaagtcaggagcaaactactccagcctgggcccttccccctttcaagcctctttccaaggagcagagggctgactggggctctgcaacaataataaatgtaaccattgttacgaggcagagaaactttaccaccagcgccccagggtaacactgcagggcagggactgttcctactcccatttacagactgaggttccaagagccatggtgacctaacacacagctcctaagcgggtgagtcttcacagcttgatgcgaatttctggactctagacttgcagctggttccctctatcacactttgatcctcctgcctggcatagctccagcgggaccatggttgggttctgtaaagaaaactcaccccaacaccttgtccccggagcctcagctgcctcttctctccactggacacccgaggtgcccatttgtcccaacacatgctggtcactgcatgtctccccatggcactgtcatataaactgaaccctccagggggcagcaggatgccagccccagcctcgcaggaagctagaagttagcacagaaaacttacctctccattagcaaagcaatactgcgaggccaccagtagcccctggaatgaaaggaagaggtggtgtgaagttctactcagtagaagatgtgtctgagggtcacttggaatgtccgcaggccagccctagtctcagcagcttctacaagaggcaggcagctactcgcttgtgctaactagagttagtctagttagtacgta

SEQ ID NO: 40697 - DNA, 1172 bp, Bovine  19866881255903
  misc_feature (1)..(1): n is a, c, g, or t
ntctccctctgcagcctccaggcagtacaaaccccaacactcagctcccggtagcctcaagttcaacccgggactcctcgcccttcaggagacttgcaggagcatcttgctcttaccttccacagatgtgagcagatggtcctccctggtggtaacgggtggtcgtcagacactcgattttgtagtcggatcagacgggtttaaggtccccccattccacgtcttatcacaccccaaacccagaagcaatagaagagctaaagaaaggcatatccaggagcccccacccccctacacccagatctatatataacagtgctgaagttgtcagcctaacgagccactttctggcagtcctgttgccatggcaatgactgctaatgagcccagagctgtgattggcactgcctgaaggcttctccacaaagaactctgcagcaagttctcctttctcaaccacacggccagctgggacacctgggggcagccgagacatggccaggggtgcctgggagccacaggtcccgggaaccactttgttacaggtgcgcccagagcagtcctgaacccaacggcccagagcggcctctactgtcactcaacatgggccaaccaattagagacagggctgcaaaggagccaccaagaggaccaagacctggtcgggccagagactggagactcaagtccagcccacgccttctgctgacatgtgttcagggtggagagagccccacacaaagctgggaacggctacccaaggaaagagcatctttggctacgggttaagaaaccaggcatgaagtggggccccgccttctacactgctgccgccagcccacaggctgtgtctacgagaattcttggcaccttgcctctatctcacaggtgaaagtattgctctctctggttctggcagcctttctgtccatggagagcaactcacagacactaactgggggaggaaagggggacccatgacaacagcacagggcattctgggaagtgtagtcctcacagtacttttataggctggtgggaagaggattggatgttgacagcatgttcatggtcttcgagtggatcttctaggggttagagatttggagacctggccagagtgaaggggaggagggaggaagaggcaaaaaaggtggtggaggaagcggcgg

SEQ ID NO: 40698 - DNA, 1630 bp, Bovine  19866881318677
  misc_feature (1)..(1): n is a, c, g, or t
naaactttgactgtttggtactgacctcgggccactcacctgtatttataatctctgaagcacatttgatgagctttgagcttagaaatgagaagcttgagaattttcaggaagatgaagaaattgaccttgaaaaaaaaagcagatataaataagtgatggactctatgtggctatgactatcaaggtcaccctggaccctgccatcagatccttgtccatggaaatggaatggggctggttggcagtcagccagtcaggtagttaacagtcagggtaatcacctctctcccaaaggccatctcaactgagagcctggagaggattctaaagagtcacttatccttctggttctgggacacccaccacaatagccatctgagaaaggcagacagacatttacatgactatttttaattaaaattattgagggactttcctggtggtccagtggttaagaatccaccttgcaatgcatgggacacaggttcgatccctggtcggggaactaagacccccacatgacacaaggcattgccaaaaatttttttaaataaaaataagtaaaatagaaaagactttaaaatgcctctatgcaatggagaaagagcccatagagatggtggtcaggttacagttaacggaataaagtctctatagacattgagccaacacaatactgatgtccttgtctcaaaccacagattgaaacacaagctgaagaatccaacatgtacctgttattacttgtcttattggcctggggaaaatcgatactcaaagctaagagggcagggtttcaggcaagaggctatgtatccaatctgcaagccaacagggagaagggaaattcccagccaaggaatatttagtaacagaacacttaaaggcaaactaagtgtaaccaagtaatttatcccctttaatgggatatctgtttttcatcacaaagagaaaacgctgtgtccttggcttagtggcttgttgaacttgagcatttttcttacaaagtaagcctaacagggaaaggcacatatttcagggaattaatttcaaccaggactgtctcgtaggaaatgaaggttgtgatgaatgtgttgattcattgttctttgcgtcttccagagaccagacaagagaaaatgggcatcaaccactgacatggagtgaaacaccagcctagtggaccacagaacctccatccatccaggtgccccagaactcagggctcagcagtcacagtgggatggggcggtttctcatctgtacaccatctggaaaggggctgaaggagggctttttttttttttttaacaagtttctttttcttttggctgcactgcgtctccattactgtgtaccggctttcccaagtcacagtgagcgggggctactttgtgtcgtggtgcgcaggcttctcgtcgtcgcggtggcttccctctctcggggcacaggccccagggcacgtgggctcagtagctgcagctcccaggctctagagtgcaggcttccatagttatggcacacgggcttcactgctctgtggcatgtggactcttcccagatcagggattgaacctgcgtgccctgcattcgtgggcggattcttctccactctgccaccagggtc

SEQ ID NO: 40699 - DNA, 2050 bp, Bovine  19866881376320
  misc_feature (1)..(1): n is a, c, g, or t
ntgagatagataggtgcagaacctgaaagaagctttgaaatccaaagtttagtagaaacagccctgtaactttctgggggcactggaaataacagcacttattctgtccaattaccctttgatggtaggctttttattttggtttgtagatcaaagtctcttattggacttttaacctgaattgttaggaattctgcaaatataaacaatgaacaatttctacatcttgctcatgacttaaaatgtcagctgaggctaaagtttaagatctagttattagattagaaaaaaatgacagatagtcttgtaaatcaaagagcacatgtcacttacacatggcaactggactgcccaaatgctggaatggatgtgattacaaatcacaaagccacaggccttgagctttgaagatgcaaaaaaaaaaaaaagtgtgattctgacccctaattgaggacacctgggatatcctgaatatacaccagtgatgagggtttgatcgaactagtcaatgaacattgcaaattgcagtgtggccttgggtgcaccatagacgtgttgtttctccccacaacccttgatggaagtctgtgctaacagtggcaggaggaaatcactagaaaacagcagggcaagcagactttgatggtctctacttaccagactgaacttgtcctttgcaggccctgtgtctgccagcagctttgtcctggggttcatttttaaaatatctccagtggtggtgccaaggtagaaaaagctatcgtcattagccatctggggatgagagagacaaggaaacctgaagacctggtttgcccagttgatgcccaggagcccctgatcagggaggggatgagttttctctgaaccctatgaagacctccaaaagtccttgaggtgacttctgtctcctcagactcgaagatgggtaagaacaccttcaaggggagcagaatcagggccaaattcagaactgtatgaaacatcggactccaatcagcgtgaatttcactgaaatggacttgtgtctgctattagcatgcactccctgaggcatctccgaagggctcctagggtgaaggtgtgctcctccagagagaatatgtatttgctttatttcctatttcccaaagtctacattcataaaacgagtggagaatggggttatatgcatgaatatctgaatccacattaaagacacatgaataatccctctttgtggaggagactgcatttcaacaaggagtttcattgttagaaactttatttcttgtgcagaaataacatgagtggcaacaggaggtgctgtgggccttgagcacctcctggctaccctgcttcccaccaggtgaggcagattcctggggtctgatggcagttcaggtccactgaaacagattcccccagagctgtgtctaggcagcctgtccagcttcccacgggagctcctgaagtgagactctctcacctgtgcctccccaggcagtgccctccatgtccagggctcccctccccacccccagcccaaagaacatgtacttacacacatgcacacatacacacacacacacatacccctgtcttgctcagtacttttaacaaggacttgtactaatatttacataaaataacagagtaattcttactgagatgctcatgactattcttttcatctgtcctgtttggcactcagttggccagatctttctgtttgggagatccagttcccatactcgaattgtcccgctagagaaaagaaacaatcaactggagacccatttaataaatccttcatctcttctctgttttctgcagtcttttgaaggagaagctgaaaggaagagaactaggtatttttgaggatttgttatggcctggtggtctccccaagatacagttgtcatttggatgcccgaagtactagcatctgcaggctttctcatttgatttggtataatgaattcctgaagttggaattgtcacagagaatccagtatagatgggtaccaaaccagaaatcttattgaagagcagtaactttttctttctg

SEQ ID NO: 40700 - DNA, 2764 bp, Bovine  19866881376652
  misc_feature (1)..(1): n is a, c, g, or t
nctttttttgttctcactatgtggcatgtgggatcttagttccccaaccaggcagggattgaacctgtgccccctgcagtggaagcacagagtcttaaccactggactgactaccaaggaagtcccctcagcatgcttttacacttgtttatgcttttagtctgaaaaccgaaatttattgttaaagcgatccagcatcaatagaaattataaaaaaaaaaagaaaagaaaaaaattttaaatagcatacacaatttctagctaaattcagaggaacatagattcctggtgttcatgactgaaatacagcaagtttccatcaacacgaaagacagagaaagttccgggtgtaatacatacctaagttcccactcccaatttccggtcaagggcacttttgtttagaaagaaattttatttttgaacagggttgtacattgacaaggttcaaagttcaaaaaagtataaaagcagtatattcagagaaaaaccgtcgctctttgagctcctgtctcctatccacccctaacctagtttcagggcccaggaaggtggcaggggtaatataatcagtttctgtttaaacccgtccctgcaaaatcttctgttgctttgagtctgaagagaaggtggggataagtgtggggtgaggaagaaggagggccagctacagcgagagctgactttgtaaggcccagtctccagaattttgcagaaccgctcgttctccaagctgaaggccctaaagaaatttcatttcccctcctgccaagcctaaagaaagctttgctctcctcctttaagtgcagaattgtgcactggccggtttcttcttccctttacagcttcctccaggctcaatctgctccatctaaccaaaaagcgctctctgtctcaatccagtttaccagcatatcaacatctctttaaatagaatgcaaatttaaaagccactcctaaaaatattaaaatgatttctccatcccctgccttagcctatttataatgtcagccgatacatcatcccctgagtatatttctgctgcctgctatataaagtagaaccttcttttgttggcgtgtgcttggatgattccactgagctgaatcctgccccatgcttcgttctccaattccagattgcttactgggaagtgttcgacggctcagtcatcagagagttggacggttccttgtccggggctgtcaacggcatggacatcacagtggaaggggtgcattttgttacaggtcagtcctggaatcagagaagaaagccaagcttaacttatttaaatggaaacctggaattccctggccagggggcaactgcagtgaccccagaagggtctaaagggcaacgaggttagattcaggcctgtgcgctgcagcctatgtggctaggaaagaaaaatccagaagtcacatttcaatgagaagacacatttgcctacgagcctgaggggcacaaataaaagctaagcttccactgtttgctttttctttgtgatgggcagcaatgatatgtgctaagttacttcagtcgtgtctgactctttgcaaccccatggaccgtagcccaccaggctgctctgtccataggattctccagacaagaatactgaagtgggttgccatgccctcctccagggaatcttcccaacccagggattgaacccaggtctcctgcatagcaggcagattgttttctgtctgagctacccagacagaatatgtacacacaacttttcaaatattacacagcaagttaacagtattcccagagcaattttggtcttcagtgggatgaacatgcttccacgggcaattcaaggccccactccccagggttagagcctcactacccccaaggtggccctatgttgtttagctcctaagctgtgtctgactctttggcaacgacctggactgtaggctgccaggatcctctgcccatgggacttcccaggcaagaccactggagtgggttgccatttccttctccaggggatccatccagattagggatcgatcccacgtctcccgcattggcaagaggattctttacagctgacttaccagggaagaagcccaactggccctatataccacccaaattaactctacaactttttttttctccctctccaaatctgtcttaataaagcattccagtttccaaaactgacatacatgtgcctgagatccacattcttagacaagtaagctcctgatgattccaccttaaaattctctatcttctccatcttatattgataagcgtatcaccttatattgataagatatattctacctaactctaaaaggatatgctgagttttaatgtgcagatttgttttcaaaatctagtgcaaaatttccatttccttgttttctctgaactggtcaaagaccaggtactggagggtacaagaagtcgtgttaatattatccttaccctcacaggatgcactcagtagataaacaatctctaagacaaaatcaataccctttctcactcattccaagaagagcctgctatccgaggaacctgctccgtagagatgctagaacaggtcttttgtttacaaacttggcctcataactggagcagctctttcagatgatatcatttctccctttaatgaagctattattcacactgttcttcttagattttcctttttaagatcatatgataaaccaatgttcattttggaaaacagaaaagtagaaaagagagggaaataacattcacaactat

SEQ ID NO: 40701 - DNA, 1498 bp, Bovine  19866881387308
  misc_feature (1)..(1): n is a, c, g, or t
nactgatttcctttaattgactggtttgatctccttgcagtccaagggactctcaagagtcttcttcaacaccacagttcaaaaggatcaattcttcagagctcagctttctttatggttcaactctcacatccatacctgactacctaaaaaacccatagcctttgactagactgacctttgttggcaaagtaatgtctctgctttttaatatgctgtctagttttgcataggtttattttatttttaaagtatctttaaaagagcctaagtttttaattttgataaagtccaatttatcaacttttctctggtcacttcgtagccctctcagttattagccagactgtcttagtacaacagagtttgtgttttaagtgaccttattctacttagtttattggttttagttgctaagttgcatctgattccttgtgaccccatggactgtagcccactaggctcctctgtccatggaatttcaggcaagaatactagagtgggttatcatgccctcctccagaggatctacctgacccaggtatcaaacccatgtctcttatgtctccttcattaacaggtgggttctttaccactgagccacctaggaggccccattctacctaataacggcccccaaaagtagtgatgctggcaatttggatgtgccaaagagaagtcatgatgtgcttcctttaaatgaagagatgaaagctcttgagttaaaaaagaaagaaaaaatatcacatgctgaggttgctaagatctatgaaaagaaccaatcttctatctgtgaaattttagagaatcagtggtgcttgttgtcacacttcaaactgtacaagttatggccaccgtgcatgatgagtgcacagctacaacagaaatggtattaagtgtgtacagttttgaaagacactcacagacacacacacacacacaatatccttaaaaagcaccaattactatgcgtaaagacccccagtgtgttgttagttggaagaacataacacatctcattttccaaaaccccaaagggcagagacttactaacactagccttgtttgggcaaaaattcaaccctctactagaaatacaggtaaacatggccagaaattttgggaagtatttgatttcttagaaatatgatcatttgcagaggagaaggcaatgcctgtgtcctcactgctctaaagagagaacctttccttcctgtcttggaaagtttagcttttcaatcttggtttgcggtctcagttgcctgacctgagcccaaagcaagtggcaggcatttcacaccagctggtgagttcgtcatcaccacgtcccttcagagtcacctggggaacctccccatcagtatggacgccttgaccccaccacatccccactgactcagaatctgtggaaccattcaatatttatgaagtacccactgtatgtgaaggttctgtgcactttaccatcactgtgccagagggtggcagctgttcagat

SEQ ID NO: 40702 - DNA, 2145 bp, Bovine  19866881403577
  misc_feature (1)..(1): n is a, c, g, or t
ntggtgactctacatccccaactgttccccatctacccaccctgctccctccatctccatcactaccagtctccatcattcccagtgctgcctcccttcatcaccaaaacaactcatttctttctttctttgtttttttggccgcaggccacggcaggtgagatcagattccctatcagggatcaaactcgtgccaagtacagtggaagctcagattcttaaccactggacagccagggaagtcccaactagccaatttcttaaatggataattagaccacatgctgccttaaactttgaagtggtctcctatggcccttaggctacatacaacccatgctaccagattgcccgtccaactctccagcctcgcctctccccacccttcactacttggcagttctctgttccctgaacttgcatcatctccaccccagaccctttgctgctttttctgcctggaatatcctgtccccaagtatctgaatggccagcttcttgtcactcagctcgcagttcgaatgtcccccctgaaaataagcctcacctgatcattttatctaaggtcggctgcctccccaacctcccaagttatcatttcactcattgttatcacagattgttgcatattatgtgtgtattaagtcccttcccaggtggcgctagtggtaaagaacccgcctgccaatgcaggacacgtaagagatgtgggtttgatccctgggttgggaagatcccctggagaagggcatggcaacccacttcagtattcttgcctgaagaatcccatggacagagaagcctggccagctacagtccaaggatcacacggagttggacccaactgaagtgacttggcaggcacatatgtgtactatctaacacctcccccaatacatgctttcaaactgtgatgctagagaagactcttgagagtcccttggactgcaaggagatcaaaccagtcaatcctaaaggaaatcaaccctgaatattcactggaaggactgatactgaagctgaagctccaatattttggccacctgttgcaaagagctgactctttagaaaagaccttgatgctgggaaagactgagggcaggagaaggggatgacagaggacaagatggttaggtagcatcactgactcaatggacatgaatttgagcaaactccaggagagaatggaggacagaggaacccggggtgctacagtccatgtgggtcgcaaagagttggacatgacttagcatctgaacaacaacaaacccccaatagaatgttagttaataagaacagtggctggggtgtgttcacagctcaagtctcagtacctagaagggggcctggcagagtctatgtaagtttatattttttatatccttcattatgctgggaaatctagaactccaaataatgtgttaaactcagctctctggtaataaagaacaaatcagaaagatctcacccacttctcagcaatggcctggggagatcctaggccttcacattcatgttttatagaaccatcttcaccaatactcctccttcaagcaggatgggaggcccaggagccagcaagaaaggaaagaaatactgaaagttggaaacaacaggagtaagtgcttaactgtgattaataatgggggagacaagggagcttatggtttctgttgttttacaatctcagggtaaacctggcaatgtgaggctggttaccagcatacaagtttgctgaagccttaggcaacacattttaaacataccctattcttacctgtattgtgctttggaagtggctttgcacaaagctttggcccatagaaagtggagctgatggtgacagaaggttctcagaggtcttcctggcttcaggttgaagctgcaaagaaatgaggggaggaaacaaaattagccatgcctcccatcactccactgcatccagaccaacgagactccacctcctcctgggtccacagcatccctttctgggactagacctgcagaaccaggctttccatgttgcttaccataatcttctgctccttcgatccctggacctccccaattccctgagagagtgacagagaaaggaaagagacagaggtaatgtgtgttgtgtgtgtgtgtgtgtgtgtgtgtgtg

SEQ ID NO: 40703 - DNA, 915 bp, Bovine  19866881503778
  misc_feature (1)..(1): n is a, c, g, or t
naggctcagggattcactcagcagagttcaaagagggggaaccagaccaaccgaaggaccggcctgcagtgctggcctacaacacgtggaccaaggaactttcaaggataaggcaacccgggaagaagtcctcgtcctcttccttcctctgaaggtggtcaatgtgtaaggggcttaaagagaccacagaagtacagtcacagaaaggcatgctgaatggccacggggtgccaggggtcacacgttacgagcctgttcaagctgatgacgggtgtttgcctctgacacgctgtgcaaaacgcatggagagtctgcctttcagatgtgagctgtgagggcagatgctacaggtgtctgaggataatattaaaatgatgtcattaatgtctcctcctccactcccccgaaaaaaagtcgaagagacgatttcaggatgtcaggtttggctttgaaatatttgttggcttacatgaaaaaatggtctgtcagatatttcagaaatcatttcaaagcaaaatacaaaaagtggaattctgacacagtcccaaagaaacgatccagctttcccaccccggcctctcactcaacatgcaccctctctcacaccttggcaccttggcagggactgttcgcaccaattctgagccccctgccaacttctacagccggcaccccaacactggcttggggcctcagctcaaaaacattccctcccccagggacacctcctcccgtgtgcccaaggcggtctctgaaccactgtttctgggcggcttctgcatactgaacatgcgcattagagacattgacttaacacttggggaaattaatgactgactgggttcaggctctacctccctaaggccggaaaattctgagaggacagaccttgtgtttccatgtccgtgtctccaa

SEQ ID NO: 40704 - DNA, 1371 bp, Bovine  19866881604766
  misc_feature (1)..(1): n is a, c, g, or t
nttgaccctccctggcccctcctaccagggttgccctcctaattccaggcctgggatgttcaatctgcaaatatattttcgtcataaggcagcaggttttgaatctctgttattaaagtccaaacaaaacactgaagcccttccaaagtccctggagagggaaggcttgccgtctcccgctgtcctgcccaggagaggagctgctctcgccaagctgcggctttttgtgtttcacagcattttccagaattgtctttttccacccttcagaatcctgcttcaggatttgctctcctgctgtttacacagactctgtcctggggcggcttcttccccggcaggcctggggtcttcacccttggactgcggccgtgtggggattgctggggccaagggtcactttgccacatggtgggggcggctgagtcccccgcttattcaacaaatatttattgagagcttgtacgtatcccaggccctggggagagcagtggaaggggcagtggcccctgccttcagggagggaggcagacaaaaagcaaaccatgttgaaaaagtgtgagaccgcactgtgacacgtcctgggggtgggagaccagactgtctcaagatgggtttgtttttgggggcagccaaacatcagtcagtaaatgtgatacatagagtgagaaattaaaaaaaatttttttttaatagggtatgccaagaatacaagattggttttcttgtcatggctcctgaattatagcaaaaataataacaggtaacatttttaagagtttgttaggcttcatcttgttagcacctcaaaggattacatgctcttaccctatttaataaataaggtatatggggaaagagtccaaaaaagagtggtatatgtatagctgattcactttgctatatgcctgaaactaacacaacattgtaaatcaactatactctaacaacaacaacaacaataagtctggataataaaaaataaaataaatgaggactctgaggttcagagatgtgcagtcacaagcccaaggacacacagcttaagagtcaagaagccagtgtttggagttcctccatagcctacctgctgactgctgctccatcccatggccttgatccccatctgttttcccatctgtattttgagatagggcttcccaggtgggttcagtggtaaagaacctgcctaccagtgcaggagtctctggacctgtggggttcagtccctgggttgggaagatcccctggaggaggaaacggcaacccactccagtacacacacacccacacccacacccacacctacacccacacacacccccacccctatcggtcggtgcaccaggttgtatcctggggtcccaggca

SEQ ID NO: 40705 - DNA, 1700 bp, Bovine  19866881669698
  misc_feature (1)..(1): n is a, c, g, or t
ntaatggatgtcccatgctacctactgagtcctcttctttcagtagcaatcctgttaccccccagtagtgcattctcttctaaagaaagtctgccaactaggaaaggatgtcaattagtacttccttcctctactgtcttccaagataagtctagtgcagtaggatcattttttggcttcaaaactcagaccatggagacttgaacgccagctcaagcattaagacctgggacaggagacaatctctctaagctccagggattccgtctataaaagtgaggatagccctgttgtaaattgcatgtgaacagatcaccagggcatactaccctctcccgccccacctcccccatccagacttaatcccagcacactacactaccctttcctccccaaacaagcacatcacccatcaccacacccataacagctccaaaaattttaataaagaatttatagaaggtttcacactgagacaggttacaatgtaatttgtacaaagcagatcttccctttaaattaaatttttttttaaaagcgctgctttgtcatccgctactctttccccagaagcaccctcgggcttcgtggtcagcctcctggcccatcctggcccaggcagaatctctgcaggtcctctgccctgtcagacaggtgtcgggaagcctaaattcctgggagtcgaagagtattcatttaaaagagaagcagcagcagtatttcaccctgttcaattattccacgcaaagcttgacttagagagttcatggttccttgacttgtttccaagagtgaagatgagcgagcgctccgctctggtttggaatgcctccggtcgccgctgtgctcctcaaagggaaatgtcatgcctgtttatgccggctgttcacagttcagttactggaagcagaaagtcagcactgatactaacagcctccacagccaagttctcttatttagatttcggttatcagagctcccggtaggcttgtcattgggttggtttctccctcctgccagagaaacaagggtttgttttctgcctccagatcacttgcatttatttccattcctttcctggactttttttttttttctctctctctctctgaaacatcatttcaggcttttcgtcaatttgactaataatagtcaacttgattattgactagtgtgtgctacaaggaatacttccaacagggaagatgtattttgttgcaataggcttgaacacggctattggtggctattaatcacataacttctatctgcatggagtttatgggcttcccagatggcacagtggtaaagaatcagcctgccaaatgcaggggacacagagatgtgggttcagtccttgggtagggaagatcccctggagtaggaaatggcaacccgctccaatattctcacctggaaaattccacgaacagaggaggctggtgggctgcagtccatggggtcgcagagagtcagatatgactgaacacacacagcacatacagagtttatggagttaatgcaaggaggttagggaagccccatgttttcctagagtaatcattttattggcatcagtgtctgtacctctagtatttgagaaaattttttaaatcttaaagtatgataacctgtcccccctccccctttcctttcatttgctccctacagggtgaacctcacccatcagaactaaagaa

SEQ ID NO: 40706 - DNA, 1573 bp, Bovine  19866880538886
  misc_feature (1)..(1): n is a, c, g, or t
nggagcaggctgatgtaaaatgaagagtgaaacaccaagcaggcaaatcctgaggggcagagggtccatgatgttacaatttatagtcagagcagccatcattcttgctaaaagttattcatgtatgatgtatttttgaaacaggtctcctgacttctatgaagaagtgaaaattaagctccctgctaagcttacagtaaatcaccacctcctgttcaccttctatcatatcagctgtcagcagaagcaaggaaactcagtagaaagtctcctgggatattcagtgagttgttttcaactggcaaattcacactgtggttgctggtgcgtccagggtacctgcagagataagcaactattctcttcacttgtttttttcctgttagaagtagcagagcggagatgacttgacttagcaaatgacaatttcaggaatgaaaggtagtaggtgatcgatactgaaagaatactcatttataaaaaagcattacaatgtgcattatttccaaagtgtgtgtgtgtgtgtgtgtgtgtgtgtgtgcgtgcttcacatataaaaataactttttcctccaaggagaaagagttatttctttaaaatatataaaagataaactgaaccttaatgtttagacacacacaaacattagccttaaagaaaaaaatgctactagtttggctctgaaagcagtgaatcattgataataccatctcaggagctctcaaggaatttaaaatgcagagaacttgacagaaattactgcccaaaagagccctggtcaatatctaatcatcatttagttgcatttgattattgtgagctagacaaattgccagaattatctgctgtgataaataccattttattctttacatcatctgtttcagtggctgccaattctcttaaatgaacgtcttcaaactggatcctactgtctcccagttgccttggaaaagctgccacccaactactctatgcattctgcagaggtaaccagcaagctggccatcagctgtttcctgtccagccatggtcttggaccacctttccagacccacttcccatttctttatacatgaccaaggatgctcagtgcattttgggcagctgtcatctgtcagcacaggaggtcttcagagagcacattgttctgataggatgggagaaataactgactttacaacctcattcatttaaattattaccaattcagaatgtttgataaattcaaggcagcattgcaccttatattatctatagcagagggattttcagaatagtgtattttaaaagggaagcaaatacagtccactttgctaacagtcactctcagctcccttccttataaaaggttcccatgctagattctatcagtttctcctccgggtcagttgttacagtcctcaggtggatattggggctcttactcctctaaagataccagtgtcaacagtctttccctcctgtttcctgtgctgcctcttttgcccacacactcagctgcagtccattcgttcaaaggagcccagtgaatgctctgttctgcctgcaccagcaccagctctcatgctt

SEQ ID NO: 40707 - DNA, 1291 bp, Bovine  19866880601988
  misc_feature (1)..(1): n is a, c, g, or t
nttcttggtgtcctttgcagctagcgtgctagaacataatgtggttctggttgtatctagaggatcacttacaggagtccctgagttggaagtgagctacgtgaggcagcagcaaggggaggtgatttggcaagcacactggcagatgaacctggttcttctggggctgctcttgcagtttcaggcatccagttcccaatttcactggtgccaaagaatgggaagcagcaaccatggtgccttttttagaaccatactaagacagtggttttcaaagttcactgtacatcagaaccacctagaaaacttgttaaaagattgactgttggccctcattcccagagtttcttcagtgggtcttggaggaggtctgagaattttcattactaccaaatgtccaggtgatgttgatgccactggtctgggagcacactttgagaagcactcttttaagagctgactcctcatttctcctggatatattgggcctgtgtacaatttccaggcctgtgtggccttccaggagattcggtgactcattaacaccctttggtaaacccctttctgcgtaacccagcttgagtagactctgttgcctgcgactaagaacccggatccgtatgcttatcattttctgcagatctttccctctcctcagttgggatctccatgtcaattctctatccctggctctattatagaagtcacatgactcatgctgacacaaacccagtcctaccagatgtccttctgtttcacaatcatcatatctaaataaccccgccttgttctacagtgtcccccatcttccaccttctccaaaactaatcaaaccaaaactaatcaaaccctgttcttcaatgaagaacagggttaggtttattgcttaaaggcaaaaatgtcttgaatttagcactgaagtagccccagagaagaaaagtaatattacaaggaagtctttttatgtgccagagggaaaaaaagccagatgccagctgtctacctcatactaatttttttttttactatttgaacttctttttttcataaagcatcttaatgtgaaatataaaattaaaaaaaaacacaaacaagctaaaagagccctctctgaagagtataagagtggatatgattgataaaatggtatctcgctagacagatctatttaaaaatcagttaaaagatattatttacccaatgaaccataaggagtcagggggaaaaaaaatccaaacacaataatagtccctcaggtaaatgccccttcagacagtttttaaaatggtat

SEQ ID NO: 40708 - DNA, 1293 bp, Bovine  19866880675865
  misc_feature (1)..(1): n is a, c, g, or t
nagagatttggggttccctaactcaggtgtggaattattctaaaataaagctatgtacaatgaagactttacctagagcctgagacaggaaggcaggtgtgtgttcatgcatacatacacacacatgggaaggcagaagggaatggcactgcttggtaaaatcatccaagatcagcagatggaaagaagatgggctcttgagaaacttactgcaaatgataagaatgagagaaaattaaaatggagacacatattcaagtaaaatatagtggaatataatcctagacaaagtaaaagctcagcttgcaaacacctgatgaagcctggtgaaacaacctgtttagcatcagatctctgagggaaaagtacatctttcagagtgtttctgtggctgagcctggtgggctacagtccatggggtcacaaagagtaggacacgacttagcaactgagcacacacatgggactcctttaggaatgtaggacttacacggagatatgtttttgtatgtactatgcattttatgatgtttttaagtcatcagccttgtttaggtgaatgtattaaaatacacaaaaataaatgcagttaaatccatttgtactgccgtaggttacaaagagtaataggtcctaaattgttggccttgttatgtccctttgctctctggccccagcagtggcatagtcaaattgactggcaggaaaaagaaccatcctgtggaggagtcagaaggaaatttcaacactcgaatgattcgaggatcaaaggaaatctatggaagagaactgtagggaaccaagtgcttcaatggcagaaatcaaactcaccaagtttaagacaacaaagctaggttctcccaaaaggatggacaactttcgtttgcccagaacttgggagtagagaaccaaaacattctttgccaaatattctgcctcaagttgacaatacacattgggacacttcacagagctggtgccaacaaggtaatttgagcaccaatggtgaggaaccatttatctgagattctatcactatgcttatcctgagcaaaatcagagcatccctgacacagcagctatagttacatccctgacaagctatagttccctcctggaaatgcaagacggtggcccagaaggcaaagcctcagaaaggtataggagaagagagctcctcagtctatgggattttccaggcaagagtctgggaggtggggttgccatttccttttccagaggatcttcccaacccagggattgaacccaggtctcccacattgtaggcagatg

SEQ ID NO: 40709 - DNA, 1069 bp, Bovine  19866880728804
  misc_feature (1)..(1): n is a, c, g, or t
ntttaatccttacttgacccacgaagcctggttcaaagtgaatgggtgacttgcgcaaagttttttagctcatgagaggaactagcagttgaccccaggccacttggtttcctaatatgtttccagtttagaactagaagcctatattttaccttcctgtgactggtttgtcacactgtgggaagcctcgtgacctccacgttcctagggtacaaaaggcgagaagtaaatagttctattccccagagcattttctggaaatagatgatgctgttaaattagatgtcaagcatacattttatatggaagtacagatcagtttgcaaatgctggacttccttttatttttatttttgtctcaggaaatgctgaacttgcctcattagctcggagggactttaaataattcagagagcacattgtaccatacacttgttccaaacttattccgcttctagagacaaagaattgcagcatgttaaaatagcctttataatctgttggtttctcttgcctaggcattttatagtcaatgttttggtgcagaatttgtagaagtgataaaagactctgctcctgtggacaaaaccaagttggaccctaacaaggtatgggaatattgcaaaaaatagccatcaggctctgattccctttgttctacccccaaaacataagatgacctcctctgtctggactccacgtcatttcaatgcaaccagatttttgttttgttttgtttacggtttaacggttaagtcttaaaccatactcaatggcagggatcttaataggagccaccatttattaaagaccagctgtatgcctgacactgtattagaccctttacatacactgttgcatttcatcctcctacagctctttgatgtaaatattgttattcccattttacagatgagaaaagtaagatctagaataggtaagcaacttccaagatcatgcaagtgtcaaagccagtattcaaacttggggtctgtgatccttaaacttgcacttctaatcacttctttactgcccttctattaaaactttgaatcctcagtttaaagta

SEQ ID NO: 40710 - DNA, 933 bp, Bovine  19866880735163
  misc_feature (1)..(1): n is a, c, g, or t
ncaaagggattgtcagagctcagcaaggaacagaggtagattccacagagtgcaagcctccccacctgagggatccttaggtttgatctcctttgcaatatttcagattttccaagttcatctttcttagttttccaaaccttgaacttaacactactgaaattgcctgaatttgttctgtgaggctcttgctgttgtcagaatcctgtctggctctgtgttacctcccctttgtcattttccttctcaactactagcctcacacaatttcttccagcattgagcaataaggcagaaatctcattgcctgctctatcctgggttctggcaggtgaatttaggaacacatccattaatagatgggaaaagactcaaaacaaaaaataaacaggagaaatgtggaccaacataccagggaagacaacatggttgtacttgtcttcaaattaaaatttccagctatagccaatgccacattctgattaattgcactggtcccttcttgttcttcatctgagccattggcacgattttttccacctcgagcttctgcagctgcaatcaaaatattattgaccttactacatgatccagcaatcatgcttcctagtatttacccaaaggagttgaaaactgatgtccacacaaaaatctgcacacagatgcttacagcagctttattcataattgctacaacttggaagtaacctagatgtccttcaataggtgaatggataaaaaactgtggcatattcagacaataaaatattattcagtgctaaaaagaaatgagctattaagccatgaaaaatcatggaggaaacttaaatgcatattactaagtgaaagaagtccatctggaaaggcaaaactatggagacaggaaaaaagttcacccctccttttctcacttggtacccatacatctgttcc

SEQ ID NO: 40711 - DNA, 1078 bp, Bovine  19866880735426
  misc_feature (1)..(1): n is a, c, g, or t
naattaggactttggaagagcttctcttatttcccattctgattgactggtgccagaatgacctgtggaagagaatttgaaatgatcactatcatctatgcctaagtgttcactgaagcttagtagcctttggaattcagccttattacagcacagtcttagttggtctagattttggtgtgctgttttgcagtttacatttgtggtcatgttaatgagcgtgttcaactatattcaaagataatttggtccatggaagaaaggcagggtcctcagaatgtattaggtatagctattgaaaagcctttaggacatttatcagagccccttggaatcaccatatttttccatgggcctagaaggaaaggagaaacagaacgtcactgcctacccagagtccagaaatctcagaaatcttgcccatgtagattctgctcctctttgaagtttaaataaagttccaagaagaggaatcttggcacgaaaggagacattctgtaacccagctgtgtaggaacctttcagcgttactgcacagagctggcccagtgctcaatgaaaatttaaagggagctgacagatttatgtcagagcaatacccatttaaaccatttaaacaacaatatgaatcatgagcaaagtatggctcacatttcattgggaaaaaaggaaatgattgagcttgggtaaaggaaacactagacagttattgctgtctggctctacctcctccgattatctcctagctgactgcttcttgtttgttccaccattttttccctgactcagaactttgcaagagtaaagatgcaagtaaccatgtctctggcatctttggtgggaaaagcacaagactttaatgaggaatacctgagaagatccttgaggacaattttggcctacgcggaagaggacacagccatgcagaccactccttttcccatgcaggtagaccgaagaacatgctttgtctcatacgtgggtctggggtcagccagttttaaacctctgtgtgtgtgtacacacatacatatacatatatatatacacacacaaacatacatatatatgtgtgtgt

SEQ ID NO: 40712 - DNA, 1363 bp, Bovine  19866880739552
  misc_feature (1)..(1): n is a, c, g, or t
nctttgttaatagtgatgctttctaagacccttgacttcacattcctgaatgtctggctctaggtgagtgatcacaccatcatgattatctgggtcatgaagatttttttgtacaacacctaataaagatttgaatgaaaaggaggggcacatgaccctcactttaagatgactgtcagttggtcaagtcgtacaaaatggcatcaaacttctgttgaagtcagatttaatgctttcctttaccatcagatagcagcagccagactttcttggccagaaatgttgctgaaattccatactgcagcactttgatctctgggatgatatagccacaacatgtgattgtctagataattgtgcttccccttgaggttctaagagaagttaaaagaatcaatggcttattaattatactgttaatcttaaaaggaaagttgaatggataatattttaaaactggctagagaagatagataattactaggagaagataattacttattatatatactataactggtgcagatgggaggtttcatgcaaaataaagcagtttatcatttttgtttttttaataacttctactttcaaatgcaagtgtagcaacctttagggcacaaagcacagccttcctttcaaatgggacttttcataattctgtatctacacattgactgtctgtgtgtgatgagactggggggcatttcctttcttataagctacatagagggtttaacttagaattgattaccacagagaaagctgtcttggtgcctcattaaaaaatataatgaaagtaagtattttagcaaagcaaatatgatgagagaaaacagacttttctttccacatattatgagtttctgtaccattttgtaaccaatcttgactttttttacacactcattttttctgtcccataagaaaataaagaaatgaaagatttatgggtattaataaaataataatacttgttatactttttcctgccattcaagcttagtaccagctgtgccactcctaattaataaattctctttgcccatcttgaaaaatccatattgctgaacctggtctggggacccccaaaagttcattctagctcatttttctagtgctcatgttggaatatgttttaggtgtgtttaacaacccaagaaaaccccaaatcaaactgccttatacagtaagaaaatgttatctttttcataacttaagtccagagagcagcttttgaggttggttcagtagcccagtgatatcagaagcccagtctgttaatgtcatctcactgttattcaccgtctgctggtttatcctctgcttggtggcagaatggctgcagaagtgccgagcaccacat

SEQ ID NO: 40713 - DNA, 1130 bp, Bovine  19866880837686
  misc_feature (1)..(1): n is a, c, g, or t
ntcttacattcactatttctttgttcctactgaccttcaaacaaaatcaatatcttggattggttggtgcaggatttcaaacctggcctagcggcgcggtgctgttctgccgttgggtgagacgcggagggaagtagaaggccgcccgggtggggccaggcggacccgaaattaaaaaaaaaaaaaaaaaaatcaatatctttttttcccaagaatatcttaattcataaaatgtttttattttttaataaaaaatattaaagttaatatacccaaaggaaagtgcataaatcatgagtatacagcctgacgaacgatcataaagctgaccctaacaggtcagctacataaggctaggagcaagcttgctgtcgggggtgcccagcccctctcaggcctctccttcccctttctaatgggaacacccctcggacttccaacactcattcattcaactcggatttatcagccagggaccggaactcttcagtcctggcaggtgctacaaacccaagcaggaaagctgatcttatcaatcttcctgtcagagggctggcttttccggggagggacatatttcagacagggtttggtggcgtgtgttgggaggagaactctctgaactttctgagacccttattgatgtgttgcctttattacctatttaagcacattcagcatttcataacagagcagatggagtcagagccagaatctctttgctgcctgacacatgagaagtaagtggcccgccctgctggcatgagatcccggacagccagtattgagctgtccctggaacccctgggcaaagcagctcctgcccacctgcagctcaggggttttctcttcctccccttcatagtggttctagggctgggttaactggatctgagttggggaatggggaacaaatgtttttccccaggtataagaatgccatttggtcttaggagtattttttatgcagcttctattatctgaaagttagggatatggtgcccattcccttgcctatgaaatcaatagtcttgatggagaggcagaggacagctggtttcctaaaatgccagcccttcctcaaatgtcctcaaaattaggctacaccggatttgccttccagcttctct

SEQ ID NO: 40714 - DNA, 1381 bp, Bovine  19866880841215
  misc_feature (1)..(1): n is a, c, g, or t
nctggggcatggtgggattgtggtttccgaacccagaaggaggaaagggagctggtggagcccatgcctccaaaactggccagcctgggccttcggaactcaccaggtgccacctgcatggtgactctctcctgctcaagtcttctccgggtctccatcagtgtcttggtgacatgaaggttgtgctttgggagttgtggtgatggtggtggcagctgtcggctttctgggatggtaagaaaagtaggagaggtctccagaggggcaggtggctttgagattggggttgatgtaacttggcttcggcctaggaggaatctggggcactgcctgttgtcatcactgttggaggatgagagggattcagtagaagtccacacgccgtgctggccaggtgcagccctggagtctgggcatggcccagatggcttccgtctcttctggatgttcactttcttgatggtgtttcctttctgtatgtcatccacgtatttgaggaaatctaagtctagttggtaaccatagggggtctccacaaaatagggatctttttgttccctgtcttgttctccattcagaatatcatttgctttgcctaagagagaaagaggggagattattataatgtcattaacacatacaatgataaaaactagtatttgtgtatgttgtagcacggtaagcaaatatgatttaagagctgacaaatctatgttctaatcctgaatctacaacttaacaaatgggtgttaacaaacctctcagaacttcagttcacctctgagtaaaaatggaaatacaagtatttaaatcataaggctgttaaaaatgatttttaagagccaggcacatagtaagttcttaccaagtactttgagttttttaaagaatcattgaagacttgaaagcattttcaagtagataatttcattttctgtctacagtcttttgaagtatagcagtcactaagacggctattttataaagtgtactctgaggcagagaaagtgagaagtcttaaaataacggaacaagtcagtggagagccaggaagcctggacatgagtttgcccacctactgctcttttggaaactacacagtctttctaaaccatggctgaggtactgcagagcctgaccacccctacaagatcatcatttgcctagacactttccttgtagagaatgctggggcacatgggacagtgagtgactaactccagcagcaagggggcaagaacagtctgtggatagacttcaactatattctgtggcttcctatttaaaaacaaaacaacctctatcccaacagaggaggagaagttgtttttgttttttttcccccctttgacttcttctggacaaaacatccactatttta

SEQ ID NO: 40715 - DNA, 2032 bp, Bovine  19866880844710
  misc_feature (1)..(1): n is a, c, g, or t
nacagagagttgtacatgtctcccaggggtgattaaatgctgaggggaagttgaataactatagaattcattgggtgcaagtgcattccaatggcaggagcattctgtttgccggttataggacaggtttctaaaaagatacacacagcatccataagcaaacatcctcatctccctctagggaatggagaacagaaactactgcatcccaggaatgcttatctatctaggagcgagacttgggaatcagaactctcttacactgcgggcatgactgctaactgacacaactttggaaacaagcggtagggtaaataaaactgaaagtacatattactgtgatccaataattagggaacttttcatatacgtgcacagagacacaaagacaacaattctcactgcacagtgtttacaagagcccaacactgaaaaaaatatcaatacgaaaataggaaatagataaaaatatgacctctttacagaaaggaacactatatagtagtttaaaagaatgacgaaacaaaaacacacaaaactacgaaatgtcatttctagtggagaaaatgtacttattacaatattcttctctttgttaaaaaaaatcttctcaaaataaaagtatatgagcagcaatacttctggcagatggatgctgacaagctccctctgagcccccatgtgaaagacctccgagaaactgaagcaacctaaccttttggacctttactgccttagctccatgccatccaatatggtagccactagccacatgtaggtacttgaatttgaattcaaattaattaaagttaaatgaaatgataattttagttcctacactgcagtgggtacatttcaaatgctgaatggccacgtgtggctagtggctaccatatagaacatgtctatcgttcctctaaagtctactgacagagcggatcttgagctaaaaacctgtctttcagataacctgaactcttttagtcattactctttccccaatatatccttctgcccataagaaaaccaaggtaacgattaaggaggatttttttgtttgtttctagaaggaatatgcccactataattctatatttcaattatgactgaactaacattttcttgtggaaaaaaaaaaattgagataaatcatctttagaaagtgatccagccattatctgtaattttgtaagcatcatatttcatttccccaaaacttagcaagtaggaaaatagatcaaagaatgatgaaagtgttaccaaacaagactcaaaattgtagttcagtggatttccaagagcctttattcttacctgtacacagtatgagggacatatacttctcggattggaaattccagtatctctttgtgtgggcgtccccggttttcaggaaagggcctcactggcagcatttcaggagtcagacagcaattgatggtctctggagccagagatatctccagtttgagcaagcctaaatttggggagaaaataggtctgtcttagtgaagacatcatatacaaaggatcaagaaagactgctatactatatttcttttatgaaaatgaggataagttgtacaagtatgagaattttggcatgctcagattatttcctatagtttgagaaaaagcatgtcatgacgatttttgagatttggtttctagaacttaaaaaagcaagaaattgtaaaaatgagtaagaacattagaggatctctaaagtcccttctagaactactacaccataagtgcataattcagtaatttctcttcatcacaagcactaaaaattggtgattttcacagtgggttccctggtacccccagggagctgcagaagtgcctcaggggctgtcaggctgagaataagggagggtacaccctcaccttccaccaaggcacttcactgttttcttatgctaagagttccatacaatatgataaaagaggcttctctgttcacacagttatctgattttctgagtgagcaaatataaagcatgatgtttatttatttattaaacaa

SEQ ID NO: 40716 - DNA, 1468 bp, Bovine  19866880861467
  misc_feature (1)..(1): n is a, c, g, or t
ncttagaggcaaatgtttattcccctccttactggcatagcactgctggcatcctctccacacataaactggattttgattgtgatgttccgggcagatgctagtttgttagcaaagttcagcctctgtgggtagacatacagaaggtttctggaaaagaaaagatgaggagccaatcagtaagacctagagtctattttaaccaagttgttcaggggatgctgaagtctgcactcataaggtgactgttctgaaggagattttcctctcagaagtgaactacctttggagaataaatgcattattgttgattctttgtcttcaactgcagtgatctgataataaccaacactgttctctgttttgctacacagacagaggtgtctgctgcagctgagaaagtcctggaatgtggaaatctgcccagaggtaactatatgtctgatacaaagataagaaaacaaaaaggttccgctcattttaaaaagaaatcatggccacaggcaatggcctaatttcatttctcctttctaatcccacgtagcacttttctaaaaaagaatcttaattgggctgcaccaggctacatgcagtatcttagtttccagaccagggattgaacctgtgccccctggttcaagtggaagagcagtcttaaccactggacgaccagggaagtacccacagtttcaatttttttattgtcatgacatattacactggtttaactttcttttcttttataagatgacagttcatctaagcccaattagctatgtaacataataatacaacactatgaataatatactcatccattcaacaactataggacaaatactaggctgactataactttgtatattttttctttctatttgcattactactactataatccactaaaaagtaagctccatgagggcagagatttttatctgatgtttttgattcactgatgtattcccagcactacactggtgcctgggacatagtaggtgctaaaaaaattacttgttgaacaaaagaatgaatgtgtatacattcaattaatcatattcctgactttaagcaacaacagcagtactaatatttataagtatcattaatatttatccacagactggtttcaaataggaaaaggagtatgtcaagcatgtatattgtcaccctgcttatttaagttatatgcagagtacatcatgagaaacgctgggctagaagaagcacaagctggaatcaagattgccagaagaaatatcaataacctcagatatgcagatgacaccacccttatggcagaaagtgaagaggaactaaaaagcctcttgatgaaagtgaaagaggagagtgaaaaagttgaaagctcaacattcagaaaactaagaacatggcatctggtcccatcacttcatgggaaatagatggggaaacagggaaacagtgtcagactttatttttttgggct

SEQ ID NO: 40717 - DNA, 1974 bp, Bovine  19866881148128
  misc_feature (1)..(1): n is a, c, g, or t
ntccctcattggatacagttgacttgctgcttcctgggatgaggccacagcataggcgggaatgaataatttttaaattatgaagcaatttctttgttacaaacctgggtgcagacaatgtaaattctaatcatttcttttccccagtatagcgccctttgaacttggaaagggcattcatttttccctccttctacccttagtgggcagagagtcaggcatgtctcatccttggaggtcactggtgtttttcctgctcttacaaaggcataatcccctgagactccttcctgccatcctgaagtctcactaaagacctgtattgtatttaaaatggtaaaattctccccagggtgaattagccctttctacagccctcttttacactgcctccaacctgggttatctgtttctgctcatttcaccaaggtctgcgcctctcaggagataagggtttttccctttgaactgtctatggttttgagctgagccagcctaatgaatcaatgggatttgatttcaggggcatcaggaaaccgtttccttcctgttaattcaatcgcttcctccattgtctttgatgtggcctaaaatgccactgttagggatcttatcccttgtctttgttccctggtaaagcatatattcttgtggggaagtttaacactttaggcagtaacagttttttagagttgagttgagcttaaatacatccatagaatcctatcctgagaggaagccgtgtaaggcagagaggagtggagtgaggagactaagcccagctctggtggggcaggggccacactgaacagacccagagagcagacaccccttagccttcccacttgactagtatggtttgaaatagctacatatttaacatactttatacattataatatataatattataatatatagtaatataaaactaattcatactaatatattataatgctaatactattataatactaatatttatactaatacataatatactaatatatatttcaaaccatactaataaattctctatttatatatatattccaagatgcttcatattaaaaaattattcctgatcataaagcattaatgtgaaaatattaaaacactcataatcctacagttctgatgtacctagtctttttttgtattttcatatagtcagtatcatactttatataaaattattctttattctgtctttttcaattaacattatgttgtgtacattttctcctggtggatttttcacggctgcatagtattccatttatttaaccagtttcccatcaatctttgctgttagcaacgataatagccaacattcgtaaaatgttctaggtcctcttctaaattaaaccaacacattcaattcctcttcacaagaagagcccactaaggaggtacaggttttactagcagccactgagaggtagtaacagatccaagactcaaaccccactgttttgcctccagggtctggactgtcagtatttctgtagaaatctgatctgcggggtcgcaaaagagtcagaaatgacttagcgactaaccaacaataaatctgatcattttattattaggataggttgcctaggagtattactttctgtaaaaatgactcatttggcaacgaatttttattttcgttccttccttgatgtttacattttgcctcctgtggacgactgccctcaggcggagggacctgagaaagaaaggttagtctgcgcaggcgccctgaagtccttgaataactgcacctctaagatttgtgaaagcacgcttagatcaggcgcatcctgggcctggcctccctgttccccgagttgccttggatatgaagcggattatcagtatcactcctgtgggctgctgtttttaccgtgggtttgggagtcaatgacaggatgcctccccagccctgtatctcctgagaacagtgtgtgtactgggacgctggca

SEQ ID NO: 40718 - DNA, 1220 bp, Bovine  19866881277012
  misc_feature (1)..(1): n is a, c, g, or t
nttgaaaaaattatttgtaatgtacttatatgatcctgtatacatttcccgagagatctggctcttctctaggagggaaatttaattcatggctctctttcatttatgaatttaaattaacataatgaaaattattttaattttagtaggaaaacctagagattataatccagatggaagaaagaaatacagataacatctatgaaatactttgttataaaatttgttaaaatataaagttactttatacaaatatgagtctttttcattctacctattaatatatttgtctttttaaaacactatgtgtatctgtagatattatgtcttctgataacaaagatcgtggagagtatagttacttctgaagtatgcagagtagtccatccccaagttagcaattcacttctacaggcctctcatctgccaaggttacaaaactgggccttgaaactgatttcattttacacatgggtggtagctcataattgttagttaaggggcaataaaaaaataataaggggtgatgtagatttctcaggattcaaagactatatacctccccttcctacctcttccctgaaacctttgatatacaaccttgggtatactacaatttgcttcaattaatgtcagacttaaaaaataggtgaaaatccagttgcagaaagcttctagggtgcatcgaatcaaacttttcttctaaagcagcctgattccatgatgaagctgtgtccataggtttaatgttgcttaggccaggtggctttcccctgccccacagctacatgccacctgattactttgtcatcctgaacatgtgttcagtgctaatagggaggatttgatagcaaggcctgggtatccttgttgttgctgttcagttgctaagtcatgtcccattgtttgttaccccatagactgtagccctccagcctcctctgttcatgggatttcccaggcaagaatactggagtggtttccatttctttctccaggggatcttccctaccagggattgaacccacatctcctgcatttgcagggaagttctttaccactgagtcaccagggaggcccaggtatccccagttacactacccaaatcaagcaccactattaggaaaacagtttaaatcatgttgatcatgggaatccaatgcacctgaatcatactaatcattgttgtagttcagtcactaagtcatgtccaactcttg

SEQ ID NO: 40719 - DNA, 914 bp, Bovine  19866881310749
  misc_feature (1)..(1): n is a, c, g, or t
nctgtggatgcagtctgagactaggaaatggccttctcaggggcaagctattgacccatctaattacatcagcattatttctgtccccgtaccattctccaggcctctgttttcatgaatatggaaccagctctttctaatggaacaaactgtaaatcctagtgtgtggactgatggaaaaactgtgggttgagcacaaaatgctcttcctatctttatcaagctcaatgactgtcacctattttcacatcaaaaacagtatccactaaagccggaggttagtgaatgggcaaaatcttactgtactgacttcttatgatataagtgggatcttaaagtctaaagttcagagcaataatgctccacctttaaagctgctgtaactcaagaggtgttgatagatctaggaatagaatatcacttacactgttctggagaccccaatcttcgggaaaggtagaaaaaagttaatgacataattaaaagacacccgtgtaagctaactcaggaaacacaagacagttggtttatagttctatccatagcttccctggtggctcagatgataaagcgttattctgatgtccaccagggtcatgggtcggacagtgactccatgttatccccattactgggagaacagtaggtgatctgcctcttcttcctgcaacacttgtcttgacaacatataacttagacatgccaggtacatactgtatgaatctagaataattgaactcttccattgtgctagatatatgacataattgcccatactgctaaattaaatgagtcaaatgaataaacataaatcaggattctgaatccaattaggtaaaatattctaatttgcatgttatgggaattgaccttactctgggatgttttggtgtcagaagctttgcggatttctt

SEQ ID NO: 40720 - DNA, 1017 bp, Bovine  19866881345892
  misc_feature (1)..(1): n is a, c, g, or t
nggtgaaggttaaattcatccttaggatttcatgttaaatttctgcagcttcttcaccttaagggactgctttttcattttccatctgacaaattcattgactatcactgcttttataccttgtcctatttctaaatacctttggagaaggaaatggcacccacttgcagttaagtctagaaacccagtttaacattactggaaactaaagtaccgagtcagtaaggaacttggccaggttagcagaactcttcgttcagtgacaattatctgagacttactaaaagattccttagtttgcctattgtttttataggtaataagcttggaccaggcacaatactagcaaatggaatgctggggactgacagctaacagccccacaggccaaaaaccaccatgcatgtcaggtcaaccttccatatgaaatgaggatggagacatggctgacaggcagagtaataaggcaacctaattacactcagtctggagtagcaaaacgagcacatacaggacagagaggacctattttagagaaaaataattgtgaataattcaaagaaacaacgaaagtgcattattcttctacggactcatggaattaacatttctgtgaagaatgatcttatgtatgggcttctttctctttgctcagccacaattcccagaaaagtgggaaagactacacatctgatttctgctggtaggtctagaagatgaaatcaaacagacactcaggtcacagacttgcagccgaaagcatgttcttcccttagtgtaccagaactgtctccactggccctcctggcttttcaagcctagtcatcactccagggcctggagtatacaattcctcttttatctagaaggattcttcagtgacctttaaacccaggaaagctcaggcctgctggttccagctacctcttgatagggtcaaggggggatggaaatcacttaacattacctgatacaggagactgaactttgtcaaccagctactatagtaaaccaaca

SEQ ID NO: 40721 - DNA, 1292 bp, Bovine  19866881355977
  misc_feature (1)..(1): n is a, c, g, or t
ngactgcctgcctcagcacaagaatggaaggggactctgggaatgagtcacaattgttcctcagtcacctctgtgctccgagggctaggctgcaatgtcttgtataaacgctggtattgtattctggacactggggacctctaccctctcacctccacaaaaagcaaatgcagttaagaagccagagacaaaatgttaccatattgtttagaaacactacaatgatccaacatgctctctccacactcgtcatgttaaattagtacactcaaaaacagacttcgaatgagagagagagaaacagaaaacaacagcaaactctaggacttgtcattacactactgttaaagacttacggcaggggcggggaggaactgtcgacactttctcatggatggactacaatttgaacatcaaatatgaggtctttgtatagaatacctattataactacaaagaatccgtctttgaacttgaactaactaaatgttcacagctcctgtatttcagactaccttttctattacatcaatcctcatcccttctttttttcccccatcccttcttttatgagatagattaaaagttgctctttagtgagagcttggtaagccagtattcttataaaataaagcaggacctcaagctgggacaaagagaatgctaccttttagaaagagttaaaagcatctgagctctccataaaacccacttacttgttgagaaaaagttcagttggttttcaatcacaaaagacctaaagggaaagttgggatatttatggtcttaggttttatctagatgaggttcccaatgaaaagaatcacaaatacccaagcatttgaaacatgctggagaaaactgactgctttaagaacaaaatatatctccctccaactttgcttgaaacgtttttttaaagatattttgtctagctgaaattttaccagttaagatatccacattaccaaatactttttttgaaactctgcttagcagattgaacatattatgtggtttatatatcattcactctcactttagtatgaattagtttactcagttcctgctcttcttacaaaaaggttagatttatggactgtagtgtgagtggagaaaggaaataaaaaggacgacaggagatttctcttgggggtccggttcaggctccttgcttctgatgcagagggcatgagtttgatccctggctggggaactataaccccatatgtgtcacacacacacacacacacacacaaaggattcagttcagttcagttgctcagtcgtgt

SEQ ID NO: 40722 - DNA, 978 bp, Bovine  19866881357016
  misc_feature (1)..(1): n is a, c, g, or t
nttctccccccctgattttgcttttcagatgcggggaagccgtagagaaaaacaaacgtctcatcacggcagatcagagggagtatcagcaggaactcaagaagaactacaacaagctgagagagaacctccggccaatgatcgagcggaaaattccggaactctacaagccaatattcagagttgacagtcaaaagaggtaagaagaaggcagggcagggtaaaggacagtcagaactgcagagcccctgggggtgggcgcgggtcctggaatcagagaagctgcccgagcgtgatctgtctgccctgctggcgtcccgatcctcctgcgccttctccttgacctctcggggcccctccgtgtggccttctgccagcatcttcccagggcctaattattgcctgggtttctcctggcatagtgcagaggcatggccgcacttccccttgcttacttatttactgagttccccatgacagatgtccttttctagtgaatgattttccccctccctctctttaaaaggctaactgatctttctttcctctgttctcttccctccttaatttcagagactccttccacagatctagtttcaggaaatgtgaaacccagttgtcacagggcagctaagaaaaactatcctcacccaggaagactggaggctctgtgaccctggagaaggacccgctggtgcctaaaacaggatatttgccacacaggacacaccacacactccctgagcggatgtactctgaaagctttgggacccaagtgaccgtgggagttatacgcaaatagggtgcgaccagacttcagacatttggcagatggagatgctggaggctggttcatcaggggtgcctgtgttatttgttaaggcgtgctttttcacataattgtacaaaacaaggcataaataacatctcctgctgagtggtcaggcactgcctagccaagggatgacttcctcccat

SEQ ID NO: 40723 - DNA, 939 bp, Bovine  19866880621057
  misc_feature (1)..(1): n is a, c, g, or t
naatcccatggggttgctaagagtcggacacgactgagcgacttcactttcacttttcactttcatgcattggagaaggaaatggcagcccactcccagtgttcttgcctggagaatcccagggatgggggggcctggtgggctgccgtctatggggtcgcacagagtcggacacaactgaagcgacttagcatagcatagcatagcatagggatacttaaatttcatctagaatgaacatttataagaaagcctttccttgctccctgcagattcaacactaagaagtagccaaaagctgaggtctcgtgtgcttgaaacctgggccaaacaggagttccaggacctagaagacccctcccctcagcctctgaaaactgggcctctgagtatcctgagaaacagtgtaacactcatttttgtgtttctccggttcttttggtctcaccttgatttgctttagcaggctacagaatccagccactcagttaatgagagggaattgttatgatttaaagacttttgggcaaggaagaggggggcatgaggagatgacagatgaaagaagtgccttctaattggttacctttagaggtgtttccatgggcctcacctagggctatagttaggatcaaatggaaagatgggatcattaactcagccctggaatgcagtctagcagcactgatgagatgattgctaccctctccattcctctgggctggctgctcacagagggtttgtgttgttagaagtggtgagcattttgtgaatttctgcagtgttcctaccacttctgttttcttgatagttttaactacctttccctctttatgggggaaacaaaacaaacaaacaaaaacggacctttttcttttatggtgcctctaatctcagattagtttttggactttaaagatttccttcccaggccatatg

SEQ ID NO: 40724 - DNA, 1559 bp, Bovine  19866880834461
  misc_feature (1)..(1): n is a, c, g, or t
ngtgtggcttgggacacagcacagcacctctctgagcttcaggtgccttatctgtgtgatagccatcttatctacctcatctacctattaatctgtgaagattaatgaagacagtgaccgtgacggtacctgccccagcgcttggcagtatcagccattcagtcctcctcccagcccagtgcttagctgtgaacatgtgagaaagagctgtatcaagcttcagcccgattaatggaactgtttgtatggtatggcctgtgagtgtgtgccctgtcgtctgggtataagacccctgtgactgccctcaggtaacacttgccaggctgggaagacagttccaaccctgcccgttggctgtggtacagagtgatgcttggtctgataacccagagacgccaagcccagggccttccctgggctgctgaacacagactccccccaaaaactaaatgagcaaagctgacatcgtgtggcccatctctcgtcaagatggattgggatgctttgtctagacagaagtctcccttgggaaatcacagttgctctaagagaaggcacatggtctcctgttaggaatataaaacaggcctgtgagctgttgatgggggaaggaggggggctgccgtgaggtatgtgggcctgtggaacagagcctgaagaaaggagctgtcgggttctacaggcactggtgtcacaggtacaccgtcgaggtggtggccttctccttcatatgcgaagtgtcaacagagcccacagtccgtgggaagcaaccctgttagccttcccagagtcacgattctgaggagcgcttggaagaactgaaaggtaatccttgaatgtaaattacctgttgaaaagtaggcagttgtctctttgcagctcgttgcttagtgtgatggtgtctgtggttcccctctgtaggctttgtgtgtgtgtgcgtgtgtgtgtgtgtattagtcattcagtcatgtccaactctttgggaccccatggactgcagcactccaggttcctctgtccatggaattctccaggcaagactactggagtgggttgccatttcctcctctaggggatcttcccaacccagggattgaacccaggtctcctgcatcacaggcagattctttaccatctgagccaccagggaagcctgcaggctgttaaggtgagtgttttattaatacatggaagagtgaggtggctccagaaatagacagatttgggttcaaatcctggcagtgtcatgactttggccaagttacttagcatctagtgttagtttcctcatcaaaaagggagataataaagacttttatctggttgctgtgaggattcgatgttatcgtgtgtataaaaagcttagcttacttccaggcacaaagctgatattcagtaaatgatcctttgtattaaacaggacaaatcaggatgttgagtttatttctgatgaacctcacccatattgatctttgagtcttagttccccccacttgccagctgtgtgccttggacaagctatctaacctctcccagtcagtatttttatgtgttaaatg

SEQ ID NO: 40725 - DNA, 1808 bp, Bovine  19866880936100
  misc_feature (1)..(1): n is a, c, g, or t
ntaagcgtcttttaatttctggctgcagtcaccatctgaggactgtaaaaggagtctaatctgctcacaattacagctcaggacatactgcagggagtgccctccgcttcggtcatcagctacaatggactaagcatatttcttagtttttagaaatgtatgtaattgtaccggatccttccttcccaaggataattatctctcaaaattgagttactgcttatgaaaatacctcgattcttagtgagaaggggactcaaatggttttgtacttgaggcagatgaagtatgcagtgtggaatgctaaatttcctctccaagggagagcagcttcatgttttactagatgcgtctgcttttcctcattattcccctgttagtcaaaaaggctgccttgagctaatttctttctaaatgaaatctttctaatcagattttccactctatatggatttcatatgaaaatgatccttatcttgaaaattaaaaatattttctcctgtatttcagtgtgcggtggagataacagcctagaaggccttaaagcaaaagacagagtgacagctgattcatttgaatttgttacagcagattatgtatttgacatgccatgggtaaaaagagacaggggacaggggtcttgaactaaaagctcaggatttgaggtcaggtttgaagttcctatctcagtggtaccactattagcctagttaccttaggtaagttctttaacctctctgagcttcagtttcctctttttaaaagtgagggtgatgtcatcaatctcgcagggccattgtgaagactaaggagaaataagaggggctaatgtttaatgagcacttactgtgtgcctggtaatgtgctaagtccattatatgaatcctcttctttagctatcacaacagccttattaggtgagttcaatcatggtcttcattttacaggttaagaagttgaggtttaggttaattaacttataaatttacacagaaactgtggtcggcaatagggcttgataatgtggatctgtttaattcccaaacttcatactttttctgaaccactatgctacccgttctgaaagtttgtatttatatctttgtttacatctatgatgggtttcctgggtggctcagtagtaaacaatctgcctgtaatgcagaagccacaggagcctcaggcttgatccctgggttgggaagatccactggaggaggaaatggcagcccactccagtattcttgcctgagaatcctatggacagaggagcctgttgtgctacagtccatagggtggcaaagatctggacgtgactgacgcgactgagcatacacttagcccacacatctatgatatgtatacacattcctatacccatttttatgtctcagatataactgtctcatgtcatctgtctacctatcatatctggcacacaagtcatacagaagctagtacagtgcatgctcaaagctatgttggtaaatgtgataagaattcagagaaggaagatcacactggactttgatggtcaatagtgcttcaagaaagagatgaaactaaacccgagcttgaaggatgttgtgaccagcgtgctgctcactctatcatccattcttcccttcctcctcagtaacagaacgccctgttgaaggatatggttacagcctcccttgcagctatagggctgcagctagatgtgactaagtttggccagggacatgtaaatgaacatgtcatatagtaattccaggaagtcttttaatgggagaagtgcattactttttaatcctttcctccattat

SEQ ID NO: 40726 - DNA, 2552 bp, Bovine  19866880996289
  misc_feature (1)..(1): n is a, c, g, or t
ntgccacattagcaaaatgttgattctggtacactggaaagttcttgggaggattaaaaactatagtgtctgtgtgtgtgtgtgttagtggctcagtcgtgtccaactctttgagactgcatggactgtaacccaccagactcctctgtccatgcaattctccaggcaagaatcctggagtgggcagccattcccttctccaacagtgtccatgaaagggccttaaaaaccgcaaaatcccttgcagactgcaggtatgcaaagttctttttgctgcaggtttgacagaaggcctagatctttaattttgcatctgaatgatttgtcttttcctcttttttaaactacctaccaaaaatagaaatcacctaataaaggctgactgagtgactgacgttaggaaatcacaggagttgataaaagagcaattgaatattctcagagaaggtggcatctcatttgaaattctaagtgaggctgagcaaggaacacacaattcttgaaggatttctgaagtttaattggtctgtctgaaggtgactagagctataaagagaaaaaccaaaggaaaactgagaaaggtgaggtgtcatcattggcttcaagtgattcagatgaaacatgtaatttaatgatttaacagtttcctgcctctttcccctcttttccatcctcccgcccaacattttaagaatctgaccttcagggacagagggataattacaaagagtatgatggcaggtgtccttttaaaaaatagacgttttcctggtatagcatgtgtaattgaatttttatagattgaacactccaaattaagttatatttaaataccctcagagagctgactctaggaaaattgaaatagaaacatttgtataataatagataacaatgatcaagttagctactgaacatgagaccctttgtgtacactatcctaattctgcaataacacgcaggataggaaatatttccattttacagatgatggaatggaagcatggagtaagaaatttgtccttggccacagagacagtaagtgataaaacaaaatttaaactggtttcgagaccagtctactacaccacagttgccttgagatgagaaaagttttgaaaattttcaaagtgattcttctctgaattttcacagaaaataactgattttttttggcacctaggtgacttggaattttccacgagcttccttccagtcagtcctcctgaagctcattcccttgtctactcaccaaagtgcatctctgaatgtgggtcagcaggctctctcagcaactgctgctgttgctgctgctgctgctgctgctgtcgcttcagttgtgtccaactctgtgcgaccccagagatggcagcccaccaggctcccccatccctgggattctccaggcaagaacactggagtgggttgccatttccttctccaatgcatgaaagtgaaaagtgaaagtgaagtcgctcagtcgtgtccgactctgtgcgaccccatggattgcagcccaccaggctcttccatccatgggattttccaggcaagagtactggagtggggtgccattgccttctccgtctcagtgactaggcgaatatatcacctcctcacttactcttattggcttctcactgcctataggattgtgtcaattttgattctagtcaaagccctgttaagtaacaagattataccccaggtggagtcactcctgctcagccccatgccagcaaaccaagatttaactcattttctatgcaaagtgctcccagagaaggaaggaaggaaggtctaggtcagccagtcagtacttgcctgctcagcacgttacctaagcagactccaggactgccctgtgcttcatataaggaaggttaccctgctttaacctattagcagataactttctgttcctgctctttggtctataaaaatctcttgccctgtaaagctctttcaagctcctttctatcagctagatgggatgctccctgattcataaattgtcaataaaacccataggatgtttaaaatggactcagttgaattttgctccgtaacagtctttaggatctcccctgacctagctctctagtcttgcctcttctgctgctgctgctgctaagtcgcttcagttcagttcagttcagtcgcttcagtcatgtccaactctgtgtgaccccatagacggcagcccaccagattttccagacaagagtactggagtggggtgccattgccttctccatgcctcttctacttccctataaagctctaactgtggtttccaaagtgctctagccttggtctcacctttgcctggagtgatttcttcctcgtcagtctggtaaactcctcttaagccttacctcaaggattcaggtctaaaaccaccttctctggggaagcctgtgtgaccttgccacacagaagctccttcccttctgtgacacttggctgagtgctcatgtctttcctggggtcttactgtgtccccactagaaaataaacaacttgaggaagacaggtactgaggtcttcgg

SEQ ID NO: 40727 - DNA, 945 bp, Bovine  19866881253902
  misc_feature (1)..(1): n is a, c, g, or t
ncctggactgtggttggactcagcggccaggagttttctggttttcattaaaattctctggctgtctttcgggactgctcccgttggctatgactctgcactagggctggttgtactgttctctcttcagctacacacacccatcaaatctcagcggcccggaggatgagagaaaattgcaggtggggaataggctggctaaggggtcttgctcggcagtctttgtgataagggatccccatctgcagtgtcagaacttgacctttgcaaagtctttaagtactgatggggaggtagacaaaggtcagctgggaatgagtggctgagagaatcctcttggagcttactcctgaagacaaacttgcccttgagagcagataaatgtttcttggcagctgtcagaggatccccaagtgcttaatgaataaaatcagcctggtcaaatcccttttctaaggtgctgataccctcatatgccccagggattggggttgaatggcacttctctgagggtgagagatggcgtgagagtaaagaagattctggtcttgaatgttattttctggcagttgaagaaatcttatttgaggttgaaacttaaatctgaaaacctaggttcagcctagcaaactaagttgctaattgagttgctttgtgaccttgaataagtgacttccctgggtctcagcttcccagtgaggttgtgaggattaaatgagaaaactctgttaagctcttggcatatcgtatgttctcagtagatggtagatgctgagataaatttggctagttttgacctgtcactcggctcaccaagatatatcccaggtctgtcatctaaaatctttgttctgcatctgtctcagctctgtgtcttttaagaattcaaggtaaatgtgtttcctagggcaagcggatttcctttcatggaaaaatacttcaaaa

SEQ ID NO: 40728 - DNA, 848 bp, Bovine  19866881343265
  misc_feature (1)..(1): n is a, c, g, or t
nccttgcagacacggctctagaggaagaatatgcttcagggccggcctcctgtgagcacatgggctgtttcctgtctaaactaggttgctgttcaactctgtcttgcagtgagagcttttaagaaaatcgtagaattgagacacctccttgaaattgctgagagcaactataaacatttgggaggaataacagaagaagatataaagcagaagaaagaacagctcgagtctgcaaagtaatgtcctcaaaactctagtaatttgtttttacttacctttctacatgtcacgtgagggtttgttgctgaagaacttgttttttcatcccaccaaagggtttgagtttccaacctgttttcctcttaaactctcagatggagaaggtgttaagattttttaaaaattgtggtaaaatatgcgtaacatagaatatgtcaccttaaccgtttttaaggtagaattcagtcatgttatgtacattgacattttcacacaaccgttctccagaactttctatcttgcaaaactaaaacataaggaggagttgttgtttttgagacagctctgcgcgattttcagccaacacagtctctagccatccctgtcatattggacttcctgttcacaagtgtgtgacccagtcctgtgttcatggatggtggtgccccccagaatgctcgcaagcctggaggcagtgagggccccctcgcctttcacttcctgaacccaaggtcggctctcggcacatctggcccctctctagttgatgaacagctgctgagacagagggtgtcaagtgcttactcctcccactgctgctactgctagtctgtctcctttacacagtg

SEQ ID NO: 40729 - DNA, 735 bp, Bovine  19866881419079
  misc_feature (1)..(1): n is a, c, g, or t
nttatacaatgctgttttcactgaacatatcttgagcatttctcttttcagtaaatattcttttaagttataccattttcatgactaaaatactctacttatggacaggttttatatttaaataatgacttgtaatggttgataacagtgatattgtcttgattaggtaatctattatgagtgttgttaacattctcctttcaagagggatccacgtttctcaccatgagcttccaagtccaggaccaatgcatgtgtatcaaaagttaactccctttgttctaaaggagttatgtccactcgcctcatatcatatccttccttggttttggtggtgaagaagtctgaaaggagaattatttttctgtagttaacagaagcatcacactctagcttctaaagcatttcccccataaacctataatatagttccagctcttctgctcaggaattctgtaatttcaagcaagataactcctgagtccattgttcttttatctgaaaaaagtctccaacattattctgtacctagaaaacaatcaataaatgttttcttttagtattctgaaattttaagagtcagtttaagtaatataatatatatcaaggactttggatattactgccacaaaactgcccaactctcctcagaagtctttcatagagctataataattgtttatacatatgcccccatactaaagtagttttctatcctcccactgttaaacatcc

SEQ ID NO: 40730 - DNA, 2218 bp, Bovine  19866880350646
  misc_feature (1)..(1): n is a, c, g, or t
ncttacctgcctccttagaaatctgtatgcaggtcaagaagcaacagttagaactggacatggaacaacagactggttccaaattgggaaaggagtatgtcaaggctgcttgtttattttacttatatgcagagtacatcatgtgaaatgcccagctggatgaagcataagcaggaatcaagattgccaggagaaatatcagtaacctcatatgcagatgataccacccttatggcagagagcaaagaagaactaaagagcctcttgatgaaagtgaaagaggagagtgaaaagttggctaaaaattcaaccttcagaaaactaagatcatggcatccggtcccatcacttcatgggaaatagatggagaaacaatggaaacagtgagagactattttcttgggctccaaaatcactgcaatggtgactgcagccatgaaattaaaagacacttgttccttggaagaaaagccatgaccaacctagacagcatattaaaaagcagagacattactttgccaataaagatccatcgagtcaaagctttggtttttctagtagtcatgtatggatgtgagagttggaccataaagaaaactgagtgccgaagaatggacttttgaactgtggtgttggagaagactcttgagagtcccttggatagcaaggagacgcaaccagtcaatcctaaaggaaatcagtcctgaatattcattggaaggactgatgctgaagctgaaactccaatactttggccacgtgatgtgaagaactgactcatttgaaaagaccctgatactggaaaagattgaaggcgggagaagaaggggacgacaggggataaaatggttggatggtatcaccgactcaatggacatgagtttaagcaaactccaggagctggtgatggacagagaagcctggtgtactgcaatccatggggtggcagagagtcagacatgactgactgaactgaatgaaagattatatcttctctaaaaaatttatttatttgtgccaagtcttagttgcggcatgtgggatctagtttcctggtaagggatagaacttgggccccctgcattgggagtgtggcgtctcagtcactggaccagcaggaaagtcctgagattacatcccatttaactcagttttgtcagtgtaataaccacagtagcaacaacaaacatttagtgcctgcttgctatatacttgagctcatctaatctccagccagactttatccccattttaaagatggggaaactgaggcatagagaaattcagtctgcccaaacctacataactggcaagtggctgagtcaggatttgaagccactaaagaatctgtgttcccattctctcttctattgtcatcttacaatcttggtaccaacagaatgtattcaagtcaatccccgttggcataaccagtgtcactgggcagaagaacaaccgtgaagaagaagaaacagcaatacagaaagtgaatggtggcatggaattgtcatcaagtgctccaagtggctccaggggtccagtgctgagcatcctttccagtctgctagctggaatacagagtgtatgggagttccgcagttagtagagtagttatttggtctgagtgcctgatgcaactttcctcccaaatcccaattttctatctgccaagataggtgatggaggtttatggttcatgttctagcacatctgccctggccagggacctacaactctgaatttctggcctgctcccttccagccaaaagtgaatctagatttacttcccttcagcaacaagcaccatctctatgccctgtgagatcctagttttagaagattcagcttttatcctggggatatcaatctatgtgtagaagtccttattctgtggaagaagagagactgaaacaaaaaataagtgaaaacttcttatccaggcagatgacaaataaaatttcagtatttcttatattaagccacctcttatacctctgttcttttatgaatataagagcatgggtgggcgaaaagtcaaacaaacagacttagttcctgtcttggtgcattcaggctgctctagcaaaatgccatagaccaggtagttcgtaaacaatgtttatttttcacatgtctggagactaggatcatcacctaagatcatggtgccagcatggctgatatgggtcctaattctgtgtaagttgggtccttctca

SEQ ID NO: 40731 - DNA, 1488 bp, Bovine  19866880412490
  misc_feature (1)..(1): n is a, c, g, or t
nggcagcggataaagcccggtgtcctcccccggagggaacagacaatcagcgggccccaggcagggtggatctcttggccaaaggcaggaacaggtgcactggcagggcacatggctgagccttggcacaaacgtgtcctgaaaggctgccagcttctgatccggggtaggttgacccagcagggcgggacggaagccggctgcacctccacccaaaatcagcccaccggccggcctggcacaatcccagcacgggagatgagctgcaaagagtgtcagggtgcacagatctggctctggaagcctaactgaaggctttaggtgggggcgctccaaccacacagacagaacacgtatgcaccgagactgggctctctcttcataaagagaaaagaaaatgcaagcaagtcacagggggtacttagttcagacacagagctcttgcaggacagcaggcacttgacacagaaaatgtccccccccactccacaccagggctggtggcagactgcgatggggccagacatgaaagcgcccccgtggcgcactaatgccaccttgttgttcggacttgactcttgttcttcaagagcagaataaagaagcccccgctgggaaccagccagaggcctggccctcttccattgcgccgccgatatcaagaacaaaggtcgttggcactgtccatggggcttgcggcagactctcttttgatttcctttttaagacagggaggggaagtgctcccctttcctggtgaacaaacctcagcccggcaaatagctggtttcgcgggtggatggagccccccctcccattgtcagtgactttgactcttagaaaaggttttcttctgcattatgcctttattagactggttctcaccccaaaagtaatggtctgaaggagatgcggaaaaacaaaacccactgcgctgttcctgaacccagtgactactgagaaggaacaacaaaagaaagaaaagctgtttcgcattttaagggtatgttcgggcaccctaagaactcagccagttcataaatgacttgatttgaaaacttccagcttgcgattcagtcattcttcaatgagaaatatgtgatttgccaaacatgaaatggaatcattaagccctgacaaaatcaatcggaggcaaagcaaaactgtggctgcttgtgccccgtgttgccttctccttaacaaattaggaatccccgcggaaggcattccagacagatgctagcatggggccctgcctggaagagggatacacgctgatcatcaaaacgcatgcagcttgactatttcggaggtttaactgcccatcccaccctacccccaaagtgcacagtcacacacacacacatacacacacacacacacacacacacagaaagagagaaaggggattcttcttctagatttttctacatttaaagcactgctcagacataagccagacacagaagaggactataaaataaaatg

SEQ ID NO: 40732 - DNA, 1672 bp, Bovine  19866880415483
  misc_feature (1)..(1): n is a, c, g, or t
ntatttcagacagagaaatcattttgtggaattttaaaaagttgttcgattggatggatcttggtcttctaaaggatgtgcagcattttttcctaagaaggcactgttcagtgggcagtgacagtgggattagtcctccttgttaagtcagtccagcgtgtgatttatgtgcttgtacttccaccagactcagggaagcaactcccctttgaaacatacaaaataactttgccaaaaaagaggaaaatcagagtttcagaagaaagtaagttgtttggattagaactgaaaaccatgtggggcccagaaattttgtaatattttacccattaataagtaaatgtgcatgtacagaaggagtgggggagctcatctatttagattcaaaagcatgtcagcctaattgtattagacaacggtgagctcaataattccactttcgatccattgcggtgtgaagttcatcattatctgcttcaaattattgttcatttcaagagccacacggtgaaaaagcatgtaaggactttgaaagaggacttgtgccttccccgaaagcttggtgaagcatttctttggaaacatttctgctgaggctgtgcactggtggtgagtgggtgtagggggtgagcgtctgtgcttccccttttcaaatttgtttagctttgatacgtctccatggaaacaagacccacttctgaactgtctttagggttgtccataagaggaatgaatagaaacataaagatagctaaaattctcatatgatccaaaaatatcagtcaaggagagggaaactgaggttcattgagcccctctttgggactgataattttaaataaggtttttcctttaaccctgagagttgcactatctctgttttacatataaagggccttgaactgctgaacatttactcaaacagtaagtaacaaactcagatttgaactcaggtccgtctgattctgagacccacgctttttctataaaaccacattaccagtagtgttgaccttccctcccacctccctcaagcgttttccagaactatataaaaatgggccatgcttgatgctacctttttttgggtaaataaaatgcctgtgaagaaagagatactaggaagaaaaaaaaaaattaactggcctggataagccaagcgtgaactcagcagtagcaccagccgcatgctgaacagttgccgccaaaagttttggaatcctaatctgatccagtaaagctacatttagctaacaatccctctggtagagaacctccatttaccaaactgttagctgcattccactttgcagagaagataaggtgatggacagtaaagagtcctgcagatctggttcgaatctcaacacctacttgtgggagcccgtactaggccttgaacaacttctctgagccacagacatcaacagggtttcctgatggcacaggacttggcccccaggtgtttcaaccggtggcgataggcaacagccttcacatatccactttcatccacaatctacctcagatatttacaaaatttcagtttgtaggaagggtccacaagggctaagaaggaactcaccctaagggaagtgatctcatgtggtgagatggggccagaaaccagcctgggaatggaaaacagatgtagactcattactgtcttggg

SEQ ID NO: 40733 - DNA, 1035 bp, Bovine  19866880427600
  misc_feature (1)..(1): n is a, c, g, or t
ntacccattcagaaatggcaatgtcatcattattatttaatttctaaaagattcacatgttcaaaaaggttaagaaacctgctgtaaatggccaacaagagcctctgaggatgtaaagcagggcttgatgtgatcagattgtggagaggctgtgtgcctaagaaaatcttcctaataactcttattagaaattgaaagccttttgcttcacagaagtctcaactcatgattttcattcatcctgatgcctccctttttaatgaaagtatccctttcattttctactgcgtcctagttaaggttaataaaatgtatatgagattgaaaaagtttattttccttaaagactatgtaagtctataaggaaaatgaactctaattctagaattaaaagaaataaagagatcactgaaagtaagtcacagaacaggcttcaggaaggtgaacttgagaaacaaaaataaatatttaccctttgctttccaattgtgtttgattttatacaggattctttggccctgagaattttatttcctttttctttctttttaggtccaagtaaagcaaagcttgaggagcgcatgacaaccactccagtattcttgcctggtggagaatcccatggacaaggagcctggcaggctacagtccgaagggtcacgaagagtcccagacatgactaaagtgacttagcatgctttcacacaaacaagcttaacatatgcagcacttcaggaaggcgaaagaagaaaaatgataaaccatttactctaatgatgtgaaatgcaaatggaatcaaacatacctttggtaagaagaatgtgtacaggtcatataatttctttttctttttataatataaacaagataaagcaagttaacactacctatacagggacttccctggtggtccgctggctaagcctccacgctccaatacaggtttgatccctggtcaggaaactagatgccacatgccgcaactaaagatcctgcatgccacaactaagacctcgcacagtcaagtaagtaaat

SEQ ID NO: 40734 - DNA, 3712 bp, Bovine  19866880470763
  misc_feature (1)..(1): n is a, c, g, or t
nccgtaagattgggggtccagacagtgccccagtctgtcctctggtcttcttcctcctcttgtcccttcttacctctcctgggatttgggaggactctctctcttccctttctgcccttctgtcctactttgatcccttacccctttctcctcccataacctcttctggaaagacccaaacaaacttttttgccaacccaatatttgccctccttttcctgaggcaaaaatcgaggaagggctgtaggaagagaaaggagaccattgaaagttgaaaacacattggcaaggttttcctaaacattatcccttccttagacccacctttgaattctttcattaataattttagtggattgaggacttcctaggtggctcagtggtaaagaatcctcctgtcactgaattagacatgggttcaatccctggtctgggaagatcccacatgccatggggcagctaagctcatgggccaccaactactgagtctgtgctctatagcccagcagccacaatcactgaacccacttgtggcagctactgcagcccgagcgccctagagacagtgctctgcagtaagagaaaaccaccagtgagaagcccatgcaccgcaactagagagcagccgcctgctcgctgcaaccagaggaaagcctggacagcaacaaagacccaatatagccagcaaatagataaaattatgaaaaaaagagggaggggatatataaaaataaataaataaataaatacataatgttagtgaattgaatggtggttcctgggaaagatatgtctgcatcttaagccctttgaatgtgaccttatttggaaaaagttaagtgtagatgtaactaagtaaaagatgtcaaaatgtgatcatcctgcgtggtgtaggtgggctctaactccagtgacaaatgtcctcatatgagatacagagagaagagcagaaggccatgtgaagatggggacaatgacctgatgatgcagttacaagctaagggtcacaaggaatttccttggagtcaccaggagctggaagaggtaaggaagaattctcccctagaatctccagagggaccacaaccctactgatatcctgattttgacagtctgacctccagaacagtgagggaataatattctgctgttctaagccaccccgtgtggaataatttgtaaggcaactctaggaaactaatttagatggataatgagcatgaaatacttttgacattaatataataacaagaaagaaaagcacggagcctgtagaggactcggtgtgtgggaactctattctagtaactatttttgttttaatgggagccgacagccttttccggtgcctctggggaccacgctgtcttgaccttcttagcaagtttgcaaatccctccacctgttctctttgctaatatagctattttttctgtcacgcccgtggacacccgggacactgacagagttcagaatcgctgtctctagatactgatcgtgcaataaaaatggcaagctgattagtcagccggggagcagaagccttttttcccattataagcatgatctaatgctgtaatcacctagtctgcagccagcagccaagtgcttgtggtcaggccgaggccccacaacaggtgaaccctgttaaaaggcatcctgctacatggtttcagctgtcctgtagacccgcctgtctcattccctgcaacgtaataactacatagaactcatatgtcccggagtttattacaatctccagggtcatctttaaaaaaaaagtgaaaaaaataactccaacttccaacacataaggctccaggaaacccaggaatccgctatggactgtagacatagtcttgttggctacttattttccatcagactggtgtccctgacctcaaaatagactcagtgtcttccttcatccccaaggcattgttttctggcttgacttaaaatttgaaggaatttcagtgcacagaagggaaacttaagctcagagctggccatgactatacccaagacgctgggctatatcccatgccatgcagtccctactgctgctcttccttgacacagaatcccaacatgttgctgaggacagctctcttccctcctcacctccacagaggagctcattacgaccgtgtctttcatccccagtggctagccccagggtcctctttcctctacctcagaaggggaagctccatgtccattcatatgggaacgactccccagtcttctccttgggtatacacagaacttaagaatctccttgtctaggctttcccagttcagaacggaatctccttttacacagataaaagcccaattaagtgttttttcccttcgagaaagccttggcccccacagaccaattcgggtttccatttttagcagcacaaagaattggcagaagcttcgaaattacagtctctccttaaaggctctgaagagcctagatccaattctgagatagaatcaaagcccgcatatgtactgaattccccttccttttcctccagcccatagggaacttggtctttatacagtatttgaggcatttcttcttccatgtaccagcgctgcgtgacttggaagaagattaacttgtctgaacctcagactctctatctgtaaaataggattaataataccttttgaagaaggttattgtaagatgatttaaagaaagaacttaagaaaattatttagcatggcgcctggcaataaaaaatattcaagaaaccctagactctacttcttcctctctttgtgattaagcagtggtttgcttttgttgtctcacacaggtattgtactgtagtgctaaggatgatataaagtttcagaaactagttaaaaaagatacattaagcctccagagaagcaaaaatgccctgctttattgaacatccttttagctctgtctttgcactgtaattatttaagattaattcctagatatggaattggtggacaaagggtacagacatttttgggacttctgctacatactcctgaattgccctccagaaggtctgttcccgtttacattctccacagcacttgtgtcaaagtgtctttttcttgaaatcttgagttttacctaaaatttattgacaggttaaaaaaaactatctcactgtgatccttaaactgattttcagacctggaaaacaaggactgactcaagtccaactcttgtattttaaagataaagatcttaaggtttagaaagattaagtgacttgactgattagggggcagccaaaattcatatcccatgtttcctgactctggaattctttccattatagtactctggagaggaagagttagcctggggtgaaaccactcagggcctacttactaacagggctcaattagaccagaatgaatgtgtggtagagtgaagagtcaatgaaggaaatgttaattagtgtctggctaatttatcattcaataaggaggaccagcactctccgtgttagcgccacctactgtgaaaatttcagcttgcacaggagtttctctaaaattgaagactgaatgaaggaagtcactgggagaaccggacggatttaaattgtcttcatcactttgccaacaaaggtccatatagtcaagactatggtctttcaactagtcatgtatggatgtgagagctgaaccagaaggaaggcagagtgctgaagaacttatg

SEQ ID NO: 40735 - DNA, 1480 bp, Bovine  19866880523188
  misc_feature (1)..(1): n is a, c, g, or t
nttccatggatagaggagcctggtggactacagtccatagggtcgcaaagagttggacacaactgaccaactaacactaatactttagaaaataagaataaggataactttagccaaaaagcaaacactacccacttggattccccagcgttcacagtactgaagaggctctgaactcacctttcatacagttcccggaggatggagatgttattagaatggattgttgggtcaatttccaagaaatccagaatatgatgtgggattatagcaccttcctctattagcagtgccaggttaaaaaatccctgaaaacaagccacaaaccaaactcattctttccttataataaaacttagacgtacactcatcagaatataaacttttacaacctctggatttttcctcagtctttagagccagatggctttgtcatcttcattgataaattgtttccctaaatatatgcatctgagaaacttatttgcaggagaaccaggaggctttcagaggctacagcgtcccatctgctcagaagccagtcaaccgggggaatctgtcctcctgctcactctctcaagacagaactttctggaaaacatgcccttgagttatcaacaaaaccagaacactgagtcaaaggcaatctgcatcattacattactaccctgggtcaccatcggcatgtcagaaattgaacaagctgtggctgtgggtgctgatggagagggtctctgatacacatagtcatgtatgagtgtttgactcatctttcctaggctagtgaggaaaatctcctcttctgattcctcttggcacaaatcctctactctggcatgcttccctacctctcccttattaaaatcttcttcttgacccacagaggtagggactaccatattacgctgtgcaggtgcaataaaatcacacagttaggagcctgatggttgagatgcttcataaagaatgacaactattatagtacctggaggagatgcaccatccatcatgagctgagcatgtggccagaccaagaaataaacaatgatgcataacttatcattagggctttacagagtccaaagagttgttgcccttcaaagaattaagtcatactttaatgacttatatcctcccttttctttcatttagttgattctaaataaaagtcaccaacccttggtttgtaaacagcaggagtctcacaagcgtgctatgatcacgataaaataacagagccagcatttctgagtgctgttgtatatgaggcttggtctgttttatatatattaactcaatcctcatagcaacaaatcaagataggctctattaccctgtatactactattactaggaagctgagacacagaaaaggttaaggaatttgccctatgtcatgcagctggaaaggggattcaaatgcaagcagaccggattcacagtcccaaatcttaagctccactatgctgacaaataattt

SEQ ID NO: 40736 - DNA, 1002 bp, Bovine  19866880546863
  misc_feature (1)..(1): n is a, c, g, or t
ntactggaaacaggaaatactagaaacctcactagaaaatcaggtccatttctggcctagttttgccacagttttgataagcatccaaacttttgcttgtttattcaaattaagcttctgaatctcttgagattcaccccttgcagtgggtaagccaacagcctgcagggggaaaaaaaaaatcacacattttctggccaacccttggaaaaatgtcttttctctctgccaggtttactaatttacacgtgtcccaaagctgaggccaactggttgaaactgaagattttttaacaatgaacaatccaacagtgtgaattatttagattattccaataccaaactaaatcttatttattcttatttaaagttatgaaggaatatgtacattattaaaagatacatagattgagtttcaaaattacagtttaacatttatagtgattgggtcgtagaatcagaggacctagaagggaacttttaagtatgaacattcctgataggttatcttccattttcttgggtcagtgagtgttactgtcaatatggtttagttgttaatccaatgttagaaaatccttggcacacaacaaggatgcatgtgtttagagaaaagtaatcactaatattataagaaaaaacatgacatgaaaatatccttttgtaagaatttggtgttgattcaaattgtgaggctagttacttgaacttgggcaaggtatttaacttttctgagcttattttcccatctgtatggagttcaactttttctgttctccccaacctgttggttaaaaagggctcaatttaagggtgacaaggcatattcaactaatttctattgtatctagttgatggcatagtcaaatgtttctgagcgttggagtgtcttgcattaactcccaggcaaactcccttagttgtcatgttgactgccatgtggagtacatgtttctctttagttttccccttttgatgggcattgtcatatctctggctcct

SEQ ID NO: 40737 - DNA, 949 bp, Bovine  19866880558065
  misc_feature (1)..(1): n is a, c, g, or t
natcccctggaggaggcatggcaacccactccaggatttttgcctgaagaatcccatggacagaggagcttggtggactacattagtccatagggtcgcgaagagttggacacaattgagccactaagtgcgtgcacacacacacacacacacacatatgttaagcatttcacaggaaagtcattgttttaaattgctactgtcttaaagcaacggttggcccagatgctgttctggggccagcaaggtgtgaccaagaacccggaagcagctatcgagtggtatgccaagggtgccctggagactgaggaccccgcattaatatacgactacgccattgtattatttaaggtaagaatcactcaatttgtgctgaggttgcaaaattcctatcagatttcctgagcagtttgatgtaggcatgcaggcaaacagggagcctgtaacccaagaacctcggaatctgcttctgtcaggctggatggaaaggcgtatttgctgaaaaggcagagtcagaagcagttccctggtcttgtttttaatcattagccttaggtttggcacctggattctctttgcttttgcaagcattgtggcattctggaggagacaccccatattttacggattggtacatggctggcagcccccaaaggtgctgcaagttctcttatcaggcagagctctcgttgagttacagctgagatgaaatgcgtctttggctggatcccaacagtctctctgatcaaaacaaagatcttggttttaagccaacaggagagcaggggaatgggtgagaagaccattagcccaggagacagaagatggaattcaaatccctcctcggcaaccagcagctacatccttgaacttatctgacctcatgggacactggtaatgaccacaggttgagtgaaagaacctaaagaagggactccaagaacggcaa

SEQ ID NO: 40738 - DNA, 1533 bp, Bovine  19866880583648
  misc_feature (1)..(1): n is a, c, g, or t
nattgaacacataatgacacatttattttttcattaaatatttttctacaatagtggtttttgaatcttttcagcagtgaactttttttaaaaaatgaaatcttaacgactatctattgctatgtaacaaaccatttgaaacttagtggctcacaaatattacaattgtttattctttcaggattctgcacattctagaggttccacaaggaagaacttgtttctgctgaatgcaatgccagatgtggaggctgtgggagccactttgaaggtggcttcactcactactcacttggggactcacctagggccctgaaatccattcattggaagaactttggcttttgccctttgtgagatgggaagccactggaggattttgggcacaggagtgacatgatctaacttagtgttcacaggattaccttggctgctctgttgagaataaactttaaaaagggggtggtctggcaaagggaggagcagggagaccacttaggaagcgattgccttacccaggtgagagtgcatggcggcttggacaaatgtgacagcaaggggaggggacgaggtgattgatttggcttaatattcatctgtgctttctcctacttattttatggaattatcatgctatatggggttaattgagtgtaagtttgaggtagtcatcaacttgactaatatttcttgaccgtatttcttcatcttgtggtttcacagtgcaggaaaccactggcgattcaagacgtatctggagttttgatctgagtgagtagcttagctcaggtaatatctgagcacctgctcataaattcactggtcttctccttgatagtgacgtgacactgattgtggtgtggtttagttgcttagtcatgcccgattcttgcgaccccatggactgtagcccacaaggtttgtctgtctatgggacttcccaggctagaatactggacaggttgccatttccttttccaggggatcttcctgaccccgggagcaaacccaggtctcctgtgctgcagatggtctcctgcattgcaggtggattctttactgactaacccaccagggaagcccgtgacactgatcagggctttgcaatttagacttcttcacagtaaacccagctcttctccagtcaggagtgtacccctgcagtggcaggaactttatctaaatgacccttttgggccaccatcttcccctcacagctgccctgtgagggctcaacagacaggggtttgactaaattgcctcccattggcctccatgcaggttggagcaatatggaaattcctaagaacagatccaattcttgaaagcctctgagcactggcatactctcctgggctacttttggcctttttcttttctctctttcccccatcagggagccccagtgttctgcagctgttacatcagccggatgccagatgagcagaacaaaagatgtaacttggtgactattcacatctgtacttctcctaagcaaacagaacagatgcccttagcaacggggctctccgg

SEQ ID NO: 40739 - DNA, 1004 bp, Bovine  19866880648047
  misc_feature (1)..(1): n is a, c, g, or t
nctgttctcatcctggaagaaaaattggtgcgtgggactcaatgaaagatgctaaggatgctactccactataaaattatttctactgttattctttgtaactgtatagtatttcaggtctgtattaagttacatgggctaacctgggcatctaataatcatctgaagcatcatcctgtgttcccttacctctctgcttttccctggctgatctctcttcctggcttgctctgattgcttctttgactggcaaatgtctacttgtctttcaaaatccagctcaggcaggcagcacccctcctggaagcctttctttatccactctggctgaattgaacatcctgctctataccccatggagtgcattgctttgtgtggtcacagtcccctaacttgtctggttccttccctgttagggttgattccttgagggtaggatggtaagtttatctccataatccctgatgactttgaacaagcatttatcgaacagatatgatagtgtttgagcatatgctgctctctacctgggatgatgttcccttctctaatatattcattctctctctttctctctgcaatctgaacggtattcatctttagtcttcagttaaagcctctgctccagatcctgcagctacatacacggacacacccatactttggcttctccaagactcatcagttaagttattgctttcttagcatttgtctttctggcctgacagtcagccccacagggacaaagcttcatctgctgccccttccagcgctgatcacaacattaggcacccaataggcttccaatcactgtttgtttaataaatgaacaaacaaaggagtcagtgagcaattatattttgagtctccaaagtcaaaacttccatttgtggccaaatactgggattactatccagagctaggatgaatgagggaaaagaagggcaagggcactagatgtgagaaggagctcacttctgatgccagctgtgctcttgcaggag

SEQ ID NO: 40740 - DNA, 1668 bp, Bovine  19866880744060
  misc_feature (1)..(1): n is a, c, g, or t
nacacttgaattgtggtagtcaactggtctcaatcctaatgaggaggtgttggccaaaatatccactgctactgaacttcccaggactcagccacagtcaggaatcaacaacaggaaagagagcacgacaagtgactgtgaagggcgctgccctcacccacaggcaagttgagcaaatctatccatctctaggtgtctcacatatcaaacaaggattatggcaccagtaggacggttagcactgcaatgaggaagtgttgggaggtgaagaaagccagcaagttccctcttctgtgagcggcggggcggcacggacatctcaccacactggtttccactgtttgcttgttggctggctcgtgcatgcttcatgctgtctgtccactaatggcctgcacctacttaattgcgtgtggccacacatctgtggtggtgagtggctgtcaatgcacttaaagggtaggggaggggtttcgacagggaagtgttctccaaaattctggagagggaactggggagtgcaaaatgccctgggcttggccagacacagtgccctgggggtctgtgctgattggataggggcacagaggtttctgtttagaagaaaaacacttctagggaaagcaggcatggatttggcctttccatttccttctggagaatgctgtttataataataaccttcgcaggattgggcaaagctgcatttgttgactgagtaagtaaataagtgaacacatttagtaaacatctggcccaaggcgaaactgggaaacagataaagctggtcatgggtgcttccagattctatgttcaactcttttcttgctttttaataagttcaacaaatattgaatgagcaactcctaggctccaggccctgtgctgtggggtaagagggcagaagtgtatatgtttaaagccatccttacaattttatttgtcaatcataccttggtgacgctggaagaaacggagtgctggaatgataaaacacagcctttaccctcaagtagctcaccattgtgtcctgcgacagatggagacagctggggacagctgggtctctgtaggatgagtgaacaatagaggcatggaggcagccaccatcatgcttgctttgtcatgccacatgggcgagacttttagttctcagacgctagatcccagatgaattcatgcaacacctagtatatgtaggacactgttctttaactgggtaaatagcaatggactgaaaaaggataaaaataaaatctctgttcttgggggtcttgtggggtgaggcccacaatacaaaaataattaggcaaattatacagtagatcgtatagagaaatacaaggcaagcaagagaaacaggggacagggctgcactttcatggggtagtcagggaaggactcatatttgaacaaacaccagaaagagctgaaaggtcagttatctctggaaggaacatggcaagcagagaaattagcaacttcaaagatcctggggtagaggcgtagcatttgagggatcatggacggtagggccaggctaagtgtagagcaagctgagaggaaagcaggaggcaaggtccagctgggaggccagatgtgcagaacttggcaggttatggggaacacttcagtttttaatctatgtgtgatggtatatgctatcgt

SEQ ID NO: 40741 - DNA, 966 bp, Bovine  19866880778732
  misc_feature (1)..(1): n is a, c, g, or t
ncttagcagcagcagtagcagcaaggtgatttttagctaaaaaactcggaatccgatggcttcagtgtttccacatatccctttccaactctcacaatctctgatttaattggatttagaattgatttgtttctgagatagatttttttttttttaacctgagtaaaaatgaaatgacaccttcctttcagccggactaatcccaagccagcagctcagaaatgaggaaagaagtgtcaagtagacaaatggaagtgagggcaaccatggcaggggcgttctgaaacctgtctccttcagccacaggtgatccttgggccaattactctcaaccatgtgcttgctgataggaagggaagactcacaaccttggtctgatagaactcaggcaaggtgatgagcaatctattgttaaaatgtggatttcctcacatacttgtttttagattcatttttgaagaaagcagactgctttggggtgtcttgttcctgatcaagctcttcctagaactctaggcaggatgtcatgtctccatccccaacctggcctcactcatggtgggtggtgggtgctccaggggcagaaacataagtttttgaaaaaacactgcatacagtaaatcctgcattaggatttaattcttgatctgtttacaatatgtgtgtgtgtgtgtgtgtgtacctgtgagggtgtggtagttaaataatgcaattgatttctgttttacttttagaagttatatgcccaaatgatcagacacctgggatagctatgtgcttatcctaacaatgccaccatagagaaataattttgagaattctctattcattcttgctttttgagttgaagatacagtcttcaaattgtcctcagtggtagagaaacagtctcttaggagtgattttgagtttaaataaccttaagtaattcagaggaagagcttgcggaataaggtaggttctcca

SEQ ID NO: 40742 - DNA, 1154 bp, Bovine  19866880789297
  misc_feature (1)..(1): n is a, c, g, or t
naaaccaacagggcataaaatcagaaagactgtcaagaaattctttatcacttaaaacactgactaaggttctatactgaaagtgcgttccagtcatgtaataaatctaagaaaaatgaagccttcaactgtctctaaactagccttagttttatatcaactctacaactaatttaaaaaaagctgtgatgcaagaaaatagcaaatccaatataaacattaagattatttctaccatgtgatgatgaaatcatattttaaacattccaatattgccaccacctaaaaaaatcagctaatgaatcaaatcttcatcttcagagacttctgcagtaatataataatcaaacagaagataatcatcaatttaaaaattacagacaaatgaaaagaaattaaaggaaggaagggaaggaaagaatatcaccgaattaacagaagaaaaattaattatatacctttacagtagtatgtaaatcgatgtttttaacttggacagatggtcaacatgtcccaatcagtgaaaagtctgaaatcaagtggtcagctttcagagtttaacagctgctatgaaagcatactttatgaaacaatgtgcctttattttctaatctttcccagtagctgctgctgctgctgctaagtcgcttcagtcgtgtccaactctgtgcgaccccatagacagcagcccaccaggctcccctgtccctgggattctccaggcaagaacactggagtgggttaccatttccttctccagtgcatgcaagtgaaaagtgaaagtgaagtcgctcagtcatgtcccacccttagcgaccccatggacagcagccttccaggctcctccgtccatgggattttccaggcaagagtactggagtggagtgccactgccttctccagtagctacatcttagcaacttaggcaaacaatgcttttatctaccacttggtggcgatatgcacacatttatgattttattcatttcctaagtcaaacaatcagtctttattttcagagaatgattcaacaacttttccctcaaatcctaagatgaggtctggaaaataccttacagattcaaagaagtctttttattcagcccaatacataatatcagacaaaatctaaacacatcatttacattatctgt

SEQ ID NO: 40743 - DNA, 1812 bp, Bovine  19866880845313
  misc_feature (1)..(1): n is a, c, g, or t
ntggtccttcttcttatctctggaaaagtccctctgactgtgagccgaaaaaaaaaaaaatgcctatgctcataaattggcaaaatgcacctcttgctacaagggacaagattgattctcggggtggggctgggggcggccttttggataacttcccctaaagctctctgcatctctttgtctttctgtcatccttacagcctacaccaacattgtccaggcctcaaagatacgatgatgagctggttcttttttagttcattagctcttctgctgtattagtagattatcaaaagcagtttcagtatgtcataaaatctgtttggtattaacttgatacatgatgtgtttttctccatccagctaaatagtttccttcaaatctggaccagatgagcatcctgggacttgcatgagctcatatgtgtgtctgtgtggaatgcagccctgggtccccttggacatgtggagcatgtttttggcccaaatggaaacatccttaggcactgatgcctcaattaggggaaagataaagatgcaggatcagatatggcatctgtaaaatgttaatatcctgggtgatgcaccctagttaagtttatttttcagtttcgtttgatggctagtttaggcaaaatcgtgacacgtgtgaaattgcctttatttagctccctttggggatagcctctcaaccctgcccctgctgactgccttgttgctgccttaagctcaccccagccccacggagcactcctgcgcatctctttggagcacctattatgttctgggtgtaggggaaggggaagaataagagcaacttcacttgcaggatgtagaggaaggcacagaaatgggagcagatgcttgtcctactgcaggataaacgtgtgatcaggtgctgctggagcaggtgaaggctccaggccgctctgagggagggcctgcctggagaaagcacctggggcagaactctgaagaacacccaggagttagggcggctgctggccccgcaggcacctttgggtgaataagagaaaggcgctccttctgacaagaggcctctcttgctgggcgcacagttgcgcaggccaagtatgtgcatttagtccccactcaggtctcacctcggtaccctagtgacgtcagcaacctgcacagtccccagcagcccccgaggggatcctgtgtgtttcagtttcctaagggctgctgtaaaaaatggtcacaaaccaggtggctcaaaagtagaaatttattctctctcagttccacaggctagatgtccaaaattaaggtgtgggcaggcctcgctccctctggaggccctaggagaatcttcgcctgcctcttccagctcctggtggctccatatgatccttggctgtggctgcatcactccagtctctgcctctgtcttccaatggccttctcctctgtgtctctgtgtcaaatcttcctctgcctttctcttctaaggacacccgtcattgaattcagaaccaccccgtggatggtgactgcagtcatgaaattaagagactcttgctccttgaaagaaaagctatgacaaacctaaatagcatattaaaaagcagagacatcacttgccgacaaatgtccatatagtcaaagccatggtttttccagtagtcacgtatggatgtgagagttggaccacaaagaaggctgagcaccgaagaattgatgcttttgaactatgatgctggagaagactcttgagagtcctttggacagcaaggaggtaaaaccagtccatcctaaaagaaatcaacccgaatattcatggaagga

SEQ ID NO: 40744 - DNA, 972 bp, Bovine  19866880870613
  misc_feature (1)..(1): n is a, c, g, or t
nctgtgtactcctgtggccttgaagagcaatactggtgtaatttgaaggttttaatagcctctgcatggaatacatggatgtgtggttgttgggagtattttcattctgttatttttatggcctgagatattttagccagcatccctgtgcctagagtacccaagcagaccccaaaagcccaattactgtcttgaggaatctggttaccctgtaactcaaaagactgtaagcagcagctgtcccaggagtcagggctgtgccccttccctccactcagaatcatggagtgggctcctgacttgaaaggagaacatcctttgtctcttggcaatatcatttgcattcaatgtaaaatcagaaatggatggaaattttgcccagttggaaaacaccaacaaaaatgcaagccagtaactggtatttccacccaattccttccactctgacacaaaatttctaaattccctgctaagatccagccttactttgtagctggggctgttatcaaggtaagacttgggtttggacggtcctcatctcatgggttggtcaggtccatctctacagttctccatagggacaaagtcccagtctttggatctttgtagctcctgcaggtctcacaagttccaggcatgtaggtgtgcccaggaaatcctcatggaggggtaggtaggtcactgctcttggaaagggggaagaataaaatagaacagggcatttccaccttattaaagcacagaaagatggagacccaggttcgattcctgggtcaggaagatcccctggagaagggaaatggcaacccactccagtactcttgcctggagaatcccatggacagaggagcctggcgggctgtagtgaatggggtcacagagagtcggacacgactagagactaaacaacagcaacaacaaagatcatctcagtggaagcagtgctgatttaccacaaagcctgagcagggg

SEQ ID NO: 40745 - DNA, 2278 bp, Bovine  19866880877694
  misc_feature (1)..(1): n is a, c, g, or t
natgctgctgctgctgctgtgtctcttcagtcgtgtccgactctgtacgacccccatagacggcagcccaccaggcttcccgtccctgggattctataccttattgccataaggactaaatgaattaatgcatattccgttcttagaacagtgtttggtttgtctacatactgattagatgttagctattactactagtgacctggcttactatggtaatgtattgatttatcaatttctggggcctggctggcaggactgatgaaagcatttgtttctgggatgccctacggctcacttttagaccccaggagcttatgaaaatagctaaaactttgaagccagaaaactgaggagtcacatggtcctgccagttcccagttgcggagcgagcttgggcaagttacttaacctctctgagctgcagtttctctgtcaaatgggggtaatatgacatgtggctagtacagtggtcatgctttgtgggaacaattgctagttcgcctttaagcagtgctcttaagttctgcagtccttgagtcagtaggtgggatcatttttaaaggttcccaaatgtccatcctgaaatgtaccaacttgcagaagatgccaccagatgttgatcatctgacttctggataaactcttcaagatttccacctctgagaggctattctaaacaaatcaggaatgggctccaaagcctctgacctttttgaatatgtaaaggaattcttcaaggaaccctctccaatatctacagaagactttgtgaatccagagactgttctgaaagaacaaaacagtggtggtggtggtgcagggtggggggtggtgcccaggtgttatgtaatgatgtgacacttctaggccagagtcatcactccggcaggtgacctaaccatggcagagactgtgatacccggtgattcggtagaaagaccatttggagtcaggagacctgttctaggcaaatcacatttatcaatcactagtaggcaactttggggtatatactgaatggcagacatttcagtcctaagatgatgcttgaatctcacaggccttggtttcctcatctgtaaattgaggggcttggatcacatggtgtccaagaccttctcaggaccaaagatttatccttctgatgattctttgaggaagttaatgaagtactaagtcacctatttttccatttcaagctcagggaaatgtttaaatcaccatggtaacaagataaatcagcaatcagttttctgattaaaacaaaaaagggccaatgtgtaaatgtagaaagaatgcataattagcattgccaccactgaaatcttgttagaacataataaaaatgctcaatgtttcagcagtaaatttgctattatccatgtgagaactcttccattttcatcaggagtttgcaatcattggacaagccttgtcccctacagtgggtcataattttagaatggcctctttgtctccactcacctggaatccattctaatttgattaacggactagaatcaaggtaaccaggaaaaccagcgtgctgcttaaaaaattgcagagtgcattccagagccaaatagaagtgatttttggattatttgttgtgtgggggaccatttcctgttcattagtgagaaaaatcaagagttggccctgggttggcagactgcagtccatggacctaatgtgacttgctgcctgtttttgtatagtttgcaatccaaggatggtttttgcattttgaaatggttgaataaaaatcaaaagagtactattttatgatatgtgagaagtatatgagatttaaatagtcacgtccacagtagcattttattgaagaccagtctcatcatttgttttccagtatcatcaatggatgcttttgaactatagtgaaagttaaatagttgtgacagagatggccctcaaaggcccaaatgtttattatctggcccttttcagaaaaagttcaccaacctctgtcgtggaccattgtaggaaaaaaacctgcttgccagctcaccagatgtgagcacaaagaaaagaagaatagtagagaatatattgggtgaattgggagataattgaatatttacaaagacaggggaggtaggtgcaagtaaggaggtgagggagggaaactgaaaatctggagattaaatctacttcatttgagcctctggctccagcagggcccagcccatgtagaaaacccatgtcatttaaacatttctcatgagtaaagataccagtagggcaccaagggtaa

SEQ ID NO: 40746 - DNA, 1581 bp, Bovine  19866880898740
  misc_feature (1)..(1): n is a, c, g, or t
nacaaaatcaaaccaaaaaccaaccaaccaaaaataacggctgaaaaaaatagatttccagaagtttgtacatttagatgttttttgtttgtttgttttgttttactgtggcttctgcacttcaaatcagcacttgcaggtaatggggtttttgaatagtataacctggtatgaaaagttttcccaagaaaccacaaaagattgttcatttttttcttttttttgtcaacattttgccgcactcaagtcagtgtaagtcctagcaaaaagacggtagttaggacacaactgttgctgtagatgatgtgacactggttgaatttgtgctgacgtttgtgtaacttccctcgctgtttgtgtttgattcattagggggcacttggcttgagttggctcgaaggattgctcccgctgcactgcagtgtggccgtggccctggttctggggtataggtaaaggtaaggctggtggaataaatgattccatcattacggaccaaagttactggaacctggactggctgccggacccatctccagccttctcggaatgcagaaatgtctgggacaacacagagcatactctctccacatctgaggaggaaatagaaatcacttaaaagcatggcaaattttataaatgaaacttaaaaacaaggttgcttaatacaggacaatcaacctcttaatacaggactcttgggaaagagtctcacatacccacccccatcaaaaactctggataatgtaaaaaattgtattaagtacctgtacatagtttcagcttctacatccccaaaccacactcgtaaatttggagtgaaattctgtcctgtaagttcaagcattgctacgtccccaccgccattcaactgcaattcacagaaaatcagaacaacattgaggaaacttttcatttttcactaaagtatacagatgagtttttcactcaactatcatgtgcaaaaaaaaaaagacaattaaaatacttcctttaaataacatgattataaagacaaagtgaactaaaactcgatatacaagctgatttacatttaaattttcttgctaaaattatgtgtgctcctctgattttcttcttcttcactgtgtaaaaaaccctccaaagcacaggatttgaagaaaaatcaaatttattgtgaagtaaaattactccatgtcatagatgaacagttgcaaaaagctgaagtcaacttgtaagaggtctcacctgaagactttctacgacaggcacaggtgtgactggggcgaggacagggcccatcccctcataaaatgtatactctgccttatccgtactaatgattgtccaggaagctccatcatttatcatctctttatttggttcttttgggcatggagtggccttagaaaaaaagaatggttataaattatatacattgcggtattataagacaattttaacaaagtaacactcatgaagagaatttagtacaaatttacaaacttcccaggcaccatacttttccaacccctaattccaaatagaatattaatatggaaacctcacataaggctagttttattttaatatgaacta

SEQ ID NO: 40747 - DNA, 1051 bp, Bovine  19866880945133
  misc_feature (1)..(1): n is a, c, g, or t
ntctctgagaagggagcagctgtgagctcttagcagcccctggtcagggggacatgggtggggtaccaaaagcatctactcccagagggaaggaagagccatgtaggtggtcttgacctcttccaaggggggcagattgcagcttgtcgttgctggaaacgaaagggcaaatcggattctctaatggaaaatgcattaggctgtctagaaagagcagctaagcaaagggtgagaacaacgggagattaccagcggtttgactgagggtgagaccaaagaggtgggtcatcaaccacgaagaaaagaggctcaccgtccagaattaatcagagataaagggagtggggttggagtagcattgcagcaagcgtcaggcaaggcagggaccgggctatgccaacatcttaaaaataaataattctcccccgtttctatccgaggtgctcaaggtaatttgcaaatatttgcaggcaagttttcactaggctgaactgcaggcagagctcccactgacttcacagagcgctcccaggggacaggcagtaaggtgaggcttcggttctgggtaattaagacttacggcaccctcgttagtgaagaaatcccggtgcacatcattgaaatgcagcgggctctgcagccctacggcccctcggcggccttggccgtcagaagcccactgaagccatcattaattttgctatccttcactttctgaaatcaaaggatgacatcactttgattaagaggaacaagcacgttacaggcaatcagtggagtcagtttgcattggtcagtgtccttagagtcgcttactgatggtggccttggggctcccgcagggattatgaattctgtgataggctgaaagcccacagtcaccttctgagcaggcgaaattctctccagaacccacctgcactacttccttagttgcagtattcttttctgcttcccttcctaacaccgtctctgagacacaaaggtgctcattgggtggtcaatcccagacagtaagaaatgtctctagaacactctgatccctcctctg

SEQ ID NO: 40748 - DNA, 1201 bp, Bovine  19866880945977
  misc_feature (1)..(1): n is a, c, g, or t
ncccaatgccatctgccattttccagatgctgctttttctgcaaattaatgtatagggcaggcttcccaggtggctcagtggttaaaaaaaaaaaaaatctggccactatacaggagacccaggtttgatccctgggtatggaagaaccactggagaaggagatggctacctactcctgtattcttgcctgggaaacccatggacagaggagcctgatcaggctacatccatggggctgcagaaagagctggacacgacttagtgactaagcaaaaacaacaacaaacagggtgcacatgactggggtcgggggtgggggtatggaaggggggtcagaatatgcaggtgtgctctgcccctaggctccccgaagggggcaagagggaggctgcccactctgctctgccattagtcctagcctcaggctgcccagagtgggggggagaagagggccagggacaatgggtcatatttttataacttacacacaagaaccttacggtctaggactggccccaaggaaaaccaaggcaaaaatttcaaagactaggcacacccaaaaacccttgctcttagtccctgtaaagttttggacagcctcacgttttcccccttattttccctgagaattcttggggaaacagtaggtctaagagaatcgagctggcaagttgactcggtcctgccccccagttaggtggcggcatggtcacctctctcccttcctcccagtctctccctccactagcacctccctttcccataaagaagcggccctgcctggagccccacaccagcaggaagcccatgcaggctagttcctcaaggttagagagaccacgaacaagaacaaggaaaaggagaagtgctggaaatcagtttcttttaggcttgtctgatatcctctgggctctgagtttggcagggcataaatagataatcaaagattttcactttcccaggttggaattatgtaaccaggagcggcttctaactttgttttcctgaaacttctcttgaaggaaattcctcttttgttctcaatcacaacgagtgttttcccctgcgcttttacttggagatcttcaagtcagcagcctctgaagctaatcagataattctgtgtgaattaatgcacacactggagttttaaaaatatatccttcatgatcctttggagtgcgtgcgtgtgtgtgtgtg

SEQ ID NO: 40749 - DNA, 1011 bp, Bovine  19866881054404
  misc_feature (1)..(1): n is a, c, g, or t
ncatagaattattcaacagctatcagcaacttgggcacacttccccttggacgaggctttgaatctgtgacctcgaggcagaggcatcatagccaatttcaaatccctgatgtatccaaaccaatatccagtaagcttaagtctgacgcctatttctggttcatcttagaggaagggatttagggagcaagcccttcccccctaacggtacctggggcttacctttcctataggcaacctccgaaattcctacctggacctgaaactcagatacggacggccctcgatgtgcagagccttcccctgggagaaggagctgagagccaagcatcgaagtttgttccaggccttgttggagctgagtttggtgacaggtaattgagtccatgccttgtctttggacattggttagaaaggtccctgtttttctgctttccctcaccttctttagtgatttatgccttgaagttatttttaacactagtgttctagcttaatttcaaatttaaattctgcccttgtatgtccaccactctcaatatacctgtgcacatttgtgacactaaatagaaaaacttaaatttaggaatcacttgagcaagtctttatgtaaagccaaggccaaaaacaaagagccgacagccagacctgacccccaaatgtggttgctctggcatacacattgttgtcaatttttaaaaaattagttaccagtttctaaaaacatacaaaaacacaaatttctagcttttgtcaaaatatccaaagatctggtgatgctgggcctcaattcctgagtggcagcaagctcagaggtgagtggttggcacagacaggttttgtccatctgcagcccctcctgcctctagttgagcacttcctgtctaactctgtcatggatctcacctgcctgggcccttgggcacttgaacttgagaccccctgacttgaagtattttcaagcagcttccaggagtctgtgtgatttctcaaatgggccagcttagtcca

SEQ ID NO: 40750 - DNA, 1457 bp, Bovine  19866881061330
  misc_feature (1)..(1): n is a, c, g, or t
nctccccacccactttgagcttttgctcttaagtacattcaggttccaagcctgaccatgcttgtttaatctaattaccatactcttccaggtcttttctggtccaaggctggaactgttctttttattttattatttttttaaaagctgaagtcttatgacttttcttgaatggaaggtgttttgatttcagcaagtcaaatcttgtaaaggcctgcattcatatttcttttaagattatatgaagtctgtgcaaaagctttaaaaaaaaaaatgcctctgccttgcctgcaatacattcaatgtacttagtctctattctcaaataccgttgatagttatttctctgtgttactttttttttttaatgtatttatagtggtaatctaagaggttctaacatttacctgaaattaaatgtggccatttagtcattaatgagttaatggcatggaacatgttggtttttacagtgttccctccccttttcctgtgcagaaatgtatctactcagtcaacatttgttcaggtttcctccccctccttatcttgtacataacttgtattatgtgtaagttaaacattttattttgaacttggaatattcccagtgatttcattcagcagggtgtttttctgccttgttggcatatgataacaaaaaagtatcatgctaagtatttgctaccagttggtagatggtgcccttattgtataatgaggaaaaaaatctcagcaaaagcatggttttatttacttttttttggtgggggggcgggggtagcctaggtcaaaacatcactgtaaccttgaaacaggatgctcttactagatgaccaactaaaatagctggaagacaatactttagaaatggatagttgtaagattataaaaatgcaaaaaatcccttttttttggcttcttctccccaacactgagtgtcttcgcaaatgtcacccactcagaaaacatttcctctccatttaagatttggttgcattccgggttgtgtgctccctatctgtgctggactcacctcttttacattggttttgttcctgcactttggttatacctttgtttggtttcttagaaattgcagcagactcattgggctacatttagtacaggatctatgtgtgtaatgttacaggacgtggtctagtaatacaatcatctttcttcgagtaaaaactacctctagattgtggtaagcttttactgtcccatgaaacagaagccacaagtaccttaaggatgcaaaactgtaacttcctgcatatctttccgtacagaaattgtctttttggtgtcctgggctattttgaaaagtttccacctgtaggctttttaaaacatcatcattagtagcttccccccattcccaccccacagctttgataaatcttcattactcattctttgctcagactatgccatgtaaatatagttcctaa

SEQ ID NO: 40751 - DNA, 732 bp, Bovine  19866881168572
  misc_feature (1)..(1): n is a, c, g, or t
nttaatgtcaaagaagtcttaacaaaatagactgaactaccaagatcctggtccttggaggagctgttctttctgagaaaagcctgaggtctcgtgctggttgtagaagtttatagatttgcggtgaaaatggagaacttaccattcaaagatttccttggctacactggattatctggagaaaaattgggaaaacaaacaaacaaaaaacccccaaaagtcagttgcctaggtattttggctacataatgacaaacatatattaaatagcttttcttcaagttttgcatatgactgcctgaactttttatcatccagattcacagtcatgcacactgttgagttcaaacctgcattaccatcagggaacaatttgtttctacctggcatatagttggaaattcaaagcacagattttggtgattactagcttaatgaatgaacatagctgaatatgaaacatcacaactcatagaatcaaaaatcacagaagagaaaggattaaagcaatccagctgcaacttatcatcagagccagcatattgttggcataacgagatatattttaaaccaaacataatcatttgaagttttggtataatggcagggtctctggaacgctaagccctgagttctactgattactaacaggaaggaacatccacacataacatgcaggtcaaggattcacactcatctgtctggagagttcagccaagaaatccctggtgc

SEQ ID NO: 40752 - DNA, 758 bp, Bovine  19866881191508
  misc_feature (1)..(1): n is a, c, g, or t
nttgcagctgcatgtagccatatgattaaattttagccaatttaagcaaaagtgtcatatggctcttttaggaacttcccttaaaagatatgtgagcatctttttctctatgcgttcctccacccacctaccaggaacacaggtgggatgtctggagctctagctgcaatcctgtgccaggagggcaatactgacaaaccctggggaagttagaggaatgagctggaaggagctgagtccctggaggcattaccaagcaccacaccagccctagacttctgacttcccagtttttatgtaaggaagaaattaacagctgtcttatgtaagctgctgggtttttttgttgtggtttttttttttttttttggatctctgttgcttccaaccagaagtaatcctaactgatacagcacaaagaaagtggagagggagcctcagagacaatgttggcctttaacacagaagtggccagggatggccttgattcttagaaccaaccagaaaggccctggagagcccggcagttggagctgtcaggaagacagatgttgagtgggtcttgccagccaccacttgccctgacttgcccccaggttcctctgccaggcctgcctgcccatccgttccatggcatccttttcggctgcctgcaaagacatgacagctccacacaggcagcctcctccaggtggatggaactggtgcatcagcaaactataaaaaggaaacctctgaagctctgggttctcttccca

SEQ ID NO: 40753 - DNA, 959 bp, Bovine  19866881202347
  misc_feature (1)..(1): n is a, c, g, or t
ncctgggcatggctataaatctctctgcccaaggggtgaccatgggccaggctgctctggatgactggcttcggggcactcaggaggaaccaagtcctttgttgaggcccttatatccaaacttcaactcataggatatgggctagaaatgagagtattgtttgcattttaggtgaaggcaaggagctacaatattgagctggctaagttggatgatttaacccgtgtaagcttgctggatttccaggaaatgacaagaacaaacataatatatgtaattgttgagcataaaatcatttctatagaatgttaacactgcagggctcttcaaggtcctctagtctaattcacttattgaatgcaggagcaccggagtctgggggcactgactttccacaccaagctagtgcagactgtcaggactccccacactgagctcctcacaccacatgatgccgccgttgttaaagcttgcttcagcccagctctcaaacagaactgtgaggacgaatataacagcacgagctgcacgtcagtctgaagatggccatttgcaaaaagcccaggcaacctcgaggtagattggaaagcataaatgtgtcaagaaaacacttctcctgaccttatgaccccgtttaccaaatgccctgttactcttacttcctttctagacacttggttacaagagatatttgtacctgttgtttgctttcatttttactgcctatgacaacgtaaaatttcctagctaggaatctctttaagtccctctcatttggcttatgtttccaccactttgctgaagctgctttgacaaaggtcactaatgagttcacatcaccaaagctgatggcagatttccacatcttttcttgctaaaactctctgtgacaatggccttctcctacatcttgaagttctgccgtgttttctgtgatgtcacttcttctttctctcct

SEQ ID NO: 40754 - DNA, 964 bp, Bovine  19866881277410
  misc_feature (1)..(1): n is a, c, g, or t
ntatttagagtgagttccatggctgagggcagaggccacctgtgttaatgacccatctggaacacctcaagccatttcagaggccctaggagagtagcttacaagcaatcctgcttgcttttcttggtctgtgctccagttctgccccagaggacatgatgaggtggggtctgaagggcccatatcaccaattggtgagagtcagtacaagagtccaagaacatagcacagcccctcctggtagcaggatttgagacaaagaaagtgaagtcactcagttgcgtctgaatatttgcaaccccatggactgtagcccaccagcctcctccatccacggaattttccaggcaaaagtactggagtgggttgccatatccttctccagaggatcttcttgacacagggattgaacctgggtctcctgcactgcggacagatgctttaccatctgagccaccagggaagctgaagtgccaggcaagaagctggagacaactaggaccacctgagattgctctgcatccaagatggagagagaggtgggcctgggggacaagagagcaccagtccacaagccaggacacccaacagggggggccggctcaggggtcagtcaggcaactgctagcttctaaagagccagagaagggaacacattacaacagaagggtgtgtgggagatggtcactccccaaggaatgtgtccatggggctgggggcggggcacagtagagccctaacacgcatgttaagtcctctggacattgcctgtcacataggtgaactcaacacaaggaagttccttggctcctggggcaaaggggaaccaggattcaatggcgaggctgacaccaggaagaagcaatgagcaaaccagaagcccaacactcaggcctctctgatcatacaacacttggcatccacagtgggccaggcttccctgctggagatgcagagcttccag

SEQ ID NO: 40755 - DNA, 1497 bp, Bovine  19866881279939
  misc_feature (1)..(1): n is a, c, g, or t
ncaatcaatgcccaggacattctggggagtctggatcagcacatggggtattggaagtgacctcagtcacttgggacctgaactaagcccacgtagccctgtaaaggtagtgaaaattgtcttttgggtcctgaacctcattttctatattcttcccccttgtttgtcttcacaattggacatcaaggtccttatgctgaagctccttgtggatagcctaatggttgggagaaagggccagactcacatcccagctgagttccttaccctacatttgcataaacactttctgagcatcaagacatttcataatccagttttagttcactgcttcaatagtcccatggagtaggtggttattggttgaactgtgtcctctaaaaagacaggttggagtactaacccctggtacctgtcagtatgactttatttgaaaatagagtttttgcagatgatttccagttaaggtgagatcataagaggggccctaatccagtactactgctgtactcagagaagacggaaatctgaacataggcatgcacagagggatggcagtgtgaagacgcagagggaagacggccgtgtgaagacatcagtagagactggagttttgctaccacgaaccaaggaatgactgggtctaccagaaactggaagagacaaggaaggatccttgtctagaggcttcaaaaggagcatggctttgccagagctcagattttggactcttgccttctggaactgtaagactattgtaatgtctattgtttcaagccacccagtttgtgacatatttgttctagtggagctagaaaactaacatataagtgttatcatttttcttattttttttaattccatgtctttgggtccttactgtgtcccaggctctgtgctgagctctggaacctggacacaaagctttaagtaaatacggagcaaatctgagaccatgagccatctggtgaatttccacactcatgcccttgtgtctcgggctcaatccagccatcccccacctgtctggtgtgtgctggttcccacatctggctaggggacagacgatactggcactggaagtgcttgggaggtctcctgacccgtcttcctgcttttctggttttccaggggtgcccgctgaggttccaagggatcttgccacctgcagaaaggcagccttgggctccaccacatcttttccctccctgactctgattaattcatgttatgaataaattcaacaaacaacaaatgtttgtcgaatgaacactaaattattaatgactggtaaagagaatgcgttatgcttcccagaggtatttgaatgtggaacaatgctttcacccagagaagggaatttccgggcgtgggatgggggtgggagtagggtggaccaagcagagtggggatttggggacgagtgcagtcttctgcaggtcttttatcttatatctcgaaagtaacttctgtgtctgttcaggatgcggctggctg

SEQ ID NO: 40756 - DNA, 1170 bp, Bovine  19866881303141
  misc_feature (1)..(1): n is a, c, g, or t
ntgcttggaaaattccaagggacagaggaaacctggagggctataatcctgggagtcacagagtcagacaagaccgagcaactgagcacacgtgcacacacaccaaaactatactttgtgtgtcttaaaactcaggtccaaggctccctctggcacaaagtcttcctgtttatcccagtcaagcatgtgggatgataaagaagctcttgtgatgaataacatacccagtcacttagattcagagggaggggccgagaaggctaatggagccagcgtttcggctagtgtggcttcccctagtcagtagttcttttctgaactagggtggggcggtccttctagctgggtttagagtccaggcgtatcgcctcattagctgtgtgacttatgaacagttattcaccttcctgatcctctaatttctcgtcagtaaataaagttataacagtagctacttctcagggctgttaggagggctcagtgaaaaaaaatactcatggcactaaaatgacaactgtagttcaatgttagatgttatgtttatttggtatataaaaccctcttgataaagttcgctgtggtgtctgtctttcctatgagaccatcagctgagtcagaggaaggccttggtctcatcatttatgacctcacactgagtaggtgctcacgtttgcgaacgcctctcagtagagaattcccaattccccaccacctgggaagctataccaggaccgaattatgcatgaagaccggcagggacatttacaaatggatacattaggactggacatggcgtttgagcatcggcacagccgctgtttgtgtagcaaataatgaaaagcaaaaggagtgcatttcagcacatattcgatggtgagatggaagtcactcttctgagaggctaatacagagtcattttccctgattacctgaggaggttaataaggaaccatcaaaaacccttccaggtctgatgccctgtagcatgccggctgataaattttcctcatgcaaattctgtcccgtccctaaatttgttgccaggtagagcacatttattttgcatcttgtcagtgttttccatttcaaattatctttgtcatttttactctgtagaaatattgttatgattattacaaatgcaattccgttagaggagctgaaaattgt

SEQ ID NO: 40757 - DNA, 1284 bp, Bovine  19866881349112
  misc_feature (1)..(1): n is a, c, g, or t
ncttaactatttgtccaaaatcctatgatttctcccatgtctgaatgcctgttgggagttattgtcaatactcagtctttgcacttggcctctgatgattggctacagttgtttaaatttttcttgagggaaaagaccattattgtatgattttttcccctctgttttacagaatgcatagccatgttgggcatgcttcaagtcatactggattgctaaatgtttgggtctcttgtttatgcacctaagaacatggagcttctctttcatctttgtggtgtttgaccaaagtttgcccccaaccttacccaattacaggaaaaatagtgttcaaagtaggaagcaagttctgtgaatccacatttcctttgttgggcaatgatctagctgcatgtggcataacttttgctgacacatagggtactcactcttttctttctttttttttcttttcatgtcagaaaaaaagactatttccattcaagtcacaagtggtaaggggtggcggtggtttctctgtgaccttgggcgagtcatttcaacaccatcagttgcagtttcctcttctacaacttttccagctccaatgttcagagattctatggctttgtggccacttatcacgtctcattcaaaagatttgtttatatgacaaagggaaggcctccctaagttccctcttttttctctgctctggatctcatgatgaaggaaggagctggtgaagttaataattagaagtctggctgggcccctcctccacagtaactgtggttgcttttatctcactagtcaggactcagagcccaccttgaggataatggcttaacttgtccacaaggacatctagacgtttggggaaatcatcctgctaagtctctcttcctaccaccatgtttatcctccagggtacagaattgtctgcctgtggttttacagcacggaccacatcaagtcttctgtaaaagccttcagaaaattcaagacaaattctcatgatgctaaaggctttattagatgccttttctctttcttttgtggttgatggcaacaaggactgtttaccactgttagccataattttatgagttgttattttggtaaccttatgtttctgccatatcatttgaggtgttgcatcttgaggacagatgttttgggtaagacatgagtttgattttcactgatcaaaagttggccctttgtgttaaagggagtagaggaaactatactgtattaaggttttcaaatgcatgcttacctccctagaaagctagtctgatt

SEQ ID NO: 40758 - DNA, 1077 bp, Bovine  19866881374296
  misc_feature (1)..(1): n is a, c, g, or t
ngcgctcggcagaggcggtgtcaaaggccctccaggcgttggcgctgaaaatgggcatccagcacaggaagaagaggaccacgaatgccatgagcatgcggatgacgcgcttcttggccatgaggctggccgcggggctgctgctcctgatgcggtcggcccggccggcgctgccggtggacagctgggcgcagctccagcttccttgggtgcttgggccgctgcaggcagcacccgggcgctgtccgcgtacctgccgctgctggccgagctccgtttcctttctgggtgggcaagccacgtcacttatttttggggatgggtcatgccagacagagggcacgggatccctgcaccctccatccaggggctaaaccacacttgaactgtattacttgacaggccaccttgggcctgcactaatatgggtaggtattgatctatactactcaaatgaagtgctacttataactaataaaaaaatgtgtagtataaaatgtgcatagtttaaaatagtaaaataatattttatgtgtgtagactataaggataaaaatttgttaaagaatgagtattcacactcttcttccagctcctcaaggcggggagttttctgcttgcttgggaaacctccagattgcttttactgcataatgagcaaaaatcaacaaaagccaggcaagaccctaggtgtatatgtggtaaacagctgagcagaaggatggagtgagaggggtggtgagtgatgtcaacaaaggtgtggggtaagttccagtgaagaaaagaaaaaaaaaaaaaaaggaaaaaaaaaaaaattgtggcacatgggagctatttccctgtccagggatcaaacccaggccccctgtagtgggaattcgaagtcttagccactggagcaccatgcaagtcccaaaatcagctatgccttgtaacacatttcctttacctgtaaggaaaaggtctccagttgtatcaagaggaatggttttacatggttaaaaagactgttaagtttcctttattataaaaatacaaatctattgcggaaaaaattttggaaactatagaaaagaa

SEQ ID NO: 40759 - DNA, 1072 bp, Bovine  19866881476107
  misc_feature (1)..(1): n is a, c, g, or t
ntctccaggcaagaacactggagtgggttgccatttcccctctccaatgcatgaaagtgaaaagtgaaagtgaagtcactcagttgtgtccatggggtcgcaaagagtcagacatgacttagagactaaacaacagcaacaacatatggtcgctgatgtcagaaatcccttcctttttaaggctgactaagatcctattgtatgtatataccacattttgtttattatctcatctgtcagtggatgcttggcttgcttccattggttagctattgtgatcaattctgccgtgaacatggatgtacaaatatctcttcaagaccctgcttacaacccagaggtagaattgctggatcatatagtagatctccttcttgaatcagcatcttccagcaatgagagatatttcaagtctttttcaggatttaaaagcttctttttctttctttttcaagattatattatttttgtgacctaagcaaaataacctgtacagtacaatttagaagtttcttgaattttttgtctttggctacaatttgtacctttaaaaatgggctgtgactttgctgtttatgatagaattttgccacaatcagctctgacaaagtcaaaaaaaccatttaaaaattagtcatttttccttcctgggcttaatagacacctatttatgcaaagagagagaatgaatctttgtattttcagaaaatagggacaattatgagactgtcataatggccccatagtggccccagacagcacagtggctaacagaattttatgccattcaggaaatagggaagcaacatgagcaaggtaaagagcaaattatggatgaatttctttccctaacaaagtgtctgaagaattagacaaggaacattaagctccataagaagaatgaagaataatttgaccggttggcataatagactctgaaaattattgggaaatgaggaaggtttaactttggcccgtccagcatcctccttttattaatgaccatctctaatattttcccagcactttgcaatttacatagagcttttcttactggtggcaccctcctcct

SEQ ID NO: 40760 - DNA, 1043 bp, Bovine  19866881644313
  misc_feature (1)..(1): n is a, c, g, or t
nctggagattgtaaagacctcatcagacctactcccataatttacattttaagataacacggtcctcaggcaagacacatccttgtaaagaccaggtctactcccataattaacattttaagataacagaaggttgaatccaaagactgtccttaggcaggatacattattggtatataatcctaaggaatgtggagaaagaaaaaaagtttgtcctttcttcctccttgagaattccagacccctctctccttggggacccctagactccttatcaacctgcctaggaaatgactctctcattacgtgccagagtcctcaagcagaggcacctgcccgccattctagctgccattccccccgggcatctatcactttacctcccatcctagtcccactgtggacgtgtgctacccatgcagccacctggaatcccaccgtgaggacaccactggctatggaaaggatagtgtttccatttaacccagcagtggccagtgcttggtccaacgtgggaagccaacacccaaatggctctgtttggatcagaacctcagaaaaccttctatgaaaactcttcatcacccccagtcctcgaatcccgtccaacggctgccctgaccctccatctccctatctcccactctcctgctgtgctcccccacccaaaggcctttctcttcccagagataaaagatggcccccagagatcttagtggctgcaaagagctgaatgcgcctccctgaggtggtgggaggtctgtgaccaacctctgccaactgaatgtcctgctcccttattgtcattattctagatgttccagttatgccagctgctgcacaccattaggtcactaaaaacccagggttcacatgcctcagaggtgtggggccccagcaacactgctcttccgggaacctcttagagagttgtgcctgctggtatctgctccacccacgtgtccactagctatttggggattgtaacagctactgaatccattaaatggccccaaagtgaaagccatcgggaagcacaagtg

SEQ ID NO: 40761 - DNA, 728 bp, Bovine  19866881720511
  misc_feature (1)..(1): n is a, c, g, or t
ntattatacagagattctcggacactagccaagtcccagcgctgcagcacatcaggtacctcaagcacataaagcgtaaggaggaatttaggataaaagaccaaggcagagctttttcctccctatcactggagagaagcagtaaaggaatcttgtaaccctttgtatcaaggggatcatgtaatccttccagtattgaatggaagtcaagactgccagcgcaggaaactccagggaaatgcaaggaattagaaaaggagaagaagaggaaggaagaggaggagaattcagaaaaaaggctgttggaaatcgtacactgacaactggagcagctatgttaagggggattaaggtgcaaacgcgaagtaacctcattttatttttatacaggaaaccagagggatagctaagaaacaagctcattatttctgattcttggcttgttctagctcttaggggacactcccttcctcagtcagagagctgtttttatgacaaaggactcatatgttttctcatagctacattttccttgaatcatggttggcaattaggcattcaaatttgacatattaacctctgggacttctctgggtatgtgaagaattccctcatctgttttgctcaagatgtgggcagaagaagaagtgacaacagacagatattgcctctatttggctggagttaggaaggaaccaccgcaatcgccaaggaaatattcgccagca

SEQ ID NO: 40762 - DNA, 5049 bp, Bovine  19866880101762
  misc_feature (1)..(1): n is a, c, g, or t
nacgaacctttgttggcaagtaatgtctctgcttttaatatgctgtctaggttggtcataactttccttccaaggagtaagtgtcttttaatttcatggctacaatcaccatctgcagtgattttggagtcccagaaaataaagtctgacactgtttccactgtttccccatctatttcccatgaagtgatgggaccggatgccatgatcttcattttctgaatgttgagctttaagccaactttttcactctcctctttcactttcatcaaaaggctttttattcctcttcactttctgccatcagggtggtgtcttctgcatatctgaggttattgatatttctcccggcaatctcaattccagcttgtgcttcttccagcctagggtttctcatgatgtactctgcatataagttaaataagcagggtgacaatatacagccttgacatactccttttcctatttggaagcagtttgttgttccatgtccagttctaactgttgcttcctgacctgcatataggtttctcaaaaggcaggtcaggtggtctggtattcctatctctttcagaattttccacagtttattgtgatccacacagtcaaaattcctaggaagacacaaaccacctaaacagactgaagaagaaacagaatatctgaacagagctacaacaaagaaagaaattcaatccgtaattcttaaactttgcacaaacagaagtacaggcacagatggctttaagggtgaattctaccaaacatttcaagaagaattaataccaattttcataaattcttataaaaatagaagaagagggaatattcaaaacttatctgatgaagtcagtaacagtctagtatcaaaaccagataaagatattacaagaaaataatacatcatatatcttacgaatatacattaaaaagccctcagtaaagtactgctaaaatgaatccagcgatatataaaaacaattataaaccatgatgaagtggcatttgtttcagaaatgcaaggctactttcatattcaaaaatcaatgattgcaatgtattaataaaataaaggacaacacaacatgaatatctcagtagatgcaaaaagcacttgttaaaatccaacacctttacatgataacccaacaaacaaaaaatagaaggaaatttccacaatctaatgaatggcatctatgaaagaaccacagctaacatcatacataactgtgaaagtcttcctaagatcaggaataagacaagcatatctgctgttcctgcttttattcaacagtgtaccggaggttctagttagggcaattagacaggagaaagaaatgaaaattatccagattggaaaggaagaattaaaactctattttccaatggtatgatcctgtatatataaaatcataaggaacaattaaagtaaatgagttcaacaaggttgtacaagatcaaaatacaaaaaccgaatgcactgctatacaaaaagcaatgaaaaatccaagaatgaaagaaaaattccatttacaatagcacaaaaaaatgggaacaaggcaagaaagatgatggaagagagatattattaacaaataattctgttcatcaaaaatggtaagaaagactttattcaagactattgcaacagggacttccctggcagttcagtggttaagagtgtatgcttccaatgacggtgcatgggtttgatccgtggtaggggaactaagatcccacacaccatgtggtgcagaaaaaaaaaagaaaaagactactgcaatagaggatagagattaagctcaactctgaatataacaaggaaaagtgggatgatgtcagcaacatagtagcataagacattgtttcttttctccctccttttaagcaactagttagacatctatccatgaacaagagtctctctgttagaattttggggtccagcatcatatgccaagggccctggaaggattctcatccacttgtacattggtaacaggcagacagaccatcacatgggctgtagaatcagcaggactggtgatctgccccaacccctcttggccatggtggggttagggaaaatctgaatagtgctgacttgggcaggcacccaaggacaaaagagaattagtagaagttcagccttgctgagggagagtccagcatgccacttgagcaaaacaaaacaaatttgaggctggatttccatgactgtggggagatggaatgaaggagatcaggaaagaagcagataagaatattaaacattattaaaggatatggctcctgatgattgtgttcaggacttcagcagaaagtccattcacaagtttatgggaaaccctcactccatgatcccttcaccagttccacaatcacctgcaatgcccagagtgcaagactcacacctccccctactctccagctatttccttatacatactcctgagttcagtggcaagagcaagctccaatagaaagagtgctctcaaagtatcttaccagggtctatgtgcaagggagaaactataaacgagttgtagtgctatcttcagcaaaacaaaagagatgtttctagcagacaccctggtgagctgtaagaccagagaagacacaaaagcttaaaaattatgccataagaggaagcaagaagcatggagcatggtatgtcaacacaaagtcagagaaaatcccagatataacagatttatgagtagaatttcccacctcaagggaactaataaagatgtgaagagatgtctgatacttcttatatgaaagcagtgacacaaaacttcaaggaacattaagaattaagaaaacacatgacatcaacaaaagataatcattcaccaatagccaaaatcaaagacatgaaattttgtgatttagctgataaaagaattcaaaagagcagttttgaagaaaccaaagagcaacaagaaaacatagaaagacaattcaacaaaataaggaaaacagtacatgaacaaaatctgaatcttaatgaagagatagaaatcatgcaaaagaatcaaacagaaattctagagttgaagaattcaatgagtgaaatgaaaaacgcaatacagagcatctatctcagaatagactgagtggaagatagaacaaatgagctagaggataggaaatctgacgttaaaggataacaaagaaaaagtaatggaaaagagtgaagaaagcctatgtgatatataggattccattagacatacaaatattataataactggggttccagagggaaaagagagggatcaaagacagaaaagtagctgagaacttcccaaacttgaggagagacttgaacttcaaaattcatgattctaatcaccctattatcttaatgcaaaaagactttattaagataaatcataatgatattttcaaaaacaaagataaagagaaatcctaaaagcagccaaagaaaaagattgtgacctaaaaaagaatccccattaggttatgagcagttttctcagctgaaactctacaagccaggagagagtagaatgacacattcaaaatgttgaacgaaaaacattgccagccaagaatagtacagaaaagttatccttcagatatgaaggaggaatacagatattaccagacaaacaaaatctgaaggatttcatcaccaccagactcacatgcagaaatgctgaaaggaaaagatgttagtgacatgaaaacatataaaactgtataatacactggtaaaggtaaatacgttgatttcgaagattaattctgtaatatgatggtgtgttaaaaactatagtataaaagttaaagcaaaagagtattaaaaataactacagctactgtaatttgttaatgaatacacaatataaaaagaggcaaaatgtgatagcaaaaatacaagagggacagaaaatgggtggagcttttgtatgcaaaattaagctgctatcagttttaaatgggctgctttatctataatattctttatttaagcccagtggaagccataaaacaaaaatctatatcagactctcagaagacaaagaaaggggaaatagaggacactactacagaaaatcaccagtttttaaaaagtaagcataaatagaggaaaaaaggaacaattaaactataaaacagccagaaagcaatgaattagattcaatcagtaagtctttttatatcaataattaatcaaactataaatagattgaattcaccagtcaaaaggcacagagtggttggacagattagaaaaaaaaaaaaggaagatccaactatatactgcctccaagagactcacttcagactgaagtacacacagagactcaaagtgaaggaatgggaaaacatattccatgcaagtggaaaccaaaagaaagtggggataactatacttaatataacacaaaataagactgtacagccttttctttctctagggtatcttcccaacccagggatcaaacccagttctcccacattgcaggcagagtctttaccagctgagaaacaagggaagcctcccaaaatggtatcaagagataaataaggtcattataaaataataaagtggtcttttcactacgaagatataacactcacaatgatatgatcaaacaacatcagagaacctaattatcttcggctaatattgaaagatctgaagagagaaatagacaatacaataatattcagttcagttcagttgctcagtcgtgtcagtctctttacaaccccatgaatcacagcacgccaggcctacctgtccatcaccaactcccaaagttcacccaaactcatgtgcatcgagttggtgatgccatccagccatctcatcctctgtcacccccttctcctcctgccccaatccctcccagcatcagtcttttccaatgagtcaactcttcacatgaggtggccaaagtattggagtttcagcctcagcatcagtccttccaatgaacacccaggactgatctcctaggatggactgggtttggtctccttgcagtcctagggattcacaagagtctt

SEQ ID NO: 40763 - DNA, 3118 bp, Bovine  19866880354907
  misc_feature (1)..(1): n is a, c, g, or t
ngaggtttctatatatggctaccagaacacaatcctaaagaaaaaaatgataaactgaattccattaaaattaaaaacctatccttcagagaatgaagacacaagaaaatatctgcagactccatatctgataaaggacttgtatccagaataatatattaaaacctccctaaatttaataataaaaaaggaataatgtaatttttaagagcaaaaatttatagacacttcaccataaagatggatggataggaagtaagcacataaaaagatgttctgcatcattagtcattacagacatgcaaattaaaaccacaatgagataacactacacacattaatctggctaaaatttaaaagactgatcatatcaagtgttgacaagggtttgaaagaatcgtaacctccatacaatgctgattagaaatgaaaaattgttacaaccattttggtacgcagtttgtcgatgccttaaaatgttaaacacacatctatcatatgaatcagcaatacactcccagctgtttccccaagggaaatgaaagcatgtgtccataaaaaaaaggtgcagttgttcatagcagtattatttgcaataaccccaaactacaaacaactcatgcatctatcagaagggtagatgaacagcagtgtatccacacaatggttgctgcttggcgataaaggggtgcagtcctgacacatctgcgacatgtgcgagcctcggagtaactgtgctctgtagagggagccagacaaaaggggtaaatactgtatgagtccattgatcaaaatgctcaagaacgcagactaggctgtagtaagagacatgaagggaggaagggtccttggggagaggggtatacatatgcctaagtcttacgcacttaaaattatgtacagttcattgtatgtcaattataactcagtaacactatttaaaaatgagcacagttctggaaagactttcgagtgagctgggctgtctcagcgtgtgcacgtcctcagcttccatgcctctgcgtccctggtcatggtccccccacccccagactggaatgcccttcctctgcttgccaaagtcctcttgctcccttagccccatctcaaatgcccttgtcttccagaagtatttcctgatccttgcaatctagcagccttccttggataatctgcacttctttaatggcacacctgttctgccatgcattataattattttggttctgtccccctcactagactgtaaatggtttggacgacatccagctgctctttgtatcccaccccacatcatgcctagaaggctcctgtatccatgtatgagtatttaactatttcttttttaagaaattattttattattcttattgttattttacttatttttaatttttggccttgctgtagggcatgaaggatgctaattacccaaccagggatcgaacccacacctctgcattggaagtgttgagtcttaacccctggagccaaggaagtctcatatatggatactgtggaattcaatatctggaggacccacttctccaaagacacacacattaatccataaagccagtggtcatggtagaatgcactttcctctgctgaagtgtgaccttagttctaaggttctctccttgcgtttccatcgcacgcacctctgtacccacagacatgtcctagctggccgctctccctcccgccccctcccgccccactctcatgccaggagcagaaagctgtaattcctttatttgcaacaatttcccagttccactattttaacatgtattttctctaaaagaaaaaactaatgaagtcaaaacaaagccaaacagatctaacccacagctttgctgctgctcagagagactgagtctcctcgcacctcgctctgcaccttggcattccctgtgagaaggcggaaggctgactctcgtgtagagtggcctttggaagtgagggctggtcatctgcatgattctgattttcaccctcgcttgcaaccagcgcggaattgcatgacaatttgaaacttgtctggatagttcagatatacgttttttttacatagcaattttgtgggtagctgatttatttgtttctgctggtttaaatccttcacgtaatgaaaatgattattgctatctacacaagaggtgaaagtgtctttgagcagaggcttcgtggagaaaataattatgaagctgtcattttcataaatactttgacagtgaagtatctgcagatactctgtgggcttccctggtgtctagtagtgaagagtctgcccccaattcaggggccacagattcggtccttggtccggggagacccaacacgccccagagcagctcagcccacatgcctcgatcctgagctggcactggaagccccagtcgtgactgctgacccggatacagaaaccaagacgctgagaagcccactcgccgcaatagagacagcgtgcacgtagcaacgagtacccagcgcagccaataaataaatactcacataaatttattttttttaactacgaggttgttattattattattaaaaacactgtaatgaatgtttcaaatacagaaaaagctactggcctcaaattcaggacaaatccttggggaaatggtaagggaagttacatttgcctctagcacaccacctttctccgttctttccctgctctctgagtgtggataaatgcggtgctgggagcttgcttctaggctcagtagcactactacctgtgtgaccttggctgagccccttctctttttccaggagttagggttttggttttttatgtttaaagtgagtggttgcattaaatgatgtctaacaggtcaggaagcaagagttagaactggacatggaacaacaggctggttccaaataggagaaaggagttcgtcaaggctgtatatcatcaccctgcttatttaacttatatgcagagaacatcatgagaaacgctgggcctggaagaagcacaagctggaatcaagattgccgggagaaatatcaataacctcagatatgcagatgacaccacccttatggcagaaagtgaagaggaactaaaaaacctcttgatgaaagtgaaagtgag

SEQ ID NO: 40764 - DNA, 662 bp, Bovine  19866880550861
  misc_feature (1)..(1): n is a, c, g, or t
ntagaaataaaaatacattagaattccaccatctagcagtagccactattaaaggtgtgctacggatttgtctcttgggaagttttttatcaaccactggcttcacagatttgtgaaacaggaaacaaacgcggtctgagtcgccccttgactcccagtgatcgctgcaagtccacaggacacgttttcctgacccccttggtctgttttctccaacttcccattggatgggagagggcacctgaaaccttccttgccaggtagcaagttacatttcatttacgagcattgcgttaggagccttccagctttgtgtgtccatccacgtttccaaacaggggaagcagaggatgctgggaaacattgtttggctttgtgagagcctttgagagactgagaggggaagaaaattactcttttattatgaggtttgccaagtgatctctgagaagctgtgatatcactcacaggcccgccaagctgcgtggaaacggcgcgtcttggcagacgtctcgacagcgcctgattgctcggggctggtgtgggcctctatcagaaatggttccataggcagtatttacataaccgtggtggcgtgtgagaataaacacagctgtggcactgccctaaatatttctattcagcagggaattaaaggagaa

SEQ ID NO: 40765 - DNA, 1640 bp, Bovine  19866880560831
  misc_feature (1)..(1): n is a, c, g, or t
ntccaagtattgttcaaatacctatcattggaaaatcctacctcataactaccatgtaaagaaattcagctcaaataggcttcttgaatgcagataaaactgtagaaatgagtaacaacagtgctaagctgacaaccaaaatccagcacaactaatttagggaaaagttagtcctgtgaccattgggactatatgtggccctgtaattatggaatcacatttgacctcaatcacactagtttactatatttctccctgttgaattgatgttccaagcaaggcacaagaactcatccaaaatccccattatcaagctatgtcttcctaaaaagttatccatccaaagatatatagttaccactgagatcagcgtatatttaaatgttcttcctgctctgtttcacacagtgaagcaagccctgtttcacactcacacttgcaatctgaagcttatgaatcagaaaataatttattaatggtattagaatattcaaataatttaaaatgtaagttgttctaaaataaaatagtgctgtataatagtgaataatttttaatcctaaaattcaaaactatgatgggtactttcacaatgaaaacatagctaaattctgaactcttaaatattttattaggcaagggttcttgggcaaattatttcatctgtcttagcctctatccccccctttgtaaaacaatgacaataacataccctttattgtagagattaaatgagatagcatacgtgaaagcacctaggtgacacatgtaaaattaactaagtcatgtgatactaattaaataaatgtgaaattctgtttttaaataaaaggaaaacaatggtccatgctttaaatgaaagaacacacacatacacacatacaaatcaaaaaacaaaaaacttactttggctttcaccccattacaattctaaatcatcctcatactgttacttaagttaatataattatgtgcaaggaaaggaagaggcatttactaagcatataatgcataaaaacatgacctcctctaactcattggatcctgaaagcaatttaagtttggttttacaccatctgcaacctgtcagacttcagaagctttgaatcagcactgcaccaccttgccatacattgggcacaagtataaaaataaagagaaaaatcaaaccatgactctggactctctccagggtcttgtcttgaagttaaagtcttagaaaatgtctctcttctgcaaaataaaggagtaatcatgcccttgcccatgtgggacctctgcagtcccttcaaggttgtcctgctccactgtaaactccctgaccccaaatcacgaccctgctggtctttgtgatgttcttccctctgcctttcaaagcatgtcctcactcccttcagtttagtcaaacatcttcagtgcttcccttttattccaattacccatcaacagccatagctgattcataagtgtctcgtctccagcaaacaatacaggataactaaacactatcacaaagggaaagactggtaaggggaaaagtaagattaaggacttctgttcatcaaaaagtaacactaagacggtaaaaatgctgcaagtgtatatttgcattacataaatgtgacaaagaggagaaggca

SEQ ID NO: 40766 - DNA, 2324 bp, Bovine  19866880724865
  misc_feature (1)..(1): n is a, c, g, or t
naccgaataaagttctattgtgaagttctagatgttaggacttcaaccccacaaacgtgggagggacataaattaacccgcagcacacatattccagatgtatctattttcaaatatattgctctgttgcattcacgtagtacttttttctgttttctaaaactttacatattttccaggtagattatatattacctccattttataggtatggagtacaaggagcataaagaagataattgatattcctaaatttacacattgttgtcaacgctcatttcctccaaagtgagactatatttcctcttttccatacatgatttatttttctaacaacactttcatttctgttgctttcattcctatccaaactgaatgcttaaaagccacttaatcttgcctgttttctgtgcctataaaaattccaacttgagtctttgttattgtgtttgatctcaagaacaagatacattattcccagagactgacgctgggttctgagtcttcctgaaggcaaacgaaatgattgaaccagaagctttggttccttggagtaataggagtatccctgagcatctagctgatggattctctataattctccaggggtaaaccatacagacagtagaaaaagctaaaaaattggaagtgagacaagatttgtctaaagccccaccatggccacatagtagttgtaagtaacatctcagacttcataatacaatcttagtagcataatgggattcgtcaaaatacatataaaagatccaataaattagaaagggtttcccaggggctcagtggtaaaaaatcctcttaccaatgcagcagacagaggagactcaggtttgaaccctgagttgggaagatctcctagaggaggaaatggcaacctactccgtatccttgctgggaaaatcctatggacagacgaggttgcaaagagtgggacatgactaagcacaaacacaagcatgtcttgctttgtgctgcaagcgagaggcaggcagaggcatagtctatttcatgcgggtacccttcaggaatttcacaagccagtagcacacagagctgtttttgttgttcggtcacccaggcatgtccgactccatttgaccccacggactgcagcatgccaggcctccctgtccctcaccatctcccgaagtttgcccaagttcatgtccattgcatcggtgatgccatccagccatctcatcctcgtgcttgggttagcagggctgtttctttctagaactgagagactgtgcctgcaccttgagcgctttcaaggacatggttggagagcagagtcacatttcagaggccttctccttagaagctaagaaggctggggatatcgaagggagagaggagcagatggatggggcatgggttgggggcctggctgttcaggcagtgccgaggaggaagtgttttacgaggcagggttggcatgaggcacaggaggagctagaggtgatggtgtgggcaatggaggggcattttactggccagcctggtgcctggggcagcactaccccagggcacctgcactggctgagttcagtgggcatcccagctcccctaggagcaagggatggccctggagcgagggctggaaaataacctgagttcacagtcccgggcgtgacattagtctggagaagaggtgagcgtaggtttggtcagataggtcagtgcgtgagctgagcctgtttagatgcggataacacaggtggtcatttcagagtccctgccatcgggggacagagggacccagatgacatttttcctgcatggacggtaggctctgttagcaggtccaggcatgtggatttcacagtctagcttgatcaggaacacaagatcctgggcactgaacttgagtcatcagctcttcctttctttgagtcaggaagacatctaaaaaccaccttctccacttagcatcactttcggaaaccgaggacttcccaccattatgagggaggaaggaacagcgcccagaggcaaggccagtgctttacttttagtaagaacacatgtcttctttacttttctcattttgcttcaaaccaacgcaaactccgtggagcggcagctgcccagagcctgtggcttcaaggcggcaattaacccgaggcccggcaacgctcacctgttggccgtgtggccgccctccggagggccctggccttctaattaatggggacatagatgcctttgtggctccctcacagaggggctgaggtgattggaggcaggtgactgctggacttaacacagtgatttgatgtgtgacctttactcctcattttaag

SEQ ID NO: 40767 - DNA, 819 bp, Bovine  19866880845539
  misc_feature (1)..(1): n is a, c, g, or t
nagaaaaatctgaattagaaacacttgaattatcattgtgtgtatgtgttttgttattgtcagtttttgcacaaacgtataacaaatattaacagacctcataatcaggaataaatagaaaaacctgccagagccttcagtatggaaccaagaaaatatattccatttttgttatcttctgagcatatggaatatgttaaaataagtgaacccaacaaatacttgtaaatcacatttgtttttcttgtttccctgcccccaaaacaaaaacaaacaaaaacccactcataaatcatccattttatatataagcacagttgtaccttctccttggctgcttctgatggtgcgaactggccaaggtaagtccagctgttactggcataaagaattcagctgactccagctcggatatgtcttgggttcactaggtgtatatgtgtctctctcccactagaaagaaaagaccttgagtgcagggactgactttttttgctgctgtatcttcagcatctagttcagtgcctgacatacagaggtgcttgatcaatgatgaaggaacgaatgagaatttgagttttcacaacaggacacacagccagttttcttccccatatgattatccagttttcgacagatttttttcctctgctgtgagtatttttcaaaggccacaaacactaaagcatcatttttcacttttagataacacagctccacataagacagttttgcagtgagtatgaaatggatttacacatgtggggattttagcatttacatcctcaataagctaaagattgcattatttatttataa

SEQ ID NO: 40768 - DNA, 1261 bp, Bovine  19866880855544
  misc_feature (1)..(1): n is a, c, g, or t
naagcatagtgagccaactgaagcctctgacaacatcaccactgtgtggtcacacagtccggctggtgcctcagagaaactgattatattgtagagacgggtcttccacagagcatagaactccccctgccatgccaggctgcactaaatgatcatattcatgaggtccacacagtctttcttgtttgagagtctgagagctcaccccacacctgggtccttaaacacttggtttatggcctcttagcttccctggtggctcagatagtaaagaatctgcctgcaatgtgggagacccgggttcgatccctggatcaggaagatctcctggagaagggaatggcaaccctctccagtattcttgcgtggagaattccatggacagaggagcctggtgggctatagtccagggggttgcaaagagtcagatgcaactcagacatttcacaacagaaactggaggatcagcccagctcctctccaggaagtagttaccagagaagttccccaatgtatcaaaagaatcagaatggactgagcttggtggattacagtaagtgatcttgcctttcgatattacccaaaattttcaggaagagctaaagtcagattctggagctgtagcctcattcaaggatgtaagcaggctcagacgtagtctgtgatggatgttggacaacttaatccttcattattctaatactggtggaaactgcagcttcttcattgtgtaaaacttaatttctttgcatatgtcaagagagagcagttatatctacaaagaagcaactcagatttttatagaactgcaataatcttatcacccttggctgttctgtttacagaacagaattatttctctgattttcaccccatctggctaattccaaccctctctgatgaaaatcagctccctgttctgatcccagctctaagttccacgtctcttttcttctctttcatattatcttgttctgttcctccaatgtacatatgtaattatatgtataatatataattatacttggtcatctggttatttgtttaaagtatatctttcccagcatttctctgcataaagatcaccagaaagacaattaaaatgtagacttctggatatcctcgcagactttcagaattatggttgagggaggttggtctcaccttttttattgagtaggtgataggtctcatattttttattgacactgaagtttgagaactgcttttctaactctgtctgtgagggcagaggtcatgt

SEQ ID NO: 40769 - DNA, 1121 bp, Bovine  19866881001085
  misc_feature (1)..(1): n is a, c, g, or t
ntctaccagttttcaggcttcaaaggaaaatgcctgtttgtgaggagtgtccacagtgagccatgttttcaacttgcctccttagcgcagtaggcagcgcatcagtctcataatctgaaggtcctgagttcaaacctcagagggggcacttgtgttttgccttcatcacttcctaagagaattttcagagtaattttttttttagctattttacgttcctcttagtaactttacttgttttgacaaatattagttaataatattgaaaatgaaagtgaagaggtggccaatatcaaaggagaagccaactgaatgttgcaattataatatcactagatttcaaaatttatgtcatacatttcattaaagacatcatctcataaaggaaatgctccatggattgaaattataaaatattaattgaacatgaaactaaatatgttttataggagaaactggttgtaaagcaagataaatatactttaaaaaaaatatctttgtaagacaaccctgtggagggagtgcactcctttgataccaggaagggtactagtggtttagaaacgtatgtgtgggtattttaaggggatgtttttgaaccttaaggaacacatactgaccaagaagaaatctgtgtgtacgtgtgtatctgtatgggtgtttgagagagtgggaaagcaggcagagacctggtagggttcaatgtgtgttcaattgcaaacacagatactgggccaagtggccaatatgcttaaatatgcattaggattagcataagcaatcattctcaggcttttaagaaatggagctgtctttaaaaaggaacgttgggcaatcagtaaaaataatcaaaggaatgtgcaaaggcttcctctctatcccaactctttcacccaatcatcgggctttctttttgccccagttactctggtttgaagagatgcagaataggttgaagagaaatggagtgttctggaaaaatgtgaatggagtctgaggattaggaggtggaattaattaatcatatttttttttttctttaaaaaagtgattgagttgaaggtccatctcagtagtggtcatagtttgggatatttctaaaaagcccttgtatgatgata

SEQ ID NO: 40770 - DNA, 1095 bp, Bovine  19866881093594
  misc_feature (1)..(1): n is a, c, g, or t
ncatttggacttcatttacttttccactacagctcagctattgagtgggctcttggagcttccaaaaaccacttttattttgtgagtgggaggcttagataaccaggaatgcttaattaaatgcaatatatttttccaatgaatcccctatggtgtactcctttttaacagcattttaagcttctttaactgtaggacaactggtcttgaattgactagcagacagactcaccatagaggcatataactctgctaagaccaaagatgctctccaggggctcttcacatgttgtatttttccctcttggggtctcaataagttggagaaaatgaaaatgttctcactgcacggaggctctgttataaacttcagtcttaagagctactcaattcatgtcacagaaatcctcttgaaatactaaattctggaatcttctactagtgagaaaataacagcccatggctgatatatttttttccctgagacttttaaatgaaatgattaaccttccaatacatttgaaggacttcctaaaagggggaatgttcatgtttatctcaaggagaagctgtttgagtacctttcatatgatggctcaaattccattgactggaaggaaactgccttttcattattgcactataaacagaataatgatagttaattatttcagagttattgttagttaacatttgtccagtgctggcgttttgagaaacactagatgatagtcccattagtttctttataaagtgaaaatagtccaagttatagagtgatgaaatgtatgctaatttaacttggtgccttcaaaaattgtttagaagcaggttacttgaaaatttgagtagaaagatacattaaataccattattagtatagtctatgaagaggttttttgtttattattgtcctgtgattgtttaggagaaaggtcatgcatgtgaaaagtgctctgtaaatttcacctatgttacatgaggcagcatagcgtacaggttataagcacagactcacctgtaccccttcaggcatggaattgtgaggctaccccattcaccagctgtgtgacctgagaaagtcagttaatctct

SEQ ID NO: 40771 - DNA, 1447 bp, Bovine  19866881237383
  misc_feature (1)..(1): n is a, c, g, or t
ngtgttggataaactgtaatgttgagttcagatagtggctgctttcagctcagtttctggagggaagaagacacggagcaggaccagaacccaaccccttcatggacacacatgagagagaaatcaccctttttaagtcactaggatttgggggtccatcgcgactacagtacaactttagtcaactgataacagaaaggtaattgatacagttgattgatggagaaggctcaatgcaaagtggccttctgttgacctcagtgagtgctgaacactgaagatatgttcagagttttctggagttgctggcagtttcttccattttaaaacaagaaaagctgttctctactgtgtaaatgggccttttgattatgtcccgaacagaccaaatttgagagttcctgcatcaccccaaatatcattcctaggggtttcttttgtaagcatcaatgttgttttatttgaccatttggccattttactctgaccaaaccagggtggagacgcaagcatgagcaacctgcagggtggccagcaagccttcttagtggcattgtataaatgctttggtagtcagaaggaatgctgccactggagtgttcagatctcctccagaaaatatctgatcaagatacatgaggaaataacatgagtttgcaggagttcaaagtcatacagaagaaggggcaaaggatataactgagtcatgctaacagtgaataagagagtaaggtttagcaagcttgggctgctgaagatataagcagtttacttggctactagaaatgttgctaagggaaatctgtgtatatcctgatcttagtgaggctgtcatggtggttcttcctggattgccatgaaactttaactttccttcttccttgctctccctagtgctgacagcacagataatattttcatcatccttccttctctgcattcctttcaatgccaccccttttccattccaagatatgaaccagcatgtccctgttcttgaaaccacaaaatgctttaacacaggccagaaaggacaacaaaggctaattacaaatatcataattgacaatagcaaaaccacacacgcgaagttaaaattcctctctattttgagtgtggagcttctgggtccagctcgtcaagaaccttgcaccatttgccttcccctaaatgaaactgctttgcattggcatggacttttaatttgtctgaattttgttttgttttgggaagttggcttgaatctcctcataaaaaaagtatttcctcttacttcatgtggtttgtcccacatccagagagcatcctttgtattttgcttctgagccaatatttctttttcttctgtttttaaagctgttgttaaaagtgttgtggctctttcctcttcacctctgttaggagggattcttgtaccctggaacttcattagcctgtgaattaactc

SEQ ID NO: 40772 - DNA, 593 bp, Bovine  19866881272241
  misc_feature (1)..(1): n is a, c, g, or t
nctgtagtaacacccgagtaaaagccctggcgatgtcttacttaagactcagcagtttaaatatacctaacaacaaagacatttaccaagaagtaaagaaatatctttttctatttattgaaataattaaataaccaagagtaaaatttttaaacatacacaaaaatattaactttaaaaattaaaatatagtaaaactgtaagtatacaaactaaaattacattaactgagcaacttcaaaactatgtaagtacagggtatttatgaaattccttagaaatggaacattaattctttgaataaagtttgaaatgtgtaattttcaaactaaggaaggaagtggtatataatagatccgtccaatttataatcatccaaagggaatgattctgtgttatttcttccttgctttttctaacacccattcaattacctacggggagaaaaaatatgattatggtacattcttttgaaaacaaaagcgatagaaaaatacattgttcaaaagagcatggtagaaaatttaagacaaaaaatagcacatcagactcttaaaaaatacattttatcttaaaagtaccctttactggtg

SEQ ID NO: 40773 - DNA, 876 bp, Bovine  19866881325876
  misc_feature (1)..(1): n is a, c, g, or t
nacacctgttacacaacacgatatgcatttcctcaaggtttaaatggctctgcctcgggcacaacaacagccgcagattttgttcccgtgctgtagaggaggctgtagaaagtgatgaatgaaaaatgttctcaggaaagatcagattactgggatgcctttaagggagaaaagattcaattttgatgtgcatgtttagactgctgaccatgacttgaatgtttggaaacagaaagggagcaaagtccagcttccgctttaagtgtagttccatcaatgtttaattatggattaaactactggcatcatcctaaaataataaactctcctacgcagtgttacctcatatgtgctgtccagagggaatacactcaggccaacacttctttcaacagagggaaatgctgatgtaatggactctagctgttcagtgaatctgaattatgtgagaagagtcatatgagtttgggtggagtaaagtgggtcacagtgtgattttgtgcttgatatctctgtctcagataacggaacttcttttctctcttcaaacaaaacaaatttagttatatacaatttagttataaattatttgacttaaacgttgctcaactccagtgcttagcaaaaggtgtagaatttaataggtatttaataagagtgccgcattgtgtcgaattgcaaatgaattgatgcctcttcatcttcctccttcactcctcaacacaaaagaagaaacttaacctgctgctcggattattccatgaatataataatagtgaactatttataactttataaatagctgttttaaaaagcatagttataaaaaagcttttaaaaagtttcactttatgcttttatgatgcaaaagatttt

SEQ ID NO: 40774 - DNA, 876 bp, Bovine  19866881331792
  misc_feature (1)..(1): n is a, c, g, or t
ngctctttgagaaagaagcatgatggtggatatgaaggttctctaatgggaccaagtggtgggacaagatttcttacctttccagctctgttctggagggaccacccaaggtgagatgtgatttttaatctctgggcctactgtgatcttggcctttctgcgtaaactgtcaacaagggtgctaacgactgctaactgttatggaaaaaaacaggagtccaggcagaactgagctgagctaactgcttcatttcgctggaagcactaaatcactttctgcggccagcagctttcatctaacctcagcgtaagccgggttgaaccaatgacccacgaggcagagttaccaagcatcacattaccaagccaggaggtctgggatcacacagcctggtttacatctctcaggctgtgccccactaatgacaccactcacactgagctgggtttttcctctggtctgtgagcttagtgtcacctttcactgttgcgtccttttaaagggtgaaatctgccactggaaactactatggttcattagatgatccgcactgtattatattgtatgaatttagaaactattatcttctttccaccctttgtcttatactaagtcgcttacatgatttagagaggtagacagataaattttgtggaaaagcttaaaagcctcttagtttgaagaccagcaaaagttctctaggaactattactttgaagtgtttatattcaaaaagtgtcactgctgtcacgaggaccactcacttttttttacgaattccagtgaattcatactatatcatttgaatgagtgtgacataaactaaaggtttcctcatacagcctaaatatttaaggacaattttccagagaatt

SEQ ID NO: 40775 - DNA, 990 bp, Bovine  19866881356188
  misc_feature (1)..(1): n is a, c, g, or t
nggcagggggattctttgacagttgtcagattgtgtctagagaggatagagcgaactccttaataggaagttgaagggggaaaaaggaaattggggaacttccctggtgggccaggggttaggactctgctcttccactgcagggggcacaagttctatccttggtcagggaactaagattccccatgccacgtggcccccctccccccgccaaaaaaggaaattggggtgacatttgtttaacacagatatgattattgggtagcctacatacaataaatgtcacaaagcaccctcaggcttgtcttcctggtctagcttcaggggagcccgacagaaagaagcagtcaggagaggagtgctagaacaaaagccaaaaagctcttaacccagcttgtctactgaacttgtggccctgggaggtagccagcattgcccctgaccctgtctcagcagcaatctgcctcttcaagaaggataaggacaggcaggagcttgtgatgctcacgctgtgaggccaggaggtccaagtgagggaaggttgagcgttggggacactgtggcctgggaccatggccgcaaaccagtgccaaatttcccacgactgagacatggtggagggggaacccaactgattgctgtcttagtcttaagggtcaagacttttctgcttcggcataattaaattgccttaagactgtttctaaagggaagaaaaagaaatggaaacatggattcataaggctgcacctttccctctgtgcatattccctggggaaggtgatccattagaaacagaggcagacatgccaagagcaataaagaggcaggctctgtgcattaagcaggctgtagttaaaggctttccctgagaatcctgctcattcattaattctagccttggaagggggccaagctgtgtggtttcaccacagcaaggggcaagatcctaacgattaaatgctctttgttgccttgcgtttcactttt

SEQ ID NO: 40776 - DNA, 841 bp, Bovine  19866881497393
  misc_feature (1)..(1): n is a, c, g, or t
nctgtatcccttcttctttcctctgacatcccagagccttttattactgaggtttctatcctgttataatagtactgatacaactaaaaaacttttgtcagtatggtgtgtgaaaattgaaactcatagttcacttaattggcatttcttttattattagagaacctgcatatttatgttaggtatattctgctcctatctattacttctgtgatttgactatttacaactactgagtatattttaaaattaaagtgttgattaatttttattttagaagaaatatttatatactaagactattcatcttgcataatgtattttgaaaatatttttcctgtttgtctttggattcaattcatgcatagtacttttttgtgctacagatgtttctaattggtatgcagtcaaatatatcaataatgttctttaagatgcttcctttgtttaacttcaaaagactttccccaccctgagttcagaaaaatcttgcctatattttattttatttggtttattgtttcattttttaaacattgaattctttaatctgcctcaaactaacgttgatttatgttcagtggtagaaatttacccctccttccatagtgaaactgagtatcaagtaacatttattaaaagtatattctgatttaaatccattaagggtatgtttcttcccccattgtagagcgttgatatgatgtggagtaaagaacatagactcgacaatccaaatgaccttgccttacctttctattataatttgctagctgacggccaagacaatttacttaaaattctcatttacttcatagtattaagtaagcctaatagtatt

SEQ ID NO: 40777 - DNA, 1150 bp, Bovine  19866881595968
  misc_feature (1)..(1): n is a, c, g, or t
nagttgggactccctgagaaaatctggctgcaggcttttcatccaagaggcacccgttctgctcaggctagcagcaccctggccccagccagtgcgtcgtcgtggagaagccctcctccagccccaggcgcgagagccgagatcaaagcgcaaagcacaaatgctgctctgatcaaaacacagctttcggcgtttgatgtggcccagcctctattgaggtaaggacaatggagtagtgtggccaggggactttggcaataagtataaagcaaggtgcactccatcaaataagaacgagagaaagcgagagagacagaaagagaggaggagagaaaaggaatgaagggagcaggaagaagggaagtaaaccgaagtcagctaggaccccggggagcagctaggggacctccagcaaaggaaagcactgtatacttgcccagggtccctttctgtggaggaacggtctgagcaatcagatgagcgagtcttcatcccagtctcactctgccattagccaccaagctggctttaccagtcgcgcaccttctaggtcaactccccagaggccgactccagccctttccagccatctaacacttagagtccatggctactgacaggagatgctgcttcatcctggcaaaccaccttctttcttggaggaaaggatctctgatatcctgtgtggcaatgagacaaagggagggtgtctgagccagtccttaaatctccctgaggtagtacctggccctgctcacttccactttcaaaactctcaatatgctatggaattaagatatagcaaagcaggatgaccaaaactctcaaatagtctaaaacacacatacttcacaattacccttatttactaccaaaataaaacctcatttggggacaatgtcaggagactcaacgtgaggccttttatgaacacgaggccggagctgaacagcccacctgctcttcctcctaagcctggccatttctgcaccccaggagcttagcacgttgctgtcacatggtgggtaataaagaagtacatgcaaaatgaatcaaagcacacaggggatgcatcaacggtctgcacgcctttgggctctgcacacttcattaggaaaacgataagaaggcaatatagttatctgagaag

SEQ ID NO: 40778 - DNA, 1066 bp, Bovine  19866881715984
  misc_feature (1)..(1): n is a, c, g, or t
ncagtttactagtcctaatattttatttgtgaattctttaggtttttctctatataatatcacgtcctctagagatagttttactacttcttattctatttgtatatccttttatttctttctttcctctctccttccttgctttcttccttcttctccccatccctgaacaattgtcctggctcaaacttccagtaaaatatttattacttatcttgttactgatttgaggcataaagttttaacatgaagtatggctgatgaagatttctcatagatgcactttattaggttgatacagtttccttctctttccagttacttgaacgttttcagctctcttgactacacagcctcaagtgcagcaccctagtgcgcagtcagaggcggagggtcagggagggtaaagtgtccccaaaacgaatcagaattatgccgtctctagtttttaccacatataacttgagaggcttaattagtttagctcctgccaaaatggagagcgtcctcaagtcacagagagaaaggtctgccttgttatcactcacctatctgtgttgagtgttgtgactcacatggcaaggcatagctgaaagtctgctgaaattctaaaaatgaataatgcacgatacagtgctgtgtcccagaacttgttttattatctaaattttgcacacattaatatgcctcccaagaaggtgacttgtttctgaaatatcacaagaaaatgcaagagaaacaagaactgcatagggaataaaaggttatgccaaattattgcactgctttggtaagtgaatttgaattagtaactgaatctatttcagtataaattttatttagagaaaaatctgtttcttcctacccaaataagtagctattgaacatttgtctgaaataccaaattattagctactgagattgcctgcatggcttgctgtgaacctgcagaaaaatctaagaagtaagcagtgaaatgatggaacgaggttgtgtggacctgttccccccctgtgtgagttgcaaattatgcctagggttcttgggaacaaagacaccacttaag

SEQ ID NO: 40779 - DNA, 1117 bp, Bovine  19866881879193
  misc_feature (1)..(1): n is a, c, g, or t
ncagtataggcatattattcagaatattagaatacgtattctagtttgtaaaaatatgtatcccgtattttaaatagtctgcccacactgctattagaatattctaaataatatgcctatattgcgatatattctaatattctggggaacaggagagaagatatgagggagggtaggtgaaggaatgctataaacatgaattattttgacttagaaaaattctaaaaatgaagtagagaacagagcaaaaaagaaaagccattaacttgatcttctacgcagacgaaagggtgttgcagacgaaagtgcatgaggcgcagggccccaaagaaccatttaattcctgggttttccgttcccctctccttgtgtggtcctcccgggcacgtcacctcttctgggaagcactcctttccacttcatatggacttagtaccttcagatattccctaagttctgttacaagatttcctcctttgcaatttatatgcttatagaacttatctgtaatttatataaatgcagtttattactctacacctgtctccccctccaggctgttccattttagaagagcaggaatttcatttcattcctctatagatttctgcttcaatctaccaacaaggtccaccttactaaccatcctaagacaaatggttttcttcctttgtttctgctttggttgcaccgggtctctgccgcagcgtgcgagctctctctctcggcagcgctgggctcctctggtcgcaggggctccacagggtctctttagttgcagcaccggctgcacggaggggcttggctccccgaccagggatcgaatagacccacaccccctgcatcggaaggtggattcttagccactggaccaccaggaaagtgccgaaaaattattttaacgactagttgtgtaacaattttacaccgtaactcgtaattcaaactgcctccccttttttttcttcttcttcatattttatcatctctgaattggggaatggccttaaagtttctgaaggcctggatggaaaccaagttcttacatagagtattcataatttttcctctcattcatcaagggccctcccagtctgaggacactttagattatcta

SEQ ID NO: 40780 - DNA, 661 bp, Bovine  19866881973245
  misc_feature (1)..(1): n is a, c, g, or t
nggaagtatttacatgtatatatgaaatctgcatgcagtgggggagacccaggtctgatccctgggccaggaagatcccctggagaagggcagggctacccactccagtattcctgcctgtgaatgacaagagtcagacatgcctgagtgaccgacacacacgtacacgggtcctaaagggacgcgtaggctgcagatcactcaggactgagtcaaccctgcttccatttcagggcacgctgggaataaaaaatctccttggcaacataatcttactcctgcccacatgcaattctataacccagaaagaaaaggagaaccctgctgaagggagaggcatccagtggcacgctggctcacagtaggtctacactcagtaagtggactgagcgcttagtgaggaaaaacaatccagacaacttctttgagagtggacgagcccgacgtttctggagctggggggacggggcgggggaaggagcagccagccaggccgcggacggggctattttcagcaggccgggccttcctaacggcggtcttgttcccagctgaactgcccaccgcttgatgaattgtgtttatctgtagttcagcgataaagttctcctttaattccctgctgaatagaaatatttagggcaggccacagctttcagca

SEQ ID NO: 40781 - DNA, 1235 bp, Bovine  19866880362906
  misc_feature (1)..(1): n is a, c, g, or t
nactgcagctcccagcagcgagccgggcctgcctccctgagtccccgggcagcaggccctggcagaggccagcgagctccatcccagaagtcacaaacctctagaggagatggttagaaaaaacgttttttaagaaccagtggaaagatgccggcaacccttcaccagtgacacaaccttcgctagtgtaacaacacacaaatgcagtgcatagggcaaaaactcctgtcttcccaacaatactggcagtaatttttaaccagcattctgcagcaaaaggtcatctattccacatacttttgcgtgaacttatcattttctctccgactcagagaagctaccgcctgatctgtatttttctgaggggaagccaggggtcctgtgcagggatttctgtgcccgtggatgcgcatgtactggctaggaaaaagaccctgctggtatcagtggtgacttctgccactaggaaatggatcacaggctcttccggagagtggggacttcttcccagccagaccagtcatcacagaatcctgtgcaggtcgccttcgtctcccagattaacttctaaagtgccctcccctgaaatcagaccactcaacaccccgggcagctaaaacagtccaggcctgattctcgccaagaaatgttttcttgaaggagaggaggaggaggagatgaaataggggtgaaagatacaagaggcgtgtgtgtctgtgaattactgataggagttcacactgggggaaaacaacatgtgaaaagccaccaaaccaaccctggttcacggtttacgttttatgatgatgaacgggggagtctgctatttgcttaatggcctcaggtaagacaaatccttcaggtttccaaatgggtggctcctctccatccagggttctatagaatttttttttttccccaaggagtccatctgtacttaagagagtcatcaattccagtcagtagctgccacatccctccctgcaccctcagggctattaatatcagggttccgattgttaatgattttactcaaagttccctgcagcagttaaaaccaggcaacaagctaaaacacaaaggggctgcttttcttcacccataataacgcattctgcaatccagtgaacttcctggggtttcatgtctgccgagattttcacctctatcttttgttttggaatgcccataagccctccctgcacggaccggcacggccttcctttctggatgca

SEQ ID NO: 40782 - DNA, 1221 bp, Bovine  19866880472693
  misc_feature (1)..(1): n is a, c, g, or t
nctacttctctgggcactaaaaggaaaaactattcaagaaggtctacacaagtatctctcagatagctgttaatgtctgggaagacccacacatctctgaaatctaacaagccaacacttaaaggaaccataatctatgcaattctgtgaaaattaaaactcttaccatttatctcatcacaaggatccttacatccctggatgatggctttcttgtgactttttcaaagcccacagcctacatctttattctaaaagagaaatatggataacacattaacaggaacaaacttattcattcccaagaacataatttaaaacgttgagcctcagcaagttagaattcctcacaacagaagtcttttcagacagggataactttaaatcatcctcagctcaaccagtaaggaacatttctaaatctcaatcaactttaaagctcaagttccaagtctcccttttacccgtgaatgcagtggcatccactttggtttcaaagagcgacacctagtggccccaattacactggcacagagaccatcctcatttctggattctgggtaggacccccaactggtcctgagtcagccaggattcagagctgcggtgtgtggcaggctttaagaccatctcggctttctcatttctgttgcccacccaagttcctgcctacatgcatccttacctatttcagacttccattcgttacttctaagcaggtctgctgctcaccgtctctgcagatgccaaagaaagcctgtggacaataaaaacgtaagcatgttaagggtcgctataaaactgcagccttccaaacaaagtctaccacgccactgattatcagctgtagaattaagtgaaaattgattggggctgtcctctacgctctccaacaggaagccaaatatttagacgttaataccctggatgcgagcttgccccgtgggaggacctgggggccagcagggccgctgagcctggaagctcagcgcttgggtggccgtgaggcctgggaggtgcgcaggatggaagagacgctctcccccaggagggacgctccgatgccaaaggtgggcttgggctctctctcccttcagtaacaaaaactcacaccctttggaaagtgttttctcacctcagttaatcctcccaaccacctatgggggtgggggttgggggaaccaggcctagcgtcactatttcgccttcaagcagcggaag

SEQ ID NO: 40783 - DNA, 864 bp, Bovine  19866880535591
  misc_feature (1)..(1): n is a, c, g, or t
ntgtgagaggagtccctgcaccactgctcgctacttcacagatatactggtgaggacaaatgaggtgatgggtctgaaaatacattggaaaaaagcatcatagtgaaggacagctatgaaaaacgcaatctggctttaaatggggaatctctgactttggagatcttacacggcaataagaatactaatttctacttggctggtgaacaccaacatgcagagcatgtccatttgtcgggtttcctttaatgccacaaccaggtgggtattatgatgaggaggtaacaggggctatttattgagcacttactataggatctcataaatccttgggataccattctgaggttggcactgtttttatctccatatcctcaatgaggaattgctgcccaaggctgcccagcggagtgggtagcaggaccaggaaggagccggagcagctcccacattgatgacttccccagtccatctcagaggctgctctgctggggatggtggcctgggacccagcgggtccgctgcccaacaacacccagcaccacgttatggccccaaggaaggacggtcctgccaggtccctcttctgagccgtgagagtctaagggcctgcactctgccccttcatcctggggtctctcccaggcccctgtgtttactcctgaccctctcagtcccggcctgcgctgctgctgggagaagcctcagcggccagccttggggagtttctcagcttccagaggcatctgggcttccaagagagcctgaaataggcctgtctgcgttgggggaaggcggcagttacaactgggaggggagccttcctggagcatgggtgctccctctgggactcttcctgcaggg

SEQ ID NO: 40784 - DNA, 1835 bp, Bovine  19866880845656
  misc_feature (1)..(1): n is a, c, g, or t
nctccatgagaagagtcctaacaggtcatcaggtggcaatgtgctcccagccaagagatcggagtgggctgggtgggtagtggtggcgatgctctggactatggcaacagcatatgtgacagcagagagggaaaacacaggatccgggagcagagaggtgggtctttagcaaagattcccacgtttacattggatatggtaatttgagagtcactgtagggtcctgcgctagggaacgtcatgaagacttgttgctgttgttgtcatgccacgtagcttatgctttgctcgcgggatcttagttccccaaccagggcaaactcctactcatcctccaaaaccccatgtcaaatgtctcttctttttgccaacactttcactaatcaccttatctattccaggcagaatgtgtttataactcttaaacctaattctgttaaagcatatattgaaatatgagttatttgcttatacatttatttccactgatagattaggaaacactcaaacaggagccactgactgatttagctttatttccctggagcctattgaggtcttcagaaaatgttaattgattgaataaattaaagaaagagaacgaaacacaaacttgcctgtcttaatgatatcctaagtccagaaaggaattcatgagcagacctctttccacatctagctggttgatttatccaaagagcaactgggaggctggctgcctctccccaccttgccctgcccccaggagctctttttcatggtccctgttattttaattggttgcaatacttccctgtcccatgtctactagtttagctaatttttctaaatctgtcacttcttgtggagttggcggaatgagattttcttaaaaatgggagaaaatggcgagcaggagagaggcctggttgcagccccagctggagccagagagtaggtacagaggcaggggtggggctaggtagggaaactgagtcagggagaagaagtctgtctgccctcctggggcttctccccggcctgggcagagcctcctgagacaggagagcttcctgagctctgagcatcacagaaacaactcctggcctccagcccctccctatcccccacccccaccgccacccccaagcctttgaaaccctagtgtgtgcttagctgctcagtcatacctgactctttgcaaccccatggacaacggagactggcgggctacagtccatggggattctccaggcaagaatactagagagagttgccatgccctcctccaggggatcttccccaacccagggattgaacccaggtctcccgcattgtaggtggattctttaccatctgagccaccagggaagcccaagaatattggagtgggtagcctatcctttctctaggggatcttcctgatccagggatcaaaccggggtctcctgcgttgcaagtggattatttaccagctgagcccccagggaagcccagaggggagatcattttgttttgcagccagcaaagacttgtccttacaatggtcagattttcacactcaagaatccatgagctttctggatagaaaacccccacctcttttaagatgcaccagatactgattaagaattttgtgggtattgagggggttgggtggacataccatgtcacatctacacatttgattaaagtatacatcccaggactcccctggcagtccagcggttaagactccgtggttccatggcagggtgcgcggcttagatccctggtgggggaaccaagattacacacgccaggtggcccccccaaaagggggaaaaaaaaaaaaaaaagtatatcccgattacaga

SEQ ID NO: 40785 - DNA, 783 bp, Bovine  19866880863244
  misc_feature (1)..(1): n is a, c, g, or t
ngaagcaggtgaggtactcgacccagggccagtggatggggtagatgtacagccagatgaccagcgaggcaaagaggccggcgaagaccaccagcgacaccaggatgagggcgcgcttgcggtacttgtcgctcgtgccgaaggtgatgtagggcaggaaggcgaaggccagcagcagcccgctgaggaagccgaagatgtgggcgatgttgtcgatccagggcaggaggccgcagatgaagaggaacagcacgatggccgacaggttcaggaaggccttccagggccgctccagcagctgccagctctggaagagctccacgaagaggcaggccaggaggccgaactgcgaccctgcagggcccacctggggcgggtgggcggggcacggacacggtcacttccaggcgccgggtgggagcccgcggggagccctgggcacagccaggctggagccctgggacccaggtcatcctgtccgtgaggccctcccagggtgcggaccccgaagctgagggctgaggtgcagccagcgccgccggaacccagctggactcgttccgcccaccctacgtgcacagtgggcacagcaagcaggacagccagcctgctccgggcagcgcacgtggcggggacagacgctgaatcagcccggagcgtgaggtggaactgacccacaaaccctgctttcttagcaagaaaggccacacgagggcgacttcatatgacccagcctgtagctaaggggcgtgctggccggcggtggttgtgatcactgggaga

SEQ ID NO: 40786 - DNA, 1708 bp, Bovine  19866881194281
  misc_feature (1)..(1): n is a, c, g, or t
ntgtggggatcccaattccaaaacccagctggaactgcccaagccacacagccccccatcctaaggtgtgggccgctgttggtaacatacgggggacaggcattattgggagggaaatgccaccagatggccccaaccgaccacgatgctgtgccctgtccaccacagtgccctccccaaggccccactggcctccaggagctgctgatggaagcagaccagggacacagctgggcagagaccttccagacctcaggaaagtagtagcctctagcagctgggggccgaaggctgctcaaggacaacagcgggaagggatggagtggctgggtcctgagatgctctgcccggcagcctggcctcctctgggaaggtggtctattccctcctggttctactgctcctggagcatagccagaaggctctggtccatccaggctggataccagggcacaggagggagcctgagggggtgggggtacctgcaccaccgggcaccacactcacccagacctgtcgtgaaccaggctttgctccagacactcctgaggagtgtgcctctctcggaatcttcaggcactgggagctgggtttccactggtcctcggaaccggtaggacctagcagacgctcagtggtgggaggggatgggtgcaacacgggtcggggaggaggagaggcccacatccctcccgccaggggctccagaccccgaggcgtttgcagacacaaccaaccccggcacacagaacaggcctctgtggtgtgctcgcgagggcggaggccacccagtttccatccccgccttgtggcctggctccagacaatgagaacgctgtcctactcggggagacggggtcagaggcccggccctgagcgctgtgtgatattaagcaagccacttggcgtctctgagcttcggtgtgttatggggtcgccctgggaggctggggagccgagggacaaagcctgatattccacagagaggttaaacgcttcgcccgctgtcactcagccactgtcgggccctgggctgcctggggtcgctcacctcaacacgctcaggacagggtgcagggtgccccacactcctggaggctggggtcggccgttagcacagagtgaagatgccaggcagacacttttcagcttgtaaacagtcattaaggagctaataaaccagacttcccagaatcctgccctggggcttgctccgtccctggaagaagctggccccagtcccgatgcctgctgcgagggctctgggacacgtagacgtgggccagccaggcccctcagaccagaggggctctccacacgcattaccagctctatctctccaccttgctttggagccactgaggtcctctcattgagaaatgggagctgagggggctcatactctagcttggccacctatccactggaagaatgagcaagttatgacttctgagcctcagtgttctctgctgtgaaatggggtgatgcagcagagatgacatgagatcgtgaatgcccagtgcctgggaaaattggtggagggtaatgtgtagcttcttttattcctggctggcctccgccaccatggctgacttggtttctacatctgagccaagtgccccggaggcagcagatctttgacaggtggggaaactgaggctcggagaggtaaaggcaactgtccgaggtcacacggttaggccgtggg

SEQ ID NO: 40787 - DNA, 871 bp, Bovine  19866881492097
  misc_feature (1)..(1): n is a, c, g, or t
nagccgggttcggctgatgcctaggtcaggtcgcagggctgtggccagggcaggactcatccacagtggcccccacgtggtccccaagaaagggtctgcagtgccactgcccccactcttagggatttcagcaccagtgaggggctggcttttatgcctggctggctccccagatagacaggctccatgcaaccggggttgggggggtcaccctgggcagtggggagggattctctcagtccagctgggctagaagggatgcggagagagaatgaggtccactccttgtgtgaaattgaatcagactgctgggggtggcatatgtatatttaatagcttgtctgctgtaagacagtactgaaaaccccaaaatatgacccgttctgggaaattcagttggtgggccaggcagagaagcagttcctctggggctggcctctgctagccagtgccagtgtgaaggcagagagccccttcgtggtggatattgcagctagcagaaccccagagttaatctgggccacagcccctgcggaggggcttctcctggtcacccccacccccacccctcagccccaagcctcacctccaccttccctgagcagtcagggaacttggggtcactaggtgcgtcacactggtcccgccggccttcagacactgcagagagagaaggccagcttgctgaggacctgggcccgggaaggagcccggcagagaaagcgcaaggcgggtgggaaggggaagcgtgggcacacatagtgcccttgacctgagttttcttccctgaaaggccacctgccagtggtggcctgggcatgagttgccccctctgccaccatgcccaccctccttaggcggttcaggccaa

SEQ ID NO: 40788 - DNA, 1430 bp, Bovine  19866881672112
  misc_feature (1)..(1): n is a, c, g, or t
ntggcctcctgctttttctcccagtttgccactgcatggagcacttgcagatttttaaataaaatcttattatcatgtctccagcggggttttgtttttgtgttaaacctgagggagggaattccctggtgggccagtgcttaggactctgagctttcactgccaaggctctgggttcagtccctaaacttggggaacttagatcccacgagcctaaacagactaaattattaaacaacaacaaaaaaaacggaattggatctaaataagttaaaacttgaggtaaaatcaacaagctaacctttttgcaagtggctaccccagcgctgcacacgtgcccggctcccgggaggcctgtctgcgtcccgggcctttaaaccccagagccctgttgtccacgtgctgctagcccaagcgtcactggggcggcattaagagggatggtttctgggcagacagtgaaatcctgaggctcttgcgactctgtctgaagtccctgcccgctgcagctgatgcccctgttatgttctttgtgtctccaagcagcctggcacttgcttaaatgtgacagaagtggaggacccacattcctttctgtcatctcttccgcattctctggggtctggttggaatcccgtgggggctattcgggtgtcctaatcagatgaatcgaccagattggatcatgcatttctgagccctagttgtcctttccagcctcagatttctcttcttgccttgtttccattgttgtagacttatatctgcccctggggtatggttttgtatttgtactctataaggaaagtctttagagaaggccctgccgttatttcagcctggggccctgggggttctgcttgtaacctttcattcccctttgcagcagccgtgctgtctacctgctgatcacaggcggttgtacttttccttgacaggattagggacacttgtggaggccgtgctcacccctaagctgaagctctccctgaggtggctcctgtggcagctgttggcagccactcacctcagtcttcctgtcttctgctcctaccttctcctttgtcttctttgaatttggataatcctctctggcccaagctcatgcctccggtcaaatgctgttttttctctgctaaccgagactagattgtcaagaagttaaaaaaaattcagcatgctcagcgaagcactgaaggccgctgtgacatcaggtgagaaggttctgtgcttctttaaaacctcgccggtcgaccacctgcaagcctggagggctgtggtcctttgaacgccttgtcgccttgctggagttggtgaggggctcccaccatccgcatgtggccggctgcacgcaagcaagagacgccaagagtggtgagtggactctgagtcctatgtgaaccagttatgtaaacgaaggaccacgagag

SEQ ID NO: 40789 - DNA, 1739 bp, Bovine  19866881704401
  misc_feature (1)..(1): n is a, c, g, or t
ngctctgggctcaggctgaaggggaaggcatgccacacaaagatggacggacagctggatccagaggaggtgtgaggctggaggaagctggaggtagggacgcagatgcagcactgatggggtgggagggcacagggggtagcaggcctggggagccaggaaataggccaggtgtgctgtgggtggggctgaaggtccatcccaagcctgcgaaagatgcctgggggtggggcagggcctgaggctttggaagcaagtccacggtctggagtcgcagtcatgctgggggaggtttcaggaaatgcccaaagtgaagagagttggaacaagcaaaagggagacaattcaacccaaggtccaggtggtccctgcagcctccgaccatagtccccaagggtggaagggagagggaatttgggaaagctaataggaggcctcaacagggtcccccagcctggccttccctcaggccccccaccctttctgcccagagggacaaggttgacccctcacacatcactccccactctgtggaccgttcaatgggccatcgagcaagtatcaccccgcttcctctgtcatataccccagagggcccctcctggtcccaagaaggacaagggccctctctccatctggctcagatctggtcttgcacagagcaagggacctctgaccacctgctcctgggccactcagtgggacccttgtaccaacccccagctgtttggccactgtgctgccatgcgcccctgggaggagcatgaggagcctgcctggggtgggcaccaggtgcttggcagagtctcccccctccctagacctacacaccaatctgccctgcccacgtcccagtcaaggaagaaggcttcagttcgggggcgtcgaagggatggagggtcactggagctcggaatctgctggtgctttctcctgcagtggggagggccagccgggcggtcaccctcacagacagtcctggcacaaggccacctggcccttgcggaagtctcggcaggggcagagccgccgatatttcgtgctggagccggcacagctgaagagcagaggttccttctgcaggaagcactcctggccgggctgggcaaaggccgggtacaggtggttcatctctgactcaatgccgtcgcagggcacctgcagcctgggtgggcaccaccggaggcggtcactcagtgggcactgcccattccccccaccccggcccacccattctggacccagggatgtttctaggaggcgctgggataaacgctggggtgggcagctcctgacagtgggcaggagggcagggccacaggctgatgcatcaggagaaatcgggcagtttctgcagcctggacctagaagatgcccagacagcctgggcaggggtgtagagctgcaatgtggaaacctgcctggaaggtcccttccagatccttcctctctgggaagcactgagtccccctcacccttgctggcaggccagggggcaaggcagtcaagggagtgaggggctacaggtgaggtcagctgggccgggtcaggcagggggctcactcacttctggaaggcgtcctggctgttgaggaaagggaagaaagagggctcacagatcagcccgtggtccaggcaggcgtccgtgcaggccctccccgcagcagccagccaggcccggagggagtgcgctgaggccaggcccccggggccaagcggcattgcgggcccattcaagg

SEQ ID NO: 40790 - DNA, 752 bp, Bovine  19866881738069
  misc_feature (1)..(1): n is a, c, g, or t
ncgggagctcccagtgcatcagctgtgccgtggtgggcaacgggggcatcctgaacaactcccacgtgggcccagagatagacagccacgactacgtgttccggtgagcctgcacctgccccaacccccacccttctcctgcagagcagggctcttccgggagatctcagagggtgctccctgcctggatccagaagctgtggaggagggtcctgggctggctagtgccacccccccatcccttcttccttccccgaccatctccatgcatcatccggaagccctcatgtgctccgattttgtctttcgggctaggctgagtggagccatcattaaaggctatgaacacgatgtgggtactcggacctccttctacggctttaccgccttctctctgacccagtcactccttatactgggcagtcggggtttcccgcatgcgcctctggggcaggtgagcaaagaggagcgggtctggccacccacagactttggatacgggaggatgcaggtgagacagggagacggacagggagaccgggagcattctgagtctagagcctgttgtcggtacagtctccgggcatgtgaggggcaagggcggggagggcagccatgccagactggaggagagcaagcaggcggtctggggtcaaagtcaggccaccccactgaaggcaggactcctggaccacacactgtccttggtcctcaggacgtccgctacctgcacttcctggaaggcacccggg

SEQ ID NO: 40791 - DNA, 751 bp, Bovine  19866881928632
  misc_feature (1)..(1): n is a, c, g, or t
nggcttgttgggtttatgatcagagcaggaaagggtgttcaacgtgttgtcatcacagaattaaagttataaacaggaccaggttcttacaaatttgtccccatctttcccaccacgtacgtgacccctgagtcagaagtttctcgctctctcaaaggcttcataattaacagcctcatattttggacctggagacattaggtgggtgatcctgttagcagccaggaataaatgcagaggtggtgcatctggtctttgggatctgtttaggtttctaaataactctggtttaaatacttagaggttgaccagcaggttccatctcttgccctctcgatttacctgcttgccttcatctgtctccaaattcaactaaagtgttataaaaataagagggggctgtcgaggacgcatccagtgaatttccaggttggactgcgggagggaagggcaccagcaggtgaaggcggaggagcctcaccagcgccagcaggcgcagaggagtgggccatcaactggagtcgtaccgttggctctcagaatcctcccttaagtgggtgtgatcagggaatcctgtttacttgtctacagaccagtcatcccttcctaactccctgggatggtcatgtggctttactctagaaggctggtcccctattttgtctttgcccaattttttgcattctaaaaggccaaccaaaactcgtgtagattggatggaacttctgcccatttcctagtatcagtctac

SEQ ID NO: 40792 - DNA, 1069 bp, Bovine  19866880690725
  misc_feature (1)..(1): n is a, c, g, or t
ncatctatgattgtgctatttcagaaggctctcttgtctctgagtgatagcatttaaaaaaaatatactattcagtttatattaaatggctactgttctaaggcatttcttctgttgcttatttaataagtaactggtatttaactcaactggattactaactccttgaaattggcactttgcaatatactttttttctattttccatagtacctaacacaatgctgtgtgtttaaaagtatttaaattcttattaattaataaaagaagctattcctcagtatatctggatgggcagagacttctttatatgtataaatttactattttaactaacttaagaagtcactgttctctgaaaactgtaataaaaaataggaacagaaaaaatgaacaaaccaaatacctaggaaaaagagattattattttccaggcatggcctaattttagtttaccttcagcatttgatgagagattttggggggtcacattggatatatttttaaaacctaatgttgaatatcattccctttcagagtagtgtgtttaatacttgtccttccagattgagcagtttaatgctgaagaggaggcatttggttggctaccttcaatatatcctcagcgtaaaaaaatccaagatggtttgaacccttatctccgtctctatgaaactgctgtagaatttagcaccaaatatagagcatggacagaaggaccatataacaaggtgaatccagaccaagtagaaacagacgttggaaattactggagaggactctataagctggagaaaacctttcacgattctcccaatgcgttggcaatgaccaaaaaagtaagagcaaaggtggaagatttcaagcagcacattcctctcattcaagtgatttgtaatcctggtttgcgccccaggcactgggaggccatgtccagcatcgttggttatccgctgcagccagcagatgattccactgtcttctctttcttagatatgaatctggagccatatttagataggtttgagggtattagtgaagcagctagcaaagaatattctctcgaaaa

SEQ ID NO: 40793 - DNA, 1018 bp, Bovine  19866880716743
  misc_feature (1)..(1): n is a, c, g, or t
nattcttgataactggattcttttagtgtgtagggggggggaagagaattcttatcctttagacgaaatttctagttactaaaaaatatttttacaggcttctatgttagagagccaatgaagaagttatgggattggatcttagcaaaatttatagctgtttggacagcctgtgaaagtgattctttgaaaaactgtgtgtgtagcagatgttcaataaatattggccagatgattgatctaaggaagaagccaaagaaagaggaataattcctttgtatccagtagaatattcagtagaattacatagataaagtaatataaatcaagaagttgcaaagcttcatttttatttagtgtccttttggatcagtggtcaacctgaatggccatggatttgcctgacacagggaacatgggtttgttcgagcttaatataaatataggtgtttgtaaagaaagtgttctaatctttgttgtggaaagagtaaaagataaggcaggttcctgaagacaaggttgggtttaaaagcggaagaataaatagtgaatttaagagcaccctgaaaatcatggtataagtttgggcccattttgtccatgcacatggttatttttttaacctctcattatttgggaagaataaagtcaccaaatccagcattattttgaccatgtgaatttgccttcctaattaaagctaattactgcttcactgataatccagataagaaagttaaagcttggtgcctttaataaacactgctgaatttagaagaagactagattagccaaaatcttattttataacttgaaattctaaaaagcaatagaaaatcagccccttagcatttcctgaaatattccagtccatctgcttaaaaaaattactgccaaatactttaatttgttagttagaaataaaacatgttcactcttaaagctgtgaactccttcaccttccattgaggtgtatatagaaccacctctgcaggaagggtgttaggatgccaggcaa

SEQ ID NO: 40794 - DNA, 1413 bp, Bovine  19866880822842
  misc_feature (1)..(1): n is a, c, g, or t
ncttagttccccgaccgggatagaacctgcaccccctgcattggcaagcagattcttaaccctggaccaccagggaagtcccctaaaaagtattatttatggaacagtatttcatgctatttcttagaatagctttaatgtagatgacacgtaagtaggttttgaggtaagtagtccattagagtccacttaatttcgcttgcacaaattttagttagatttttcttttaaaatgggtcatcgctagaagcaattcatttatttggcaggatattcttagcatatggatttactgcaaaagtgagaattctaaaatgcttctttaattttaaaacttgttttcctgatatttgctgggggaaataaactataagctgcttaaattttatttaaagaaaacaaaatttatttattattgatattttgaaatatatataaaagtagtttttaaacagcatgattttgaaagtagggaatgtaattcagcatatcacagtataatatagtattgtgactgttggaatgtactatgtatcatttccctttgctatcttgaaagacatgtttaaatctataacagattatctttaattgttcacagccagttgatactatttttgaataaagttaactttattttgaatttttggtttccttattattaattttaccctgtcagttgttaaagatcattcattaacatatttgaagctgttcttagcagaaagcagtttttggtcagaaaataaagattaaaaagtgaggagtcagtttttgagggattttcattagttttgtgaaatcaaatgttagtttggttacaataacgcctgtttccattggaagtgagttttaaagttgagaaagttgacctttaattctctttgctcatttagtcttctactttctttgatgataaggacataagaaattaaaaaagagaagaactttttttttttttgattcagcatctctaaaatgtgttcatttgttccataagaattcttgcttcatttgctgtttcttggggctgagtgccaaaagagaatatgtatgccatctgctttgtcatcatcaatgtagattaaattcccccaatttaggttgtgttcccagtgatttaacaggaagcttttggtgctttttattcttggtctttggattcactggcttattttgtgggtgagttgaagatgatctttacatgcacaaagatgcatgaggttacgcagctatccgtcttgtagacacttaggttggactttgttgttaactgggtgggaagcactgggctaaagacagctttgaattttactgcaggatttctcaactttctctgaagaaacagttgaaatcttgcttcaaaaaaaattgaaaacacagaaattagcacatagctcaatgtattcgcta

SEQ ID NO: 40795 - DNA, 770 bp, Bovine  19866880839562
  misc_feature (1)..(1): n is a, c, g, or t
nagataaattacgctgaagagatcaaagacaagagagcggatccccccggggttttactctcggtctggccatcatgatcaaggatgaagagagactttgtttttgtctttattgggaaaaatgtttgagctcggttttaccatttttttatattcattaaaaaaatcttattttcctattcaggaaaatttgatactttccgtctttctaaaaacattttcttttcttggactctggtctgctgtggggtgtcaaataatccaaaagcacacgcacacgggaaggaaaagcttaactctgcaaagctggcgccgtaggacctccgggagctgagtgggcggaaactacctatcccggcgtgcctggctcgcgagcacaatggagccctgtcgtcatccgggtcacggggctgtgcgttccgtgcgcgccgctggattccggcttggatcccgcccggggcggagggccctgtagggccgggaaaactgcgattcccggcatgccctgccacgggtgcgcctgcgtacgggagctactgcgccggggagcgggtaggtataaagtggagtcttagttccatggaaaccaacctgcctgctgccggacagagccgcgggcggcagaaggactgttggctgaggctgcggggccctgggaggtgcggggtccgcggaggcgagtcggtggctcagataaggcccccgtcatctctcctgccgccctctctcctcgctggcggagttagtctcgccctctagacctcaggacc

SEQ ID NO: 40796 - DNA, 1944 bp, Bovine  19866880847115
  misc_feature (1)..(1): n is a, c, g, or t
ntgcaagttaataatccataagaaggaacaactccaagaattttcctcctgttcatcagttactcattaaattggatatactactaaggtgcttttctcattttggatatattaagttattaaaatgaacaaccaactgttaatttctttaaatcctaaaattttagtattacatctgtgtaatgcaaataccagtactgaaacaaatgcatggaaacagcacaaagagaggacgtaatttcagcaggaaagtacccgtctttcttaaatacaatctagagaccaaattatgagtccaacagaattcagatgtagccaggagtctacagccacaccaccctgaatgcacccgatctcctcagaggcagccaggagggcgccatttatccatacactgacgcaacgccatgcctcatgtccaggtgcctgaaactccaattacttattattaatccacatacgcatgtaagcaagctctcccacaattctctcctgatgtttctaattcaactttatccaattatatctatatatcacccaggaatatttttctttttctgcccctaatgttttctgcaagggtaagtaataaggaagtttccctcccccacctccaacctgcttaagacgacccaatggctaattaatctcttggcttactttttaaaactgcttaaaatatatgtttcctatgaataatcaccctcagttacccaaatatatgaacaaggggaggatttgtgcacaacagtatttccaaatgattaatttaatatttctacaaattgctcatagcacctttcagctcttttgtcagaattcgcccaaactaaccactcagcattttagccttttaaatgcatactctctctcccctcttatgtcctaccatttttaaaacacagagagccaaaaggatcagcttcttgccatgatcatatataagaaagtgaacagagaggtgaatcagaacgaaaagcaataaggcagaaagatgtattttccagtatgttcttaaatgcagtatttactattattaatatcattgtttaccaaaatgctttgttctcacagagtaatattgctttaagggattatagaaacttaaatagagtttaaattacatccagctgatgattggccatgggcatcactcagctctctgaatttaggctgcataactttcctagcatccctagtcctcacccatgtctcctttaagtgctatgtgtttcttgaaagtgaaggaaatgaaatatctttcaaatccccagataatcatcatactcccaaaaaaatagtaacttctgaaattaataacacttctctggatatccctaagagaaaaaacaggaccttgtacttaataacttaaaatgttacaaataaataaaaaacagtataatacatggagctaaagcttttctaagagattctacctatttgttacaatctctatatgtgtaataattgaaatatttgtgtaatgattaattacacaataattgaatatttgtgtaataattgaaaattcatgccgtcattaggcaaatttaaagtttttctattgtatacccagttgtccataacacctggatttctttccctttatttactctccccagctgccctttcatctggtggaacagtgccagccgggagacgacagctaagcactttccagactgtatctgctcggtcgagtggcagctgccagctcccttcttctggggtcctgggcatctatcctttaagtcccgtgggtcctatcacccttgaaccctttggtcaaggtaagccctttagttagcagttcctcacttggtgggagagcctcgtccaccctctggtaccggctaacatcctggcgaactgaaggcagcgatcgcagtggctggtggccgttggattgacaacctaggattaaaggtaaacagttaccta

SEQ ID NO: 40797 - DNA, 1861 bp, Bovine  19866880904729
  misc_feature (1)..(1): n is a, c, g, or t
nccatattttatactcagatagggccctggggatcctttatcatgagaaaggaatgacttctagctgtgagatatttttctctcatctgggagttcccctcttgctggtcctggtcctcattctgccatcaaactgtggcttttctgcatctggattgtcataaagaggcactagtggccaagtcaggtgttaggctccctgtaacttgtccctaccctcagcttcatattgagctgcattccatacttctactcccttgcccattccaaaggcactttcagttccatccagttgagttcatcaatgtgatttaagcacagattactagcctagagaggaaagttcattaagatgtatcaggtagtgctgttctcaagatgttgacagcaagtgtctctagaataggacactagagaaagttataattcagtgtaaaatataaagcataggagtgtgtaggttgacgtagagttccactgaggagaggcagttgtttagtccctaagtcgtgtccgactctttgtgaccccatggattgcagtgcaccaggatcctctgtccatgggatttcccagccaataatactggagtgggctggcatttccttctccagcagatcttcccgacccagggcttaaattggcaggcatattctttacgctgagccaccagggaagcctcagggagagacagtgtattaattccaagtatgggatttggagtcagatagaccaggcttcaaatcctggctctgctactaattaaaagacgcttgcttcttggtagaaaagctatgacaaatctagacagggtattaaaaagcaaagacatcactttgctgacaaaggtccatatagtcaaagctatggtttttccagtagtcatgtatggatgtgagagttggactaaaaagaaagctgagcactgaagaattgatgcttttgaactgtggtgtttgagaagacaatgagaatctcttgaactgcgaggagatcaaaccagtgaatcataaaaggaaatcagtcctgagtattcattggaaggactgatgctgaagctgatactttggccacctgatgcgaagaaccgactcattaaaaaagaccctgatgctgggaaagattgaggggaggagggaaagggggcgacagaggatgagatggctggatggtatcagcgactctatggacatgagtttgagcaaactcaggagatagtgaaggacagggaactctggcgtgctgcagtccatggggtcacaaagagttggacacgaatgaaccactgaacaaccaaagatcaaattaaaaaacaaatatttttgagggaaatattgtagacaaaggaacattttcttcaagcacattccccaactccttaacaagcttaaaccagaggcttgagcccagttgcaagcttcgagtcctggaagctgggagggtccagatcaggtcccgcctactcccgcgctcatacccacgcctcccggaagaagcctggattagaggctcctgcggaacctgagcgcggcggcttcggcgcaggccgagccagtttcccagaaggactttgggtccttgcttttagcggctcggcgcagggttagcgtctgggagcctctgctcttccgtttctctgtcgttcctgagactgcgtagcagaaccccgcaagcatgtcggggttcagcccggagctcatcgactatctggaagggaagatttcctttgaggagttcgaaaggagaagagaggagagaaaaacccgcgagaagaaagtgaggagatgataggcctggatgctctcactgtcttgtcgccttaatacacttaagagatgtgaaggacccgactaaattcacc

SEQ ID NO: 40798 - DNA, 970 bp, Bovine  19866880910782
  misc_feature (1)..(1): n is a, c, g, or t
ncgtgtatattttatgtgtgaagattttcagtttgtagaaactggtgtcctatgaaatacatttccctttggtgtttaaactctaattttttctattctttttttaattgctagtttcaactgaattaatcttataaaccacaaatgaattccaactcacaagctgaaaagcagtgctttagttgcatgataaatatacaacaatcagaatattttactaaccagaaaataaacaacaaaatattgtcttctccattttccaatatttatatgtatttctccatagaaataggagtatctcttgggttttttttatcccttgtctctaattttttcctttctctaaatgaggtaaacacaaattgttttatcaaagctctacagtgggattagcacatattgcattacagtttttcttaagtaacagtctttttatcaccagaaaacttcctagaagaaataatttctgagtatataccaataatttaattttaccttggtaagaaatatgcttgaatttccagaaatattacaaaaatactttgcatatcatatttaagagtctacagaaagaaacaactgtttctaagtttgaattgcacactttcacactggacatagtgtttaaagatatccttacctgacaaagtaaagctaacaagcttccgagaatgctgatttcctgaagcccctccttccatgccttctgcccccatctgcagagaaaaaaacacatatctgaagtttcagtggaatataataccttcctagggaaccacatatgtttgcaaatatgattatttttgtatcaaacatgtattgtagtacatgacttcatttgctacaaaacttggaatggacacacaaaagcaaattctcaaaagatgaaagaagagatcatacctaaatttaatctttacccaaaatgtaaccaacatgaacttttaaattccctggaataggaatcaac

SEQ ID NO: 40799 - DNA, 1193 bp, Bovine  19866880917185
  misc_feature (1)..(1): n is a, c, g, or t
ngctgtgtgcgccagtattttctttgtgttcttttttgcccaccttttcaaatgcttcttgcaacttacaaatgagtcttgactgcagtttggaaaacagacttatatagtaggaaggtgagggtaacaaatttgaccctgcatttcttagaaagttaaccattagggagaaacaaaaacatgtttttgggcagtcataacatgtatgaagaatggaagtgagatggtatgtctataaacttttcatggtgactttgatctttgttaaactgctgtgaagttcccttggtctcacctaactgcagtgttactctgtagctaaggagacaactgtcccaggagaagcacctacgggaatctcttgagaaatctggatcagccttgctactgagaatacaagaaatggaagcaacagtggaggtggaacggaaacaggtagtgagattttctctccttgtttatgttggggaagtgaaaccaaaagggaaaagccagtgttttggctacaaacctatagttttgcttatttcctctagatttattaaattctttcctttagtaatccgctattaacactcttactacaacttaaaaaattttagtccaaaataagcactctgatgccgttcagtccaatacttactttatgaatggggaagcaaaggacaaagaagttattatgtgtcagggtttatagaggtgaactcttagctcctgggagggaatcattcccctaccacatactctgtgttccaggaattgactttggaaggtattgccctagtctcgtattatatgtacatgatgtagatagaaaagaaggattaaaccgagctgacatttgaagcaaagaataccagtaagtcaagtaatcaggaatgtgtttacattgctgttttcagttctcgttatctattttagcataatatttttgcctccaaaagttgttatttgaagtacctatatgtatggctcaagattgtaaagaatctgcctgcagtgccaaagacccaggtttgatccctgggtgggaaagattccttggagaagggaatggccacccactccagtattcttgcctggagaattccacagacagaggagcctggcaggctccagtccatgggatcgcaaagagtcagacatgactgagtttgtcactcaagttcactcacgcatatgtaatttcagtt

SEQ ID NO: 40800 - DNA, 1347 bp, Bovine  19866880964300
  misc_feature (1)..(1): n is a, c, g, or t
ncacgtgtgctcagtcgcttcagtcatgtccaattctttgtgaccctatggactgtatgtagcccgccaagctcctctgtccgtgggattctctaggcaagaataatggaatgggtcgtcatttcctcccccaggtgatcttcccgacccagggatcaaatccatgtctcttatgtctcctataatgccaggcgggttccttaccactagtgccacctgggacagctatctcaatccaaccatccatgtacaatggaatgcattttgtgaaactgttagattctaaagttagttggtgaagtgaaaaatcacaaaattgtgaaaagtaattcttaagaaagtaccatattggaaatggatatactctcctgcataagtccaacacaatcagtttcctccaaagctaaactagatatctgcttccttaattgaggactggtaaagaggttggcttctgttgagtagccatactgaaaatacgtgtggtacctgtaggcactagaggctcaactcagcatcaagagggacttggcactaagaccttccaaaggaatagcacattcacaatccccatctcacactctctttgtggtgaagcttgctaagctgactggcaggtagactcactcactatttaaattgcttttttttcccctctcttttacccactgagttcatggaaactaaattcacataagatgcaatgccaccatttcctaccaaccagccaccccaacaaagtttaaaaaactttccatgatggccactcactaatttccttcatgagaaggttccctagagagttgactatatacagaattattaatcaagccatattttcccactgatttgtattatggagttagttaagccatcctgtaagttatttcctttcccaaaacggcgcccacgctgttatgtgtttcctttttcattgtttcccataaccttgccagagctgcagaggcaaaaatagaaaccgaggcctctggaactgtggcttgaggaagtgggcatggaggggcactcaccatcacagctgggttcttcaccgtgatgcaaggggtcgtggctcgcagggctccactgatgccgtggtagtatttgaaacagatttttatctcggctgcaagttgattggagaagaacaataatttaaatgcagaaacaagtcctttgggcctcacctgaggaaattcaacaggctgcttctaggcaaatcacactcgggactctgaatgacccctccttttccagtcagaggcaatagattataccaagtcttgtttgattttataggcttctctgaaaatttctaagaacagcccaaacatattagaaaaacag

SEQ ID NO: 40801 - DNA, 1044 bp, Bovine  19866880971321
  misc_feature (1)..(1): n is a, c, g, or t
ntaatatcccatagcagtatgcacttagcatcaattaagagaagcccaaatgtccaatcaggtgatttttttctaagatcctaacttgatgactgtctcttaagaatatttcctaaacacaggggccatgttccttcctgctctcttcactctgaatccagtctaagcgttgcttcctgtgttctggtctgtcccgagggaggaaggagtaattctcccgaagatttgaaattacgagaaaacagagctaaggttattgctgcaaagtgggtctcttcctgaatgtgtgaaatgatacgacaagtctgtggcatgtatggactgttgactcagtggattgcttcctaggcattttttgttgaccacaactcccgaaccaccactttcatcgatccccgactcccgcttcagagcagcagacccacgagcgcactggtgcatcgacaacacctgacccggcagcgcagccacagcgcaggcgaggtgagtcccagctgtagcaagtgacctgttggttggtaggaatgcaggatgtgggatttattgaattctgctggctctttcatattgctttgtttttctagtttgaggctgtcatttggaggctgaaaagtactggaatgttgacagggcttctctggaaacaaatagaacctaaattgcaaatttaaaagtaagacattagaggaaaggttgaagaaattagatttttttttttttttaaagttcagtgggtgatgagagaagattcataatgcaatacagtgttcaagagagggtgatggggagccctttggcatacctgatagcaacttcataggaagaaatgaacatagcttttgctccgtcactcagtcgtgtctgacttttgcgactgtagcctgccaggcttctctgtccctgagattttaattggggattaaaattgggttaaaggtagggacatttcttaagtgaggattgtgggattagatgaaaatctccggcctaagctatcaggttgtgatcctctctaatcttctttaaaattagggtatataagag

SEQ ID NO: 40802 - DNA, 1031 bp, Bovine  19866881111649
  misc_feature (1)..(1): n is a, c, g, or t
natagatcccctgaaggagggaatggcaacccactccagtattcttgcctggagaatcccatggacagaagagcctggcgagctacagtccatggggtcgcaaagaattggacatgactgagctactaacactatactactatctacattatcctatgtgagatttcaaattagtaggaaaaaagttgcatactgtgttcagctgtgcagcatattacattcaaagttgattaagcaattactgggcacttactgactaccctcaaagagctggtgttgagaaacaattatatacaaaacactaaagtcagttgtagaaatctgcaaatgttttaatcttggcacttgattgaacagcttgagagagatgtcatagaaagagatgtttgaactgcatattaaatttgaaggaattcaccaaaattatggaagagtacagatgaaagctaagagatgtgaaaatatgtcatttgttacatgtactgccagctgccatgtattcccatctaaccctcatcccatgcataatctctgtatctctctttaaacaaataagctcaaagacagcagaggccaagtctgtattttcatgctgtgttttcagtggcacatgccagctgcaaaataaatatttgtaagatgaatgaatgaacaaagaaatgagaaaatgaaacaaacactgaaccagaagtagttctgcccaaggaaggctcaaataacgataagttttgctctaaatgcaaagaatttttttcacagagttaatgcaaagccattaaaagctcctctaaaactgatttcttttttaaaaaattaaaaagtattcttttatttttccagctttattgaagtgtgaactggttaacttatcagaatattaacatgaataacattctacacacaccttgaccactggtgtagctaatacagatatacctttattttctagaacattggctttcaaactttttatttaagcagcaggatacttttttcaaagaagattctatcttaaagctcaatataaacaa

SEQ ID NO: 40803 - DNA, 2927 bp, Bovine  19866881115854
  misc_feature (1)..(1): n is a, c, g, or t
ncaccattttgaaaagtatgtttagtatacccttctaggagcctactaatttataatattatactgtcttctgattaacaaagcaaaacaataccagggactcactgtctctgtaaatttcatgtttcttgaggataactcccaagtataattatactttaggaaaaaagaatttaaataagattacaagaataaaagttactacctttattttacataaaattttaaaatagtgtttcagttcagttctgttcagttgttcagtagtgtctgactctttgcgaccccgtggacttcagcatgccaggcttccctgtccatcatcaactcccagagctcactcaaactcctgtccatcgcgtcagtgatgccatccaaccatttcatcctcctttgtccccttctcctcctgccttcaatctttcccagcatcagggccttttccaatgagttggttcttcacatcaggtggccaacatattggagtttcagcttcagcatcaatccttccaatgaatattcagaactgatttcctttaggattgacaggttggatctccctgcagtccaagggactctcaagagtcttctccaacaccgcagttcaaaagcatcaattttttggtgctcagcttacttactatgtgtaggtactgagttttgtgctttcccctgagaatgatatcatttagttttcacaatattcgaaacaggttagatgctactttgactttaaatgtcatagttattgtagaaaataggaaaatcctgaaaaataaagaggaaaatatttattagcaatccagccatttagaggtaacctatgagaaaaattaatttgctcctttttcctctggggtttatatggatgcaggagtttttttatgtggtgtgtgtatgtgtattctttgtgataaacttaggacctgaatcggagaaggcaatggcaccccactccagtactcttgcctggaaaatcccatggaccgaggagcctggagggttacagtccatagggtcgctaagagtcggacacggctgagtgacttcactttcacttttcactttcctgcattggagaaggaaatggcaacccactctagtgttcttgcctggagaatcccagggacgggggagcctggtgggctgccgtctatgggatcgcacagagtcggacatgactgaagcgacttagcagcagcagcaaccagtaggaccttaatgtatatgttgtcttgaaataagcgttttattattttaacaatctatggtgttatgaacacttccccatgccattacatattcttctataatatcattttcataatttcccctacttattgtaaagggaataaagctcattgttatttagttcatcaattcagaaatataaagaaacagaatcatggttttgtgtttatgttttgagacttttttcctttcttgatctcctttaaaagagctatttttacatgtggctcttttttttttttttaaatgtgggaggaaatatttgtcagaattatgatctgacatgccttaactcttcctggtgtttattctaagcaggaaattgggtgttttgttgttttgaatgtaagaagggatttgtttctgttccttgtaatacacccttgagagatgggattatattagagaatatgagccaactgactttcatgcatatagctctattgctcaatgtggtaatggtagtcttagtggatatttcccaatcttagaatgtgtacgtgcactttcccattttaaagacaaaacatagtaagcggggtttcacaaacattatggtccttgaaactattccatttgttaatttgtaattccaagactataccttttttaaaaaaacaaaatgaaacaaaaactaaggcttgtttacgttttactagccagctaatataacaatacaagtgtcatgaaagacccaaggacttctgttaaagctggtgcattttggatagatgttactgctctgtactcctgagaataccacctagtaaatacactgatctaatagaattgtggttttgtatgaaaatttttatctcctaacaatatcaaattatttaagccatgcatttatggttatactacagttttgaggtgactaaattcatccaacatttggtccgtatcttagaagacatttatgtcaaattctctgacaagatgttgcctagcatgggattataattttaagacagttatttggagaccgtttctgcaggtgctgtgatggaataggccactttctttccctggagagtggcatgcaattctacttcaaggctaaggtctcaacatcagcatattggtatattaataagcaaaatctgtatagtgttaactttttctaagaataaacatggggcctttgttcatgagctaatctgaacattatcaccagagattgatgatgtaatgatagttacccatctttcatggcaccacttcggcaataatagcagtttatttaaatcttctgtttgaggatttaatattagctctgctttcctaatgaggaaacaagtagaagtaaagctgctaaatttctctgaacttatatgtggaatcacatggaccaggggtggacactgagctttctattcttgtttaatagttactttggatgctgggtcccagtctttgttaccaagttacaatatccttccattcattaaacctgtctaaaaatagggcagagtatgcgttaataattaagggtgcttcatcccacgtgttctcttcccatttctgtcccttgcagaggaaggctgccacccacaccctgggccctgggaggatgctcagtgttgctgctgagtttatttttctattatgaacactcatttgtgtaatgctggcagagggcacgggcttgaggcttttccagaatcatagttttt

SEQ ID NO: 40804 - DNA, 1644 bp, Bovine  19866881166723
  misc_feature (1)..(1): n is a, c, g, or t
nttgtctgtgacattgggtaagtttcatagcttctttgagtctcaggtacctcatgaagaaaaatgggtgccatggtagggtctatctcatggagttgtaaggaaaatcccataagttaatgaataaaagtacttcataagatacctgacaccgaaggaagtactgaataattaattattattattccaagccctggctgtgctagaactaaggttttaaaaaatccaaagaggtaatgaaaaatcagaaggcatctcagaagtgtagaatgagcagtgtagtccatggcagtgtccatccagtcactgtccagggagaggatgtgctggctcgagatgagggctgtgtggtcccaagggccagatgtacatgtatcagatgggagtagccagagacttttaaccatctgaagttgttcctctacttttgatttcttgctaccaaacttctagggacattagactttctgtgtagttttcctagaagaccagaagatgcagaaattagacccccttcaagctgcttttttctttgtcaacttagtctgcagttctgattctaactaacttgtaggagcctgacaagaccaaacttcttgcagaaccaggaggaatatccacaataatgggaatttcaagtcacagtctcaaactgtagtcctcaggctatatgtagtaaagagtcccctgatcaagtcagtttaagataccatggatgtcagaaggcttctgggagtatttatattgatatttgccaatgaatgttatgaacctccaaggggcagcctgttgtgtctatcttatttgaccaggagccgcttttcctagtagcttctcaaagcactaaggtttctcaagatgcactttagaaaatactgcactaaggaaatgtctctctgtaaggcttcttggtagtacatccatttgccagcaatggacagttccacagtacaacagttaatttcatgcatggaatgttcttcagttaatggcatgaggtcgctgtgccatatggagagagaaaccagacacaggtgaaaaatttgtcccgaatggcccatgaagtgactaactcacgacagattgcacttcaatcacaatttattatgtaccaatctatccatgcttccagttctaggaacttgctttcctgttggctagaaaggttatacttctggtgagtttttcacaggggtgcttttcatcatggcagtagccacgccctcagtgctagtctttccagccaacaggagccaacatataacatatgataatcaaaaagcagctctgtggattgtgactcttgagtctgagaaataaacacaagtagtaaccctaatggtttcacttctgcaaaactgccagaatattttgcttttgatacacagaaaagttcagtcctcattacatttttctaggtttcttatatattgaatatcatacatatgattagatgctataaatacattaaggaaaaagaaaataggtatatgtttaaagcccataggtaaggatcagatagtatagcatgggagtgaaacgcatgtactctgaagccaagcatctgaattgaagtgtgaccctgctactaatcagctgtgtgcctgtgggcacattatgcaatctctttgtgcctcagtttca

SEQ ID NO: 40805 - DNA, 1277 bp, Bovine  19866881178452
  misc_feature (1)..(1): n is a, c, g, or t
naaaatttaggttgccatttctatttgtgatgcacaaatcaattatgtcacaaaagtagatcacgttcccacaggatatcctaagtagctcaagtcagtaacaaagctgactgactacttttctttttctttttttaatttaatttgggtcactttttatgtcattattcttgagtggtctgcttttatttatgaaattttctaccaggtattaataaatactgcctgagtaaacagtatgttgagaatgcagactgcatcgaaaaagcaattgtatccaaaaatgaatctttttcagattagccactagctaagcaaattttgaaaacatagagtctctactgttaagtttcattaaggaaattcactcaagcttccccgtgctggaccaactagaactaacaatataataaaaaactgaaaggaatgcaaatatccaaattcaaatctcattttaaaaacttctaccctttcactgcttcagggcatggtcagagttagaaaatatgagctggttggagccaagtggtattttagtgaggccaaacaaaatacacttctctctttacacaattctttttttaagtttctattattttaagaaaagaaaaagccatcagtatttgtgaagaaataccaacctcaggctcaacaaatctaagtcacagaagtttgaaattgtttccagttaacattttgccaaaccaggaatccatattaaaagaccatgtaaacaaaataaaacaaaaagcacttgtaactatgctacagaaagacatcaaatcttctttctttccctaaaagaacgacagtttaaagattagacgtgctacatactgaatctgttctaacttctactttatcaactctataaaatattaaaatgctcaaaaaagttaattgtaatctaatttctataaagactttaatttactcacacattctctcccttctaaaatataaatctcctctcagctcctggtcccctctctagcatttccccaattataaggaataaacatgctattattttctctacattatatcccagacagatctctgttaccaaatgatagatgaaaagacctgaatgatgtagtttattataagtaaaaaacaatcatgctaacattttctaccttttggttcatttgaaggaatgaatggtcctaaatatctcatgacatctgtatcaatcacaaaaaagctaaagaaagttattttgttaaattgttatgatcagagagctaaagtgagagaaaaacagggacacaagg

SEQ ID NO: 40806 - DNA, 1039 bp, Bovine  19866881258362
  misc_feature (1)..(1): n is a, c, g, or t
ntaggtaattaaagatgcaattcttgcctatacacaaaatgaacgaattaactgggtaagagagtggcctggacaaacagtgctctgtgtatcccaaaccttttggacgttagaagtacagacagctattgcaaaaggacaagaggtaggtttttatagacccaaggtttttcagcatttctttaatagtgattattgccaaaatacaattattctaaaaaattaagaccatccacccaaaatccaaggatactggagcctcaatcttgttattatatacatttttatgctttcaaaaatagtgatagtaggacaaagaaacttcctaaacttagaaggattaggaggaattacataatataattctcttttatgccctcaataaaactacactatgaagtatgctgtgctaagttgcttcagtcatgtctgactctttgcaagcctatggactgtagcctgccaggctcctctgtccatgggattctccaggcaagaatactggagtgagttgccatttcctgctccaggggatcatatacccatgtgaatgcagagttccaaagaatagcaagaagagataagaaagccttcctcagtgatcaatgcaaagaaatagaggaaaaaacagaatgtgaaagactagagatctcttcaagaaaactagagataccaagggaacatttcatgcaaagatgggctcaataaaggacagaaatggtatggacctaacagaagcagaagatattaagaagaggtggcaagaatacacagaagcactgtacaaaaaagattttcatgacccagataatcacaatggtgtgatcactcacctagggccagatatcctgaaatgtgaagttaagtgggccttagaaagcagcactacgaacaaagctagtggaggtgatggaattccagttgagctatttcaaatcctgaaagatgatgctgtgaaagtgctgccctcaatatgccagcaaattggaaaactcagcagggccacaggacaggaaaaggtcagttttcattccaatcc

SEQ ID NO: 40807 - DNA, 1302 bp, Bovine  19866881263522
  misc_feature (1)..(1): n is a, c, g, or t
ncgtagtaggaggggaatcctttcagagggtacaacttcaattaatattagttgtttgggttttttttgaccttgcctatagagatggtcagaagtatggatctacattgatcatagtagtaagcagtttggctatatgatcaaggacttagaagaaacaagattgaaagattggtaataaggagatctatcaggaatcacagaatgactagaatatgagtatatttgtgctccatgtaaatgtttaataaaaggtagtgctgccaaaggaggcacttaatagagttgaccagttgatctgtttgtgaatgtcaaccagcatacgccattgtatgcacagtgagctgtgaaatggaaaaatcacataatatattgcccaaactgcagaacgtctgaaagtcagagcaattaataagtaagccaggaaagcaagcataagccagaactctccgcatcaaactgggaatatgtggtcacccaggctacaagcaaagaagtcataatggcagagatgggaattatggacgtatttgtcatcatgggctgtcccttacccaacactgcagagcatccaagctgccaacatcagaaacaaacaaaatgcttctgacacaggatcacacctgaagggaccaggcagccatttagaaggaattaaatacagtgcacctgtttcaaaatagaagggatcagtgatttgtctgcaccagaggactttcctttcttttccaagtttctgccaacactgtcattcattgacttactgaatgacttattgtctcagtttccatacgatactgcttctgctatggaattcacattacagaggaaatgaggcagttgactgatactctttaagatttacagatcctaatgtgaacattgaccttataaaaagtggaatgtctcatgttgaagactcagttgctatatgagcaggaagaaaagagcttgtgagtttggcatgcagttctagaggatacatagcccatattctcaaccagctcccataggcacagttcatggatctgggaattaaggagtgaaaatgatgttgacttttcatactagttcacccaataaacgactcacaacagttctgcttcccaacttttggtcttgctagttgaaatatcttagtatccaggggataaatgcttctgtatgggacatagcagtagtttcattgagcaggaagttcttgatttactcactttacccttttacctctctgtccttataactttgcaccttacttactctattctagccacgctagcttccttttttgaatcacacatg

SEQ ID NO: 40808 - DNA, 1549 bp, Bovine  19866881312822
  misc_feature (1)..(1): n is a, c, g, or t
naaaaagagaataattattaatacccaagtatctatttcagtatgggacagtattgcatacaaactattttttaagccttactttattcatctataaattgcatatatggatctctaactcaaagaaagttttagagaaaacatcaagtacatattctcatgtaagcacaaaatgagataatgtttaagggcaggggaaaaaaaaagcactgttagtggtactgtaatataataagaattattcaactttgtgaaagaagcaaaattacaagctttccggtcttaacaactctgattaagaaatgaagataaaaagagttttcactgaaatatgttgatatttgggtctttgggttaattgtataatcttcatttctatttcattataatgttttctttttctttcagaagtctggtggttttaaaactacagatgaagcttctcactagaaaaattcagtcttgatcatggctaagtttttgtgtgtgtttccctctccacttttatcagtctgttatgattttattctgtatttccagatttacatgtaaatagtttgagctttgggacatatgtgacttatgtgcatggttttttccccactcaataatcatagatatcaatatagcactgcatatatttgcaagggttacaaaaacaccataaagtcaaaggaaattcctttcagctgtgttctatgtttcttttttatcatcagtgtttttatttgaaagggacattgatcatttttactttagttaattatctgtaacaggaatttgggtttaaaatgtatctttttcctacaaagaatatacatttctattaaaagaccccacagtcttagtttcatgtcaagagagagtaagtaatgaatatccacaattaagttgaaatggaagacaaagaaacatgggattttaggagttgctcaggcctctgggagatgttctctgccatgatgttcagaggtggctatattgtgctatagcagatatcctggtttagtctcttaagtcgggtctgacttgcaaccccatggactgtagcctgccaggcttctttgtccatgcgattccccaagcaagagtactggagtcggttgccatttccttctccaggggatcttcccaacccagggatcaaacccagatctcctaaattgcaggtagattctttaccaactgagctacaagggaaaccccacagcagatatcttaggaacctacaaccataggaagagagggtagatacaggcagatttcccttctttcataaccagtgctcttcctccaccagccctccccaactcaggctgaattggtctgattctcatattcttatttgtaacagctacttttctttatgaagggctgtatcattttctctgatttctgcaaaaacaaaaaccaaaaccataacatcgtgccagaagcaaacattgtaatcctaatgacactagtctgtacattccaaagtagttttatgtggcttttttggtggatgattgaatatgaataataaaatatgcaagaacagggtatatat

SEQ ID NO: 40809 - DNA, 1135 bp, Bovine  19866881354689
  misc_feature (1)..(1): n is a, c, g, or t
nacatcctcagtacctcagcagactctctcctctcacttctgtggatagctgccctcctgcctcccccacagggaacttttattctattgccatcctttatgtttttaaaagtttccattataaatctaaacctttgcagggaagaatttatcctgtatttgtgctttgaacttatttatcttaaagtcttgattacaaattcttttaattatgtataatttacatatcataaaattcacttttaaagcatataattcaacagcttttagaatattcacaatgttgtgcaaccattaccaccatctaattctagatctttttcaacacctcccaaagaaaccctatacccattagcagtcactccttactatttcctactccatgtccccacagcctctggcaaccattaatctactttctatcactatgcatttgcttattccagacatttcatataaatggaaaaatattatattgtattggccttttgtgtcttgcttctttcacttagtgtaatgttttctaggtttgttcatgttgtaacatatatcagtatttctttttagggctgaaaagagctccattgtgtgtatgtatacacacacacacacacacagagcccacattcgtttgtctgttcatcagccaatgtatatttgaattgtttccattttttggctattatgaataagtctgctaacactcatgaactaacaaaaaacaaaagtatttctgtctcaaaattatttgaagtcaaactgaaaggattaaagtcacttaaaggagacttaaaatgatagctcctttgaaacagcctataaatcaatagaaagtcctgaaaatcagagataaagcatcttaagtgtcatagaatatgttagtgtgaagtattttaaaaaattatcctgaccattgaccttcataatgccaaatagtggaatgcatttcaacaattgctggatatttcttcacccagtttttggcatggtaaaatctttgtttcttgcataatcatgttttagtagcacagagatttacctcatgaacccaaagacgtttaatcacttctttggtctctgctgtttctggtcttgacaaacatacaccctgaatgacacgggagaaatctcggag

SEQ ID NO: 40810 - DNA, 2615 bp, Bovine  19866881417488
  misc_feature (1)..(1): n is a, c, g, or t
ngggtggagggggcgttggaactgtagaggggaagtcagaagtgaatagagtgagaagaaaccactgaagaagaaaatgtgactatcaggaagacttttaaaatatggggcttgaagtcatacctgcgtttatatgacattaagacttcctttcacctcaataatgccataaaaactgaaataaaaaataactgctctctgagtcaggagggaaacagtaaccatggaactcatgcagttgcccgtccactagttagtggaccccttcacacaaagaccttttacattaacttaatgtttaaaataaaaagcttttaataagtctgctcatctaattttaccttataactttcagcctctatttaagtagataacagattggaattatgaagtaggtggctactaaaagttgttggactaaaaatctgcagctgaaaacagtgggaagagtcagaattactaactcaatacaccctgacagtgtcctaaaaacctcagtatcccctgatggaataattgacattagtccaaatcaaaaggatcaaattatatttaaaatattctgttctacaaaacagaaatagatatagtattttaaaaattataaattttagtgtgcttaaggtggtaagtgtagctatatctggaacattctcttatgtgaagtgctttatttatcagtaattgctgacaaaagcgttattgttcattgctggaatatattgtttcacattaaaaaaaatactttggatattttaatagatttttgagctgttttaagtttttagaaaaattgcacataggcagagttcccatataccctttctccccacccccagagtttctgttattattaaacattttgtattagtctggtgcctttgatttgttatatttgattatgaaccagaattgatacattattactaagtccacagtttagattgtttcattttttaatttattacagtatacaaaagagtttcacttcactgccctaaaaataccctctgctttacacactcatcaccaccaccctctttttcccaagcacctggcagctaccaatgttttcattgtctctgtagttggaatcatacaatatgttgcctttttggactgccttctttcacttatttagcatatgcatttaaattctccatgtcttttcattgtttaatagatcatttatttttatcactgaagaaaaatcaattgtctggatgtaccaaagtttatcccttcacctactgaaggatgtcttggttccttccaagtttagcaatcatgaattgctataaacattcatgtgcaggtcttttttttattttgggacatgttgttaacttgcttggataaatacctaggagcatgattgatggatcctatggtaagcttgtgtttagatgtctaaaaaactgccaacctgccctgcaatgactgtaccatgttgcacttccaccagcaatgaaagagagttcctactgtcccacatcctcaccagtgttttgagtttttaccattctaatagatgtatgtatagtagtattttgttttaatttttcagttctctgataatgtgattatttagcatcttttcatatgttaatttgccatctgtttatcttatttggtgaggtatctgagaccatttccccatttgcagctgggccttttttttttttttaatcttattggtgagtcttaggacttccttttatattttggataccagtcctttatccatatgtgttttacaaatattttctcccaatccatagtttgtcttttctcttaacagtgtcttttgcagagcagaaggttttcattttaataaagttcaacttaccacttttttcatggattatacttttggtaattatatctaaaatattgccaaacccatagtcacctagatttttatgcagtattatcttagaagttgtatagctttgcattttacatttaggttttgaattgctaattttgtgaaaggtgtaaggtctgtatctagattctttatatgagtttgtgtatgtccagtggatccaacaccaatttgttgaaaaaactatcctttctccattggattgccacttagtgttgtttttttattggaaaagtcttaattcttggtgctgtggtaaaatcttgaattttcgttgaacttgttgaggacctaagaaggactgtatgagtcaaacatgaacgtcttgagggtatgtggagcaaggaggatgtgttctgctggggctaccacacactgccacacattagacttaaacaatggaagtttttgtttcactgttctggaggcaacaagtccaggatgaagatatcagcaagcttggttttttcttgagtcctttctccttggcttgcaggtggctgcctttttctctgtgtcctcacatggtcttttttctgtgcacacatccctggtgtctctgtgtacagatttcctcttataaggacaccagtcacgttggcttgggcccgcctcagtgacctcattactgaaatgaccctttaaaggctttatctccgtttatggtcatattttgagatactggggttaggcttcaacatggaatttggggggatacagttcaacc

SEQ ID NO: 40811 - DNA, 1332 bp, Bovine  19866881545401
  misc_feature (1)..(1): n is a, c, g, or t
nttagatttaatctataaggtagtttatttggctttcacgatcaagttcagcagaattggaaggccctcgttgtatggtttctgggaaacataggaaaagtaaacttatacatgaaatttttatgtggagtggccttgggcaggtgatatctttctatccaattttcttttaagatattacaaccctgagcagtgttgataggtatggtgtatgattcaggctgaatcaaatattactgatgcagctaaggaatcagtaaactatttctggttactatcaccttctataagaaaggatggataatgttcaagaaataccttggaaggactaaccaggaaacacacaaaactgaatgttcttttaggaccttaatgcactaaaagatggtattacaacctatttttctttatatggtatcataagtaaaatttgagcctgttaatatgttggaaagtgcataatatcacatgtttttataatagggatgcaggcattccaaagtaaatgaataaagacacatgcatctctcttgcctcttactgaaagtattaacctaattttataataatgactactttttaatatttaggctctgtaaaaagagaaaaagccacatttatgtccaagatttcagtggagcacaggtggtgtatttttttaagccttcaaatttcttttcacaaattccacccattgtgtctattacaccatgtcacaattagtagctatgtttctatttttgttgagtttatttaagcctcatatttattcaatgttacttttaatagagaacaataatgggaagtatttgctattgacattgagattatacagctctcatttcaccttatatttaaatttcatctttttttctccaagcaaataatgcagactgttgacatcctagaaatgaatcatgggtgatcttaaatggagcctgggactctgaaatgtagacttgtttgttttctggaaagtctgtattcttatccttacctgaacccctgacttttgtgttgtatttttttatgattctgaaatgctttgagggaaagatattttatgtgtacaatttgttttattttcatactgatctctatttttgtttaaaaccatgttgcatcatgaaatcacttaatccaaaataaatcttctttaaaaaaatagattatgatttttctgtgatacatttggggaggaaaaaaactcaagaggaaagagagcaaagtagggataaaggtctcatgggattagtatgcagctttgtggatacaggaagttctcttttcatatatttataattaggaatcttcgttatccctaaaagatat

SEQ ID NO: 40812 - DNA, 1586 bp, Bovine  19866880339676
  misc_feature (1)..(1): n is a, c, g, or t
ntatgcagataatagtatcctaatggcagaaagggaagaggaactaaagagcctctcgatgaaggtgaaacagaagagtgggaaaagatggcttaaaattcaacatttaaaaaatgaaaataatggcatctggccccatcacttcatggcaaatagatgggggaaaaatacaaatagtggcagattttattttcttgggctcaaaaattactgtggatggtgattacagccatgaaattaaaagacatgtgttccctggaagaaaagctatgacaaatctagagagtgtattaaaaagcagagacatccctttgctgacaaaggtctatatagttaaaactatggtttttccaatagacatgcatggatttgagagttggaccataaataaggctgagtgccaaagaattgatgcttttgaactgtgatgctggagaagactcttgagagtcccttggactgcaagaagatccaaccagtccatcttaaaggagatcagtcctgaatattcattgggaggactaactctggagttccaatactttggccacctgatgcaaagagctgactcattgaaaaagaccctgatgctggaaaagattgagagcaggagtagaagggggtgacagaggatgagatggttggatggtatcactgactcaatggacatgagtttgagcaaactctgggagatatccagaatttgcctgcaatgcaggagaccctagtttgattcctgggttgggaagatccactggagaagggataggctacccactccagtattcttgggattcccttgttgctcagccaataaagaatctgcctgtaatgcgggagacctgggcttaatccctgggttgggaagatcccctggaagagggcatggcaacccactccagtattcttgcctggagaatcccatagacagaggaaattggtggactacagtccatggggtcacaaacagttggacatgactgagtgactaagcagagcacagcacatgacagacacccttgttgttgtcattccattgctggcaaatgttcttgggaagtgccaatttatagtcgacaggaagagccaatttgtagttgacacaccctatgggtagacaaattaatgagacggtggcattttgcctttatcctataagcttcaactgtgatattttcttggaaccctcagatagattccctcttcatcctcaacccaaccccatgtcaacagaactctgacctgattccatcaagtagtgagaacttgcttctctccatctttgttttcttgcctggccagcattttgcaggatttggctaagattcctggtgtgctccccggagtcagaaggtttgctggcttcaagtctgtctgttcatttcaagtgttctggtgagacgaaattagagggacttgtgcttagttgagaatgaaatttcatcaactgggagagaggatgaaggaagaagagaacagggacagaaaagtacgataaaagccctgaggtcatggttgggctgggaaagaggatccacaaggagcagggttaagggaaacaaaacctcaatcaaatcccagcattg

SEQ ID NO: 40813 - DNA, 783 bp, Bovine  19866880390381
  misc_feature (1)..(1): n is a, c, g, or t
nggtaggcaaagttgaagtgttgtacacagcagcttcccacgagttatttcacacgtggtagtgtatatatggtcagtgctaatctcccaattcactccactgtccccttcccccagtgggccctcatgtctgctctctacttctgtgtctctcgtcctgccctgcaaatatgtttatcagggggctcagctcagtgctctgtgatgacctagataggtgggatggggggagcgtggaagggagacccaggagggaggggatatatgtatacagataactgattcacttcattgtatagcagaaacaacattgtaaagcaattatactccaatttaaagaaaaaaaaagtagtttgctttacctgggagaatataagaggttaattaacaaactatctgattacacttaggtagtttatttctttgaagcaagctctttgttatatttctctttattcctatagggatgatctaatttatgcttttattttaataaagagagctttaaaaatcattaattacacacacaaatgagcactttttctttgtaaaaattaagaacctatctttgacaactgccctcgatttcagagtccttcctttatgtagctattgatatttttttggtggataaccttacagtattattcccctttgtacaggtatttggagatattgcagatttaggctcagtccattgtgacaaagtgaatatgcagtaaagcgaatcacctgatttttttcccattgcatataaaagttatgcttatgttatatactaca

SEQ ID NO: 40814 - DNA, 2471 bp, Bovine  19866880410828
  misc_feature (1)..(1): n is a, c, g, or t
ngaaacggtggggaaaagaagagaagcaaagtgagaaaaagatgaaagctcctgggctcatcccaggacacggtaacttctccaacttgttctccttgcactaaggataaggcccccaagtggcagactctggcttcttcagagaataagagaatgtagagcccaaatgcctaaggacaggacctcagaagtcactctgtccatcccctccctgattctctcttgtgacaaagggatttctcctacatttacactccttcccatgagcaacaggcccagcccagcccatccaagctttagatgggccagtggaaacctgaccctaagaaaaatgttcagagacatcctgggatcaagaacccataggacttttaagtgaaagaggaatttgaggttaggagcccagtagctgccaattcaaaacagccatggccacaaattctggttctgctcttctctctctagaaccatctaagaatgagatggagagattccagaagtggtgagttccccttgcctggacacactcaagcctgcatagtccagcaaggagctaactgacagcgatgtttttaaatagttccaggcatcagagagtcaagacccagctgaggacagcttcagtgaagcaacacagcaaggccttcacagaatcttttaaactccaggccaaggaaaggggaagccagaaactaagcctggaagagcaaccaggaagcacagaaatctgctctgatggtctcagcacagagagcctttctctctgcccagctgaccctggaaaggactgtatttttggctggccccatcccttgtctcctgaccaaactggcaggctaccaagcatgaggtgtttttcagagagcagcttctagaagctaaataataatagtaataataaatactaagtttgttcctctaagctaggaaagtgtcaggattactaaaactgagtgagtctgagtgagccaaggagttgggacccctgggcctgcaacctgtagatccatgatctgagtccccacccctgtcctgtgctgcaggagtgatgatccaacagcttggggtcgaggggtccccttcagatttcttccccaagaagactggaaggagcagagggaatgagagcaccttaagaaagagataaaagccagactcagagcgagggtaggtggtctcaggtttatgcctccaggccaccttcctgtgccttcaagaacacggtgaagaactcacaggtccccaaccctgagggaggccaaaggaggtcacccggcactggccctgggtcaccttggcacttcccagacctactgagagcttctctggtggctcagtggtaaagaatccacctgcaatgcaggagacagaggagactcatgttcgatccctaggttgggaagatcccctggaggaggacatagcctcccactccagttttcttgcctggaaaatcccatggacagaggagcctggtgggctacagtccatggaattgcaaaagagtttaacacaacttaacaactaaatggcaacaaacccactggcctctctttccaagggcaaggttagattccaaacccctacatgccctcataagccctcctcacacacacacacacacacacacacacacacacacacacacacacacgcctggaactggagacagaaacagtatcaggccttagaaatagtgcccagggacccatataaccctggtttgtccacctgtgaaccgggtcctggaggtcgcccagagtccatcaacagaaagggacaaggagaccagaggttagtggcgtggaaagactgacttttcactacatgcctttttgtagaatgtttctcacatgcacatactgccttttcaaaaaactaattctgctctcctttctggaacacacaaacaggatctgttctttgtcctggccacctgaagtcagaaaactaatttctagttcttatctgccactaatactaaagcagtgtgatgtcagcctgttcctacacatcctgcactgtggttccttgggctgtaaaatgggggtgataaaacctacccgaccttcctcatgggtaatttaggagtttgatgaggtccaacagtagtagcagtgataataattaaatgtcttgagtgctcatcatggattatctcaaccctgaaacaatcctatgagatggcaactaagacaagcctcagtttaaaagaaaagaaagggacttccttggtggtccagtggctaagacttctcactcccaatgcagggggcctcggttcgatccttggtcagagaactagatcccacatgccaacccttaagatcccacaaatcgcaattaaagttcctatgtgcagcaactaaaacctggcacagcaaataaataaataaatatgaaagaaaattaaaacaaataaaagacaataaaaataaaacagagagaagtagcctgctcaagtcatgcaa

SEQ ID NO: 40815 - DNA, 1345 bp, Bovine  19866880442190
  misc_feature (1)..(1): n is a, c, g, or t
ntcgcctgaggtggacagcaggctgaaagacagacattattcaaggtatcaagttcaggtcaggaaattcccagcgacctccccacccaaccctccaatctgcaaagtgagtacatcctgtcaagtggtgtctggtgactatgtggtatttttctaattcaggttttcagctgtttaaaaacaaaaaaacacaaaaaaaaccctaatcttattttgcatcccaactcttaccattattttggatgcttaaattcactattccttcacctcaaccccaggcatgctttaaaacccagataagcgccacctacccccaattcatgcacaatacattcttcatccataaaccttcactggtttctatgttagccagactctggagatgaaaagacaattatgatccaaatcctgccctctggcagctttatgcatgtgagggtaggcaagatgtttagtataatacaacataccaagtgctcccatacgaggagggacaaagtgctttgaaaggacagtggaatctctccatctacatccagctatccattcgtccatcactcattcacagagcacctgctatgtcacgatctggagcacgatgctaggggttcagcagggaacaagacgagcgtggttgctgctctggtcttcctggagatgaccaaacaacaggagagactgaggtcttactgataatctcacaaaacaagtgagctcaaatgtgagaaacactatcagtggaaaagtagacgatcctatcaagtacctggtagttaggaaaaagtgacatttaaggagaaatcctgaaggatgaataggctgtgttcggggagtccaagcagagggaacaagaatgttctgacactgtaagacaggaccaggagtaggcaccacaagtggggactgagagggacccctctcctggggagggtactgagaccagggatgataaggtcatcccagaggtgacggaggcccaggcagccaagatccagttcgtatcaccctttcttaggaattagggaaaaagagaagcagcatagaaatgatgtgatcctgactgcattttttaaaacattctggccagatgcgatgaacaagtggaggaagggcaagaaatagtcctgtttagccatcatctgatcatgcaatgatcctgtgggttcttgtatccatcaatgcatgtttgtgagaccgaaattctcaaaaataggtgtctattgcacatgatatacaattcgaaaacatttcttgggtaattattctgtgataacaaactctatgtctttcttataacgaacaactccttgcctctgccctctgaaagattccctcctgtccccaa

SEQ ID NO: 40816 - DNA, 1628 bp, Bovine  19866880453079
  misc_feature (1)..(1): n is a, c, g, or t
ncaccaggctcctccgtccatgggattttccaggcaagagtactggagtgggttgccattgccttctccaaactccaagtataatcttttataaatggccttccagctgtgttatctctaactttgcaaaacctcacacaaggtgttcattttttttaacccaccctttaaaaatcagataccagtaaaccgtgatattatgatagaatcatacagatggttctgccatgtattcaccatatgtccttcattaagttactcaagttctctgagccactgtttcttcacttgctaaatccaaagacatacctcacaggattgctgggccataaagattaaatgatagtgcaggcgacgtttggcatagaaccctgcacatagcaagtgctcagtaaatattaacttttaacgtctaccctgcagacagacacaaaatgtgaaacctacacagaaaactcatatggaacttcttatattgtatttaaaacataaggggattaaggcccagagaggacaagagctttgttcaaggtctcacagtgatgacgtggtgacagtgtgactaggacccaagtgttttgcgctattgtgcagggtacccccttcatgcctgtgctcctcccatccatcccacgcccaccatcaccggtcgttaccctctgccggggctcggtagtcgtggagaccatgacagagttgcagatggttaaggcaaggaagaagtcagcaacggaggaggcagtggcaagggaaggcttggggggtctgccgtctgacagggtctccagccacagagctgcgtctcgcaccttggacaggagatttttatctggagtcacgtctttttcctgggagagaaaggctagagtcagagtttttcctgaagggactggggaggaaggccccctgcagcagattcgctcatgcccgggaaaggctgatacagtcctccgcgcatcctgcacccagcatgtctcccctactctgggcctgctcaccttagagtctgatttggctccttctcttccctcaagcccacgtgtccatcagttatatagactctggtggttctgcccccacagcatcttcccaccatttacccctcattcctgatgcttccagccaggctcagaccctctagccctccagcctgggtttccacatgcatgcatgtgtgcatgcttgctcagctgcttcagtcatgtctgattcttacaaccccatggactgtagcccaccaggctcctctgtccatgggattttccagggaagaatactggagtgggttgccatgccctcctccaggggatctttccaacccagggatcgaatccacatctcctacattgtaggcagattctttaccactgagtcccccaggaagccctctggatttccaattaagcctttaaagtgaggtgactgcctttcacctcatttagtttgaacccttcatatgtatatcacccatacatccttctaagacaccatttccctcaaggtattcttgagactaaaaaatcttcagatcttcactgtgaacatgatcatttcagtctggcatctaaattgtttcccagtttgcatttctcctgttgatttccaccactctgcatgtggtccttcag

SEQ ID NO: 40817 - DNA, 2488 bp, Bovine  19866880459245
  misc_feature (1)..(1): n is a, c, g, or t
nttctttggccctcagctttctttatagcccaactctcacatccatacatgactactggaaaaaccatagccttgactagatggacctttgttggcaaagtaatgtctcagctttttaatatgctatctaggttggtcataactttccctccaaggagtaagcatcttttaatttcatggctgtaatcaccatctgcagtgattttggagcccagaaaaataaagtcagccactatttccactctttccccatctatttgccataaagtaatgggaccgaatgccatgatcttcattttctgaatgttaaggtttaagccaactttttgactctcctctttcactttcatcaagaggctgctttagttcctcttcactttctgccataaaggcggtgtcatctgcatatctgaggttattgatatttccccctatcagaatggctatcatcaaaaagaacacaaataacaaatgttggtaaggatgaggagaaaagggaactcttgtacaccttttggtgggaatgtaaattggtgcagccagtatggaaaactatattcctcaaaaaactaaaaccagaactaccatgtggtccagcagttccactcctgggtatacatattcagaaaaaaatcaaaatattaactcaagaaaatacatgccacctcagttttcatagcagcactatttacaataggcaagctatggaagcagcccaaatgtccatcaacagacaaatggataaagaagatgtgatgtgtacacacacacacacccccacacacactggaatactactgagccataaaaagaatgaaattctactctttgcagcaatgtggatggatctatacaatacaatccttagtgaaacaagtccagcagaaatagacgaatactgtatgatgtcacttatatgtggaatctaaaaaataaaacgaatgtatatagcaaaacagaaacacactcacagatacagaaaacaaacgagagattgtcagtggggagaaggaaggggaaggaacatggtacaggtataagattaagagatagaaactactatgtataaaatagataagcaacaaacatatattctatagcacagggaattataaccattattttgcaataacttttaatggagtattatctataaaaatactaaatcactatactctacacttgaagctaatactgtaaatcaactaagtcatttttttaaaagtgtgatctcagaatctcaagaatttaatgccagccgatatatttgacacataagccaaaactgattcaccatttctaactatagaagtttgtcaaaggtttgcagaatcttaaggaaagatttctgtcacccatgtagtttccacttaggagaaagtagagacttaggcaattatatacaataagaatagtgactactttaggctttgagcttgctgcagaactcctccattctatattctttacataattcctcaggagaaatttaaaaatgagatactaggcactacagattaacttctgaggattgtgtactcttaccaaagagtttttattttagctctttagtaatctgaggctaatgattagcttgtagaagccagcctacttcagcaaaagattagatgcttagctactcaatgaagatccccaggagttcttttccttcctttagtgctgaccatttagcatttcaagtggtgaagaaatggcacttggaatgaatacctcacttaggcagcacactctttcctttcagattttaggataagtggcattaggaagcagtcagttatggacaatttgggaccctgcaaataactgtggaagttaaattgaccctgtgtgtaagagaaataatctcctggaagacatctattcaaataaacccattgtgcatggccatggatgcagccaaaaagatcattaacaggcccagtcaaatgactgtggtaataggaggaagaaaggagctggatcatttagataactggatctgcaaagactctcttgctgtattcaactaacaggtcccagatcagcatcagtcccagtgaacaagaactgtaaccacatttattagcaataagatcgtgcttttaatgcttgactgttaaattcaagaaagaagtaagaaaattgtcatttccacccagattgatgtgaaaactattatgcaaattcaaggaacatataaatagagtctgctagtccagaggcttcctaaattattaccgggctctgagggcaatcagccatcccctgctacctactaggaacaagcaaaagcacctaatgcctctttggtttggggagttattagaatgacctggtgattgagcatcattcagcagcaggactcagttgcaaggtcctgattcagattagcagttgtgagttggggcatctctttccatcagacagaatgcacctttaggtttgcatcaacaattaaacaatgtttttatactgctgctgctgctgc

SEQ ID NO: 40818 - DNA, 3012 bp, Bovine  19866880546633
  misc_feature (1)..(1): n is a, c, g, or t
ntggatctgctttgtaggaagacagttgtttttgttattaaattctgcattatattttacctttggaatcaaagagatctgggtttgagaaacagttctactacttaatagatatgtgattttaggcaagttactgtactaccctaagttgctatcttatggagatactaacagtatacatttcataggcatgttgtaaagattaaatgaaaacgcaagcaacattttaagcttagtggctggcatattactggtgcttaacaaatgagttactatcacacataattctgttcctcaagaaaaaaatgtaaatgacataggtcccagtcactgccctctgtaagcgaatcacaccaggatattcaggcagtcattttttgctaaaggattaacaaacaggcagcataccaaattctaaagtctgaccaaaaaatatccacgacaggaatttcagcagccaaccatcaataaggtcattaaaaaaaagctaaagggtatatatataagaaatagttacacaagatgaaagtaagaacaaagttcacagaaaaaaagtggaaacttcttcgctaaacagatacactcaatgcggccccaccatgtcactgatttatctcagatgcatcattactaaagcaataaggacacagatgggcaagtcactctttaccacaaatgatgcaatctatgataacagtatcaatcaaatttagcactttacagaagtttatgtggcaaatcatgcacactaaatagaatatttacctttttctcttcatctggcatgttcttctccagctccattagatattcttcatctagttcagagggattcatatcatcctcaggtttgttctcaagcttgtcggctcccggctcctccgtctcaaatgaggcactggcgtcatgaaagcactcctcctccccctggtcctcctggggctgggcgtcgacatccttgagcagctcgctctgggaatgctgctctttgccactggatactggagggtgaagacactctgcttcctggggatctgtaactttcaaaccagtgaacagatcctctggaaccctacagttcgacttttcccccattgctcaatcagtgagggaggtgaagccgaaactgcgaaagagaaaataggttaagtaatgctatctacctgcctatccaatcctaactatcacatttaaacaaacttctgcatcaaatcacatccgaacttcttttcattgattcaattatatattcatacataaagggttgcataagcccacaaataatgccaaatgtaattctaactgctacccttttcagaacttcttacaagccaataggagacaccgcttttaatgtgattcttccatctcctattgctcccagtttttcagggttgcaaaaaattggcagaagcgaaaacaatggcaagaaaaacgatgcgtttctaatttttattcagattgaataaccacgtcgtaaataatttccagcaccaccgcaggaagctcaaaaataagtttctggtagagttcaaaatataatccgtgccaacacagcaatcatcaacttcacccacttgcatgtgatacagcccacgcaggttacagtggaagggaggccttggctctggtagccctaatcaggattcccgaaggggtcagaattagccatgaaaagcgtggttcttaaccctggacgcacaacgttaacactcaaaacgctttagcaagtcttgctgaccagactgtatactctacagattctgatttactagtctggcgtggagccagggcatctgtagttttaaaacggcatcccaggtgacttttcaggtgcagccaattgagaactagtgctgtagacgctgagtcagaccgtcagcagctccactcctccggtcgcagtaaaatcacgcagactcttgggttgcgataaaacccgaattcgcccctatttcgtcccaagaaaactttaaacagcacgattttaatacggagactttgcctccacagcaacgttttgtttttcccagctcccaggcctagtgtaagaacacaggagtctgaggctcctgagttaaggagggccacccctacacatcccaaacgttcctcccctagctgtgtccctcaccgccaagactaaagacccatgtggctactcacagcttcactgttcctctcgtcctcaccttcctcgcctctgagatctctacttccgctcagtcaggtgctcttccgtcggcgccggccaatatcgtcggcgttggcaaagcatcctgggaaatgtagtaaaacctcagggagagggtgcggcactgtcgctctatcacgtcattgtacggactgaaaatgagcgatggttgccatcttgggttacggcgagactccgcgataccgggctctggagaaaaaaaggaaaacagaaaggctgtttctataatgttccttttactcctctgctctgacctctcaaatgccagctgtgctgtgtacagaagcatgaacctgttcaaaaatagttttccctctaatgtttctcaaagtgtatttttgtcgaaaggggtctacagctagatcaaaacagtgttgataaattgttaaatggcaacccactccagtactcttgcctggaaaattacatggatggagaagcctggtgggctacagtccatggggtcgcaaagagtcggacacgactgacttcactttcacttttcactttatactcctctcatgaatgtacaatggatttttccagaggatatgtgtcctgtgatagcgcaatggattgaacgcaggagcaatgagaatccaggtgtcttttattaagccagagatttgcaaaaatgtaagacaatgccactcttcactatatgtacattttttgttttggaaaacttagttatctattgagagattgtttatgttcgcatataatgggtgtattgttattttaagtgaattaataaactgatattacagtaatttcagttatagatagaacccaca

SEQ ID NO: 40819 - DNA, 1036 bp, Bovine  19866880847119
  misc_feature (1)..(1): n is a, c, g, or t
nctctgggttgttttattctcccctcgccttatcctctttacatcctcttcttcccaccttcaccctcagaaacacagggcttctcccaggttacctagacactgggttccagcagaggagtgtctggtacaaaggcctttatttctctccttttcttggagatatgaactatttcttgtccacacagctaaatgtatctctcttaggctgatgacttaacagttactgaataatttacctaaagtgcccatgtgttatatgacaatttgaagaaacaaggctcagtgtaaccccagagtgactcttgagtgccatttatttcacaaacatttactaaatgccatcaacgtgctagatttagcctctggtgctgaaccacgtgggtcagagttactttctggcagaggaagggcgaagaataaaaccaacaagtatacacatagacaatctcaggtgaggataaatgtcagggagacagtaacaccaggtgagagtgtggaaaggtggggttcgtgcaggtggcattcttggaggagttgtagccaagcttccctccagccagctgccttggagttcattcctcagaagatctccaagagaaaggtatcataatccttattttactgagaacgaatgaggtttccagaagttaaagaacttgctctgagttgcagagtttgtaaatagacagctgggatttgaacccgagtctgtagacttctctggcatggtgctggctttgctgtgaaacgagtggcttagattaaggctgctaaaaatctttcccctaaaatggtatacatataatgttgcaactgacacctctaagagcaactgacacctggtggcaactgacacctctaagagcaggtgctctggctattttctgtctacacaaggaataaaatacgaattatgacacaaaaactgggaaggccaggttgacttatttgctgcctgtccattgagtttcagagagagcatatcaggtttagcagctgcggcaggtcagcagtcaagataccaaatgcaaat

SEQ ID NO: 40820 - DNA, 1667 bp, Bovine  19866880886708
  misc_feature (1)..(1): n is a, c, g, or t
nagttggacaggactgagtgactgagcagcacacccccactaagcagtgagtttcagaggggaaaggagcacataggaaggcctcggaatatagtatttgtggactaaaggaaatgaatggagccaagggttcccttagagtgggaacatccacatttctccaagttgcccttaatgcagaggagcacataccctacagtgaccagctgcagtcacattagaccagctgcagtcacattaccttgatatctaatcagattttgccttcgtcgctgcattacgttactgtcctattttattacagggggcccttccccattctttgatttcccgctgatgcttcaagaagaccatgcccattttctccagtggctttgtctgtccctggcacactgctgtgaacccttcatcaccatcatgcagttccaaacacatggcattagagtttttagcattctgccttgttttccaccctgccacctgccacctgctgttatctataatccctgtgccagctttgggtttacagcctttcaatttgtgattttctctaccttggaccagctggctttcccctgtgatataggggatcttggcttgctgggagactggcctgcttgctacttcaaagtcccaaatcagcacgcagctctctttggtcttgggaggagctgggggctggcgagacgtccctgtcagtggaaggcagcacggacgtcgcatttcggggggccctcggggagtctgcgccgtggcctctggcttgctgctgtctgtgatctgtggtctgcatcgagggccctggggcggaggacttggatttccacggggccaccgaggctccagcgtctgtctggggagctggggtgggaggtgttcactggggacttgtttgtgcagcggctgccacggcagaggggggagcctttcagacagagaggcagacccctgacacacccgcatgtctgagggcggcagccagcctcgagtggcaggaatggatttctcaggacacctgccatatgctcaggggccccaggcaagaaaagtttccatgacagcctgaaatcctattcattcctccttcgcctctccccaggccaactgtcggccacaagggaggtcaccttgctcaggaggttctgagttctgctcatttcctagcaaataattaattcccagcataagaagggtgacagttcttgggtttttgcagctgcttccaggtgagggtcttgcatagatggaaccctctcacccacatgcactttctctgctcccataaaacaggagccggtcgagaacccatgtctccagactgtggaaggaggaagaaaagcaagagtttgtgggctggtccatggcggaccagtggcagggccgccctttgcctctctgtgatcaagttttatttatttatttttcatcccctgcattgctaagtagattcttaaccactggaccaccagagaagtccctgtatgaccaagttaacttcatttccttccttaacagaggagagactcctgttgttgttcagttgctaagtcgtgtctgactctcttgtgaccccgtagactgtgtagcccaccagtctcctttgtccatgggatttcccaggcaagagtactggagtggggtgccatttcctccttcaagggatcttc

SEQ ID NO: 40821 - DNA, 1485 bp, Bovine  19866880944629
  misc_feature (1)..(1): n is a, c, g, or t
naccaaagccagcaaactaaagagccccacgtggcgtacacactccagctcgagccagagcagtcctctcctcttcaaaccattcctggtttcactagaggaagtgagccttttagacaagggtagaaacagctcacacccaccacgtcagccagattttcttaagacactagaaataatcatccccatgaaaggggttcttggataagcttcatagcaaacatggttttacaaaagggaaaaaaagccctctgggtgacaaagtcacatgaatgggtgaacgacaagtcttccatccagccctctctgaactgcaagacgattggtgtgtttcaacagtaaataacacagggttcccaaagacaccaagtgagtgaatcaagcaaatcctcaatcttctcctcatcccagatttctcttttcccagtggcattatcatcttacttagaaaatcctttctgggcccttctgctctacagagcaagactgtcacttaaaagcctgtttactaactggaattgctcttctgtggctgcaaataaaaaccacgggcagctgggacaagtttatcatgggagctgattaattagcagttacagagccctgaaaatcgaattccatttcattaacacagatatgtaactttggagtgaacattgttatgatttaaacacatttgttccatggtggggaagctatttgaggtagtagaaaaatgggaagtcttgtctgtttatttgaagtgtgagaaaagatgaagggggttttttaataatagcatcaataatagctaacactgagctaggatctgtcccacctgtgtctgtattgagtgcttatgtgtacctgcctgattgggcctcaggaccatcctaggagacaaacaccattattgcttgcattttacacaggatgaaatagaggcccacggctactgaaaggtggagccagggttaacactcaggcaggtagaaccagactggtggttctcaattgggatgacagtgggcatggacgttggcctccaggagtacgtgcagtgtctgcacataattttgattgtcatgagtagtctgggctgctaaaggaatctggtagacagagaccagggatgctgctaagcatcctacaatgcacaggacagtccccaaagcaaagaattttatcagtcccaaaatatagatggtactggggaggagaaatcctactccagagcctcatccacgtctctgagggctatgctcaggaaacagggcttcctatacaagaggcaggtctccagcagtgaccccttccctacgtactagagaggtacacgtgctccttcctggccagtcacctcggcagcagcaacacccatacacaaggctaatgctaccatccttgcctgaggtcttggatgtgaccctcttgaaagcctatgagatttcagattccctatcaagagctatgaactctctagaaataatactaattaaacatatg

SEQ ID NO: 40822 - DNA, 1515 bp, Bovine  19866880964366
  misc_feature (1)..(1): n is a, c, g, or t
ncatgccaagcagagagcacattcacacacttgtcctagagtggggggggtcttcacaatcatgtggtggagtggcctagagccttaacaatggagtacgatcaatgggtttgcatcctgattctgacaatatctgtgtgtatgacattaggtgggctccttggcctcactgtgccttgggctctccttgtaaaataagagaatatcgtcttcaagtgcttaaaataaaaagcacgaccaagtgaagggctctgcagacagtgtttatcaaatggtggttctatctatttctgctgctcagcaagacagcatgatgacaaagattaggacttggcaatcagtatgcgtgcatctgaatattggctcttccacctattagctttgtgattcggggcagatgactcaaccactctgagcctcagttttggggtaaaagtacctacctcccagggttgctgtgagaataagataaatatgcagagcagttagcttggtgctccagtaacggctggctttgtgttcactgtaattcctgcagcacacttgagtcttgtaatatagtataatggccaggaatcctgacttctccatgagtgactcagaaacaaattcctcttctctgctgttagttttcacatctctacaaaggatcagctcagctggctccctccggctctgaaatgtcggacttctgagtccttcctgggcttcatcgctgacactacctggcaccctctgcaaggaaactcaccttctaaggaaagaggaaagatccctgtctgtctctccagctctgctcccttggccttatcaaagctggctcactccattactcatcccctctgggggtctctgtgcttcctgtttccagtgggtgctaatgggttaatcagaggcactaatggaacccacaggaactcagtgttagctgactaatgggtcgccccatctgccctccctgtaacacaacgccttcactctgtaaaaggcactcagagattttctgttggctccaatctgctggcttctgacatcttgaaaggccaaagcctggagagggagagagggagggagggggactggggaagtggagtcctggagggagaagctctgtgtcagcaggcaggacatccgggctcccatcccagctctgacactgatctgctgggtgagctaacacaaatccatccccttttctgggcctcagtttcctccttccccatttcctgggcaggttgggctgtaaagactttactggagctgtaataactttctggaatgatcaagtcctgtcacttttgcagcggaggcgtaaatgtcctttcagcctcagtcactgtccaaaaactatagagggcctacgatgtgtcagcctgaggctggtgtagagtgaggcagctttccccggggggctctcgagctctgctcatcctactattgtttctctgtttgacacgtgagagagaataggaaggcctccgtgcttactgagtatcccatgtgtgctagcgggca

SEQ ID NO: 40823 - DNA, 2130 bp, Bovine  19866880978001
  misc_feature (1)..(1): n is a, c, g, or t
nccactgagttttagggtagttctttctgtgtatgtgattattaactgaaaccatatatatcctcacacatattacctattcaaaactaagagcatcttccttgttaacacacagggatggtgctaaatgttaaatgtgcggtatctcaatgattccttgcgagttcactgtatctccatttcacagatgagaaaactgaagctctgagagtttctttggttacttgtccacgatcacacctcaagaaaagaagccctatgggacttctctggtggtttagtggctaagactccacgtctgcaatgcaggggacccaggttcaatccctggtcagggaactagatccctcatgccacaagatcccatatgccacaatgaaaccaaagatcctgcagggcataactaatacccagcagggccaaatgaatacttttaaaaaaataaacattaaaagaaaaatatggccctgagataagaaacaaggaggcctctaacgtctcagggctactgtacctcctgggaccctgctctcactctttcccactatgggcctcaccctctccggtgaggggttggggagaggtgagagttggaaactcacagcccacaggggcctggtcagtaacacagagggccaaggtgggcatggtggactcagcttctgaaagccggctcagagtagctagatccttggatttttaaaatagaatccaaaaatcagatttttatgcacaatctatttttgttttaaagttagcaactagtcttttttttttttaacttagtagactgaaaagcaaaacaaagacagaagcctgtgggtttgcctctctggactagaagatctccaaggagtcttctgcacagacatcctgactttcagcagagcctcactggggagacggtgcaattcccaggaggctcagatctgagaaaggagaggggtggtgaagacagagatgccccagcctctccagcggtggtgaggggaggcagggggtgccaggaaaccaggccacagggagccacagcagtgctggagggcagctgagcctgcggtcagctgcccagagctgcccacctcccccagctcagtctgctccgtgggaccgagggaggcagccagggcaccaggggagactgaatttccgttgcaatgggaaaccacctccgcccacactagccgttttctccacctctcctgctcaccctgctgcttttccaatgggaaccctgtccccctcctcctgtgaccgaccctccttagcggaagaggatcgatcccctcctcagccatctccttgggcctctctccccaccccccactccctagtgtcttcgattccctcctgagcctgctgcccattccatcttcagctgactagtcttcctctgagatccagcctgacagagcgcagcagagtgattgatgagctagggagctctggctggcaggacagccagccagagacagggctctcacaagatagctgagctgcccagggaaagcccccagctaccagtgtgctccctgaggttcccccctgccccccgatccccgtgcagcccagactgacatggcagccactctggacagagcagataaccacaagggccgctgggtatacagtatctggcacacagcagtccctcagccagtgagagcactctgctctctctctgttcgaaaaacagagacccaaggcgatgaagacggtgagcttcttagggctggaaatgttctcattcagccatgcctctcagttcaggtgtttataatttgtacctcgttcattcattcatgcagccatgagagttttgctaggagcaactaagataattgctagtgtgatcaaaccactgggacacgggggtttgaatccaggctccatcacttcctagctgtgtgaacttgggtgtatcactttacctcgttggtggttcagccactaagttttgtctgactcttgcgactcccatgaactgtagcccaccaagcttctctgtccgtgggattctccagacaagaatactggagtgggttgctgtttccttctttaggagatcttccccacccaggaattgaacccaggtctcctgcattgcatttctactcttctaaaaagctg

SEQ ID NO: 40824 - DNA, 1373 bp, Bovine  19866880993021
  misc_feature (1)..(1): n is a, c, g, or t
ntattagaaatgtcaaaaagtgaatgacagaattgaggcaatcttgagtcatccatttcagataataatgaagactcctgcagttagaagcgtaaaaccagagacttgaacccacaatgcttggttctaccccaagatccccccatttagtagctggcagaggagcccagtgggctacagtctgtggggtcacaaagactcagcctcgacttggcaactaaatagcaacaacaaaaggtcattgcatctgatgcttgctcaggcaggtcaggccgttccctctatcacagtgctgacacacagcgttctttcaaatcctcaactagcaggacctcggcagatggagcctcctaccacaattcccatctgttgattttttgctccatggcccagctcctgaattttgctgacatgttttaatctttaaaatatatgtgactgacattctactcattaacattgtatgaacacagaaacaatatgtttttcttagccaaatctttgaataatattgaagtttgatgggaaatgggccatggccttgggtgagcagaacacattgataaagtcaatccatttgcttgtgtgtttccaattagtcaaccacagcttgcctcttggcaaatatgggtaacagatgaaaaggtactttctgggtcagcattaatgcatcactgaaagcaagttagtgacaatttgtaagatgaagcataaatctaagagaaagccaccagtatcatcaggctgaaatctttggtgcatgcatgctcagttgctcagtcatgtctaactctttacgaccccatggactgtagcctgccagtctcctctgtccatgggattctccaggcaagaacactggaatggttgccatgcccttctccaggggatctctccaagccagggattgaacccacgtctcttatggctcctgcattggcaggtgggttctttaccactagtgccaccagagtgactcaactgattgaccttggaactgaaatctggacaaggtgagacagtagagaggtattaggattcaggacttcaaggattattggggtctgggttctagagggagaaaactaataaactgagtttatggatggggtgagaccatggtaagggagatggggtgattggaagatgggaagtcaaggaacaagaggccagaatcttggaaggtacatctatctgcttggatattaaaaatacaaaaattaaaatagaagttggttagagagagtgacagtgagccagacaggcattaaaatcctcaagcaaagaagtcatggcctagtggtcaggaggtgactgccataaggaaaggtgacaggagctgcactctatgacaagggttccaagccagaagc

SEQ ID NO: 40825 - DNA, 638 bp, Bovine  19866881063937
  misc_feature (1)..(1): n is a, c, g, or t
ncaaagatcgaaccccgtctcctgcattgcaggcagattgtctattgctaagccagtgggaagccccccaaatagctgagcaacataaaatcgtctatgtgggcattatctcttccttgctgttccttaactctgctgagttatttttcttaggcttcccttaaactgtactgctaagtgttcagacagccaatataatcagcaattcagtagtcctcctgctaaagcagcacgagattcaaatgacattttttgatagatagcatcagatttcagatttacatgggactcttctcagaataagcttcatgacctaggaggaaatcagcggcattttttgcctggatcttcttacgaactctgcccttggatgtacatttgaaagaacatgataaaaattcctctctcaaaggaactgatctgatccctgactaaaatatcttcaactctgaaattagtagagatctatgaccaatatgaatgatggcttgatcccagatgctggagcttcttgatggggaaagggcaagactcagagcaggaagaggtaacaattaatcattgctgaaacagaaccagatgaggaagactcaaagagattcatctacaaagtcatttatccactgtttaaaaggaaa

SEQ ID NO: 40826 - DNA, 1423 bp, Bovine  19866881096046
  misc_feature (1)..(1): n is a, c, g, or t
naaacctatagattaagagacataaggtatcctaatgaatgagcaaagctagctgtagtgtttagggaatgcacactgagtgagaaaactaaaaggaaattcaacaaattattgcaatggaccaaatgtttatatctcctgctcccctctctaattgctgaaatcttatcttgcagtgtgatagtgtaagaaggtggggtctttgagatgtggttaggtcatgagggtagagccctcatgaatgaggttagtggcctatgaaagggatcctagagagccttcttgccctcaatccaccatgcaaggacccaatgagaagttaatttgcaacctgaagaggaccctctccaaaaccagccatgctggcaccctgatctcagacttccagcccccagaactgtgagaaataaatttctgtcatctataagccaccagatctacagcagtctgttacagcagcctgaattgattaagaggtgtttccccaaaagtcaagatcacagtaacttttggtcggtgtctgtgattggatgtggactgtgggtggacttctgagactggtgtgactttctatgtctgtgtttcattatttttaccataacaagtaataaaaagagagaaggatcaaggggacctgaagtcctaacgaaatactgaatactaatactaaagccaatataattctagcttacgtttttgaacacatgccttatgcaaggtgctatgctcaatacttcaccacagttgtcatgtgtgctgatctagagtcaagtggcttggttaatttctttaactagctgtgtgattttaggcaagtaagtaattctttttgtgcctctgtattctcatctgtaaaatgggatgacagtagtatatctcttgtaaggctgttaggataagtgagttttgcttgtaaagcccctgacacagtgactaattcatagaatgtgcttaaccaactgtaactactgctgcatcccagggaggttgctattaatactctcaaattatgggtgaaaaaattaaaaattggagaggttaactcatagaattattcagtgttgaagctaggctctcaactttttccttctgttttcccaactcattaacttccttccaaagaaagatagtgaaatagcaaatgacagcaacctggcttggatccacagctctgttttgaaggatatctggggtcttgtttcctcccttgccccgacacatggtgttgcaatttcatgacaagacagagcatccggcagtgctgtctgaagcacgtctctctgaagcaatcttggaagagggagtaaaggcgagaaggatgcagggctatgtatccccttcagcagaggcataaacaagccccattcccagagggagccaggagcccagtgaggcagcggcggatgcgtcacacaccttccag

SEQ ID NO: 40827 - DNA, 1253 bp, Bovine  19866881103727
  misc_feature (1)..(1): n is a, c, g, or t
nggaagaaggggaatgagaaacgggactggagagcttaaattgatttttctgcataggagcccagagttgttagccaactaaactgtactccttaaggtggtatttcccatagtattgtcacccgagattattttaaaggatacatgaacggacttaaaaaagttaccgtgtatttaatgtacagtttaaaaacatgtatctagcaagctctgcgtagaataaatgatgctgattttccatttattgtaacgatatagcagttcctttaaatataagtttttttaagtaagagtagtaacatggtataaagaacagttaggttaatgctagactaaggcgtatgtagttatggcccaccccaaatatatctaggatgggactgagattttagtgtttctaagattttagaaacactagtctaaaggagaggctacaaaactaggagaatgtggggagaaaaccagcactcccctgccagtgtgcctccactggcagaagatggggacagctgagagagatctctgctctccccaaccccttaaagggagaggtgctgatgggctctgggaaggtggcggagtccaggtgggttagaggtatggcctgtgtatcttgtctcctgtccctgagctgagactgggaagggtggtttggggaacaggtgtgtagtaaaaggtgtatattggtttcctagggctgctggacaagctaccacaaacctggagacttaataaaaatgtgctctctcacaattctggaagctggaagtccgaaattaaggtgttagcagggccatgttactccttggctttccttggctggtagatgcatcactctgtctctgcctcttgtcacacggtgttctgtcggtatgtctgtctgtgcctctgttttctcgctttataaggacaccattcgttggaatgagggctgcttgacctcatcttaatttaactaattacatcagaaaagaccctatttccaaataaagccattcctgaggttctgggtggacatgaattttggggggacactgtccaacctagtatggggagggggaggtctccttagtggagttcctgggtccctgcatagacaggtcccacatccactgcatttgcacccaatgtctggagttctgcttaaaaagtcattagctattcagagttttttcctcatgagggggtagctgtattccagtccaattatcttatctttgttcctgtacctactaggcaatactactgttttg

SEQ ID NO: 40828 - DNA, 1928 bp, Bovine  19866881137146
  misc_feature (1)..(1): n is a, c, g, or t
nttgagatcacatgtatcaggagcagctggttaatatttttgcctcacctgtctttaacaagtgtcttaaaacagactactgagtactgtgaaaagtgaaagtgaagtcgctcagtcatgtccgattctttgagaccccgtggactgtagcctaccaggcttcctctgtccgtgggattctccaggcaagaatactggactgggttaccatttccttctccaggggatcttcccgacccagggatcgaacccaggtctcccacattggaggcagacactttaacctctgagccaccagggaagcttttgagtactgtgaggaagggtactttgcaagaggtcatgatgctaatataacagctcaggtgctgccgtcctcttcccctcctttcagagcaagcactagctttgtaggttataacttggtagcatgttgacctttgtacatgtgtttacaaactgtaggtcagtgcatcccagactgagaggatttggctgtgaaagacgacttcagcatgtgaattagcactgcatttcagtaattgttttaatgtgtattaggaaaaaaacaactagtatacttgatgtcaaactgttgtgtgtggttttaggacaaagatgtcttttttttaaaaaaactgagttgagtaagagaaatgctaagtgcaagtattgcaaggatatagcaaaaatgatgggaacgtgacagaactgaaatgtgggaagccttgtcctagtaatttcctctaggcatgcacgtgtgatgtaggagtaaatcaagactctacaagcttccattttggcccaccaccatcatggactgcctaccagttccagactagagaattatccacggtgggcatctaaattccttgactgtctttgactgcctcttaccccagtgttgtgtatttgaggaacacagattggtttttaatattaacccaataatttaggtaacactgatggaaaatcacatttccaaaagccaaaaatggcttctaggattagtttctattctgggtgatttatgcccattttctcttctattaggttaggttgggctattgagtcaattagctctgaattaactctactctggggcttccctggtgactcagtagtaaagaatacacctgcagtgcaggggactcagctttgatctctgggtggagaagatcccttggacaaggaaatggcaacctactccagtatttttgcatgggaaatctcacggagaaagaagcttggtgggctacacagtccttgggattgcaaaagagttggacatgacttaactgactgaaaacagactgtgctctgcattttgataaatttatgctaatttttgtgctaatacttgtatttcagccttaacttttgagccatgatactagaattgattgctgaattgtatttgtgtgtgattttgagaatgagggattatggtttcttagaaattgaaaacaaatttaaaatgtggtgaagcaatcccatgtcttgaagaatctctccaaactcttgtactaatcagttgacaaggcttccactcttactaatggatttttcttgggtttgttttagattactgagaagactgttaaagcaaaaagttcggttcctgcctcggatgacacctatccagaaatagaaaaattctttcccttcaatccattaggtactcttggtattgtccaaatgctttagctttcagtttctcttaggatccaattcaactgtaacttgatatggctctgaatatgatttgtgatctaaaactataacaaggctgtctgaatctggggtgctttggacagataacttgtggttttatttttaaggcatcatcttaagtcagaagaggaatcagagcaaagatgggaaaacattcttgtcctcaaaagctaaaaccatccagggggagatta

SEQ ID NO: 40829 - DNA, 1668 bp, Bovine  19866881168962
  misc_feature (1)..(1): n is a, c, g, or t
nttaatctttaagcctcttatgaagtaacaactgtctatttgtcaagtggataactaaggcctacagtgaacaactgagctatccaagatgacacagctggtgagtagaaccagggcttctgacttcctgaacagagcttttaatacaataacatctcaaggcagagggattatggaccagtgaatagaataattctgaaggatggggccacattagtaggttgacaggtaggatgtaaaagtgatcagtcatatcaaccagctgcacttcgaacttgaaacctaggatgtaaggcatgaaaaggttcggagattagagtaatggttctcaaactggcctggggaccctggggagttcctcagatgttttcaagaggtttatgtcaaaactattttcataataatgttaaaatgatatttgctcctcttctattcttattctctcataagtacacagtagagtttccagaggccacaggacatgtgacactcaacaaaaagaatgcagaaggaaatatgagaatctagctatcttctgttaagctagatatgaaagaactttgcagaaatgtcaaacaatgccactcttcttacaagttatttttgttgttgtttggaaaatacaattatttctttaaaaatattttatgtttatgtgaacacatagtacttttaatgttcttgaaaataaatttataaatatttttttttcagttttaactttgaatacagtacgcgtggatagatataacctacacagacaagcatagtttaggtcctcagtatttttaagagtgtaaaatcattttaaggatataatgtttgagaactgctgggttaaaggataactgcaattttcaattaaacttctttcagaagattcattcgggcaagcctagtttctttttggcttctgacacctagactccaggaacaaagttcaatgtgaactggagatttagccactgatgggttgtatgatcagcatggtttaaaccaatttatacaactctggccaaaagttccttttgggatcagaatgaatttgttgcctactttgaccaaattgactagaaattgactggctctgttcattactatgtagatacataaagcaactggggaacaggtgtcactctggtggcaagtagcagaaggtgactctgccagagaagctgtttactgaaaggatcttgggagctgtcagatttgttaggagaaagggagagtcaggcttgaagctaagcttctaagagcagtgaaaacatcacttcgtagacctggactgagagggaccgctgcccctgctgtggtggaagcaccaccaagacctcaaggaaaccacactgaccctcttccagaatgccaaccttgtaaacattgtcatcccaaaactcaggcttcttgccaccattctgccagcaaaatggatctcctggaaatctctttccttaagttcctctctttggaatcaaagtttaaaggagtgtatctgattggcagaacccgagacatgtctttattcatgttgcaagaaaggctggaatttgatttgagatttctaagttctgctttggaggagtaggatgcacaggcaagaaatgatcccaaacatagcaaaaaacatttaagaagagctaagaagtcagtcagaacacaaaactgatg

SEQ ID NO: 40830 - DNA, 1152 bp, Bovine  19866881171594
  misc_feature (1)..(1): n is a, c, g, or t
ntgtgctctggatgtagcctgtcaggcaatgatgagcctcaagatggaaccctacaagcagtgaagagaggctctgccttaatcctagatgcctctatctgaagaccaaggagcataaatgattaattcctgctattccatttttaaggaaaagaacttctcaaaaaccctcattcaattttatcaagactaagaagcctaatattaagaagttgtaatcatttatgttttattaagtagtcatcaacagcaatatcctaaaagtcagtcacatttcacagctagagggaatcatggcccccggctgccatctctcccgggctgcccatgagcatcagttaagaggggcctctgctccactgctgcttccagaccacacaccctgcccctctgccctgaaaccccagctcgcaatctctcatcatcagaatacaccatccattgccagttttgttgcaaatgcctgggtcagtccctcccctgcgtgaagaatttaactactagctcactgccattctctctaaaaccactccttctttctgtttattccttctaagatcccgctctcaaaattcccatagttctcttccaatgcgcttggcttccactacctgagtcactgactgctgtggtcatctcctggatgatatcactaccaacaacttcaaactgtctataatctgatcctcaggcaccccaggctcccgcttcctggctcagtgataccctgtccccaacaaccctttagtcccccagggaccaacacttcagatccaactcatttcctcaaactcatggctctcatgattctacatgatttagtccctgcctacctctctggcattgtctcccagtcctctccctattattcacaacccaccagcccttctgacccctctgcattttctcaaacaagtccattcctagctcagggcctctgtacttgctctcttctctgcctagacagtcctactaaaggcgcatgtcctcaagactcctcccttacctctttcaaatttttgttcataagtaccttctcaatgtgaccatctataatctatttaagatttcaacccatcaacccaaaggacatacactctcttccctactttacttttttcatgccacttatcactacagcatacgggataa

SEQ ID NO: 40831 - DNA, 860 bp, Bovine  19866881305876
  misc_feature (1)..(1): n is a, c, g, or t
naacaacgaagtgttagtaatagaaaaggcctgaaaacaagttaggctagcacaaacatctatgctgtgaatatatgcacatatatgtgcagaatatatatgtacaaagacatgtgtgttttttaaaagacaaatagaatcatatgtatgtttctgcagcttgctttcattttatttttcatttactaatgttttgaccatcttccccatgattacagctaaatctacctccttataaaatcctgctctctctgctttggctcttactttctcatcatccttgctgaatacagcagtcagaataatctttttaaaatgtaaatcaggtcttattacctccaagcttaaaaaccttcagtggcctcccattactcttaagacaaaggccaaactgcccaatctgatctcttaaggccttaggtaaccttgctcctcactccctccctggactcacctctggcagccacatcggctgctctcattccttaaaggcaccaggctccttcctgtaccttagagccttccaaagtgctctgccctctcattgagatgcccccgcatacatgcacacacatctacatacatatagcacacatttgcactcattcttagttacacatgcattcatacacatacaccacactagtcttaaaagttcagctcaaacatcacaacatgtttctcctaccccgccccccaccacaacttccaacaccactccagactgtaacagatctattgcttgctagattgttagtcactcagtcatgtttgactctgcaacaccatggactctagcctgccaggctcctctgtccatgggaaattctgcaggcaagagtactggaatgggttaccat

SEQ ID NO: 40832 - DNA, 833 bp, Bovine  19866881313672
  misc_feature (1)..(1): n is a, c, g, or t
ntaaaccaggagagtgattcctgctccctgcctcccaggtatcctgggagaaaataggtatgggtatcctccttccgtctcccgggcctctgattgtggagtggggaagggtcttggcgggcatcctagttggctggggaagtctgtgctccctaagtgaagggaggacagttaagacttccggttggctctgtgcccttgcccttgacttgttctttgtcttcctaaaccacacagccacttgggtaaagggagtgcagccagcaattctctctgagagaacctgccagaaagaggtgacattgttggtctgctgtttcttccttttctttctctctcttcttttggccatgctgcgcaacttgcaggatcttagttccctgaccagggattgaacccatgctcctgcagtggaagcactgagtcctaaccactggatggccagggatttcccttcattttttaaaaaaagttattaaacacacaaagtactttttttgtttctctaggaaactacgaaaataaatacaagcaaacagaagaaagtaatattccccccacaaccccactcctcagagtaatctgttaacgttttagtgtaggttcttctgttcttgtgtgtgtgtgtcatcacatttctgtagagcttttatttagtgaagatggaaaatatcttttcttaaaacactgttgatttcataatatatcatgctcacatttccatatcgttcttcttcacccagtcctgattattggacttttgcaaaaaattgaaacaattcattgtgtttatttagaatagacaatataagaacatgtaagaaagaaacaaa

SEQ ID NO: 40833 - DNA, 1708 bp, Bovine  19866881394679
  misc_feature (1)..(1): n is a, c, g, or t
natggatatgggaatgtgcatctgaggatgtagagagaattgtgcctgacattgaacagtaatgtgagttaaataaggaaacacataaatatttgacataggtctcgtgtttctctgacttcctcttcttcctcttttgggttctttgaaccaaaccatcaaacctcttttgggggattttcacttgtggtgaccaccaagttcagaaaggtctaaaagaagtggtgggaacctttttccttgggggcatctaaaaattgtatctggacaaagtgttagagccaagctttggagtagacagaccgggcccctagggagcaaggcaaggaagtgatgtcatagagtgatctctggcttctttggcagaggtgactgggcaggacccagggatcggggtggacatgtttgggaaatgtgtgtgagatcacgtcaggccccgtggacatggtggaggagggaggcctgtgagaaagaagcagttggctttgcccatctcgatcgtgtcctgaggaacgctgggacaggaaatgcccagcgtttctttactgtttactggacgccagacccacagatttggaaggttgccttgggagtcatgaaaagatgaagggagaaggaggaggagcattggttttctgccttttgtgggactgccctggtaagtgctcggggatagggtatgtggaagattttgtagaaacttctagatagggggttccctggtggctcagacagtagtaaagaatccacctgcaatgcggaagacctgggtttgacccctgggttgggaagatcccctggaggatggcatggcaacccactccagtattcttgcctggcgaatccccatggacagaggagcctgtcaggctacagtccatagggtcgcgaagagctggacatgactaagtgactgagcacatagcacagagcagttagggcatggtgtgaattacaagttcttggaaaagcttccaaatatttccctaattctttagagtactatccgtttagacataagcattgccctcttccaatagccctatgttaattaactatgagtatagttatgcatcaagcctgtgtcaggctaattcacaggcatcatcttatttaaccctgcatacaacacttttgtagaagacactattggctctaattcacaggtgaggaaactgaggataagagtgatttattaatttgctcaagattattcagagatgggattagaacagatatggtttgacttaaaggtggcacttttcacctctcagataacctgagtttgactgtaggctgacctcacagataaagtgacaggaatttctgggtatctcagcaggtcagagaccttggtcagagagacagaatttgttctgatctgtgtgctaccacacaatgtgggtccttctctgggtgagatctgaggactgcatctttcctgctaacccctccctgggaacctcaagtgagggcaagagcttgtatcaggcttgagccttacttcttccaagaagaagcgtaggggacctgatttaaaaattgcctttaaggactgcaaaagttattaatcttatgatggaaatcaactgttgtctgtctatctcagagagagagacagagagagcagatatagcctcctaagacagcatgaaagatatcatttagacctaaggaagtagcttattaaacatcgggattaaattca

SEQ ID NO: 40834 - DNA, 1407 bp, Bovine  19866881470112
  misc_feature (1)..(1): n is a, c, g, or t
nctggcctcgctcctgttcccagacacatctgagcacagcgcaaggtgtgcggggtttgccacctctgccaaggtcagtgcctctgtgctgggggtgagggaggggtctgcatgcctggactccgggcagccctgcctcctgtgtgtaacttggtttggggcttcatgtaggtcgtgattcccttgtccctggtctttctcggagccctgcccctctcaggcggtcctctttctgctttggaagcctctggaagagcccttgggcaggcaggagagtgtttctaaaggactccagcctgtcttgacacccatcaccttcctctcctccaggatggcacctctggggtttctcaccctgggactgtcccccaaccgtcttggttacccccagggaagggtataggaccaggtaagggagatctaggggaggagggcagagaaggctccaggtggagggaagtccccccagttggtgttgcttgggttgtacctgtgttcatcacagaacactccattcattcattaatacattcatcccctcattcaccagatgttcatttgcccttaactgtaccagatccagatcagtccctggctcgggaatatcccctggaggagggcatggcaaccattccactattcttgcctgggaaattccatgaacagaggagcctggtgtccatggggtcgcaaaagaatcagacacgacttagcgactaaacaacaactgagatagcaaaagcaggtttttttgctgttttttttttaaaggtggagtcccacctacctgccctccccaaccccatcacaaccatctgtctttgtgcccccacctgctcaaactgggcaatcaaccttctgggagggcagataaaagctctcccgtctggctcaggtgataaaggtctagggagggagagtttcaggaagcctctgcctgcccctccaccctgccccttctcagtgtggcttttgtgccggccacactgatgctgcccctggccccattgtgagcaggatcaccctgcctggcctgttcctgccccctttccgccctcgccagcagctgcctgcctgcctgccaagtgcctgcctaatccaggagcgcttcctgagccgcccctcgctggctgcccttttgtttctggaattcaggcagctcagcagaggggctggcttcgtgcacccagctgcttcgagctgccttaggtcaagagtgctccgagaggaatgcgatccttagagcaaagcccttgtaatggatgccttcccccgctccccggcaccccccctcacaattgggttaggggaataattggccagactctcaacaaacagggtaggcatgctggcgtcctggttttgttgttcatttcccaaagaatcaccctgctctgaggtgctgag

SEQ ID NO: 40835 - DNA, 1335 bp, Bovine  19866881534606
  misc_feature (1)..(1): n is a, c, g, or t
ntgttgactttggggatagcctcagtttatccatctttaaaatgggacaagaaagccaatttgttatctgcagggaacaaaaaaaagggtatacattccatttgtcctattgtacaagagcagtctgatgtgtaggcaagggttgatgtaagggtcttttaaagaaagagcctctttgccaaaggtattcatctccccctgtgccttaccaccctgcatgaagaactcctgtgtctgttgcttcttctgttttaaccccaaactattgttaaaataggtgaattaacaagatgggatctcacattaggtcatgatgttcattaatactgtggtctgaatgacatcctctagttaatcctgagccagttgatggatggtgaggctaggagggtgacctgagggcctgcttggaagggcaccatggacccatttggtaaatcaccctttgagggtacatgggtaccccagaggttccattttcaacatggaacagatcttctaatcactgtcctctagccaccagggccaattgagggtggcagaggtgactctcaacctctagcaagttcacgtttcttctttcggccttgtatccctctctggttccgtgctctttaaaaagaggacaactttgctagaaacctagcaagcattaagttccctgtactctcttcttgaaagctaagtcttcctgatagtctttgtaaatatttatgtatgtatttgctgcattgggccttagctgtggcgcatgggatcctcattgtggcgtgtgggctcttccgttgcggcacatggcatgcaggctccagggcacagttggggcgttgcaggcttctccgtgcaagctcagtagttgtggtatgtaggcttagttgccccaaggcatgtggtatcttagttcccccaaccaggggttgaaccctcatcccctgcagtagaaggcagattcttaaccactggaccacaagggaagtcctgctaatctgttataaatggggaaagcaaacgtgcgtttctctttacacttttgtcttttgcatccagtaaaagggacaaatgatgctttgtgtgtgtgtagagggggacggggaggagaatgtgagttctcttaaaggcaagatttgaggctcagaagctgcagttggtggggcttcagaatcctgtttctgcttctgaggaccagagaactcagaggtgacttctcactggaagaggcccatccttcacccccaggcagccctttcacaaacagggtgatatgaagagttctggattgattccatagtcaaacagatctaggctgctgtgtggtctgatatttttaaatattac

SEQ ID NO: 40836 - DNA, 1147 bp, Bovine  19866881594887
  misc_feature (1)..(1): n is a, c, g, or t
ntcacaactgcacatatttggatctttgttagtttagaagacatggttatttgagtggcacaatctcaagtttgcctttgaaatatctttgaagattgtggttaccaaatgccaaaccataggctttccatattagaattccttggggttgtcattgaaaacagattcctggaaacttagcacagatataacaaatcacttggggtgggaacccagggaattcatatttttaactagctggtcaagtgattctgctgggaagctgtgactgggaacaaccactgttaacaacttaactttcagtcaacttgaaggaggatatataaatattctgaagagtaaatctctcatgcaacattcaggaatgcatacactaccaatattttcagtatacaaaaagatataaggccctccatttgataccacatttgggggggcctcatctcaaagtaactgcatatgctttagactaactcattgcatttctttctgtgtattccttaattaagtctcttcagtaatttacctttagtctaaagctttgataaatatcaacgagtaacatgccaagctaaagctaagcagtctgcagaaaatcatcagtcaaaggtccctttttttttttttttcctctttacctcccaccctaggtgagctcatccggtcctgttgcttaaatagcatctatgtgctgatgactcacaaatttctatctccattgtgagcctctcatctgcactttagggtcatatacccaactgtctccttgtcatctctagttggcatctcatacgaatctcaattttaagaatgctgaaaagtactgaactcttaaatcattccacctaagcttttcctctccaagtccaatcttctcaacctcagcaaatggtaccaccatttacccagacactctagccaaaaacctaggggagatcagtcttgagccctccctcttcctaaccacccccttccacatttatttctaaatcctgtgactcttacttcacaaatgtattccaaatctgcctgtgactcttcacctctacttctatgaccctgatcccagccaccatcatcttctgctttatttaacaggaactgggacgatttcttctccaagacactcgaccactgtagtcagagg

SEQ ID NO: 40837 - DNA, 672 bp, Bovine  19866881654875
  misc_feature (1)..(1): n is a, c, g, or t
nctatttcccagccaaagccagccagagaatgttaattatctcattcctttttctccatcctcggtgaattattgactttcagggcatgctgtctttaattgtgaggtattccagaatgagcaggttatcaaaaatgtgcaggggggagagcttcggttcaaccctgggaagctaaggtggggaaatttatccttctttatttacatagtaataggatgagattttgccagctggctaatggattcttaaagagaaacaagcttcctgtggcctagttagaacgattggttgccctgctaccacataaaacactagatcaagaaagcagtggctccttttttctagaatagtcttctgtttaggggactatctgaattattttcatgggagaggtatttgtaatttatagtgggaggtggaatggtagggtggacatagctgctgtatggtttaaatgcatcagcccttgactctgtaaccaaacagctattgggactcagatggtgcatttaatcacccccaagtctcagttttactatcaatcatgcagggatggttatcatttgctctaaatcaccttagcaagtttgttgtaaagacaagataaaaagaattggttttagagtgctgaatgattgtattttgtatctctgagatgctcatgtgattgt

SEQ ID NO: 40838 - DNA, 1538 bp, Bovine  19866881751802
  misc_feature (1)..(1): n is a, c, g, or t
ntttttgccaagctgaaatggttctttccataaagtggtctccctgcacccatcaatcttacctcattcacactattggcacaaagggttaaaaggtcaagagtcagccaggctaggctttaggcttgcttctgtcttgtactgcttggggaaagtttaacctctttatattcatttctgtatccgtaagatgggaattaaaaaaaatacctaacacgtgcatatgttgcaaaatgatttccacaataagtttagtaaacatccatcactttgcaatacagtcgactcttgaacaacacaggtttgaacagcataagttcacttatacacagattttttcactaattacatactatagtactgcatgatatactgttgcttgaatctgtggatatggaacttcagatatggtgggacaactgtaaagttacatgtggattttcccctgtgtggaggattggtgctcctaaaccctaaattgttcaaggatcaactgtgtatgtcaagtcattatgttgtacagcttaaacttatccagtgctctgtgtcaatcatatctaactaaaaaaaaatcttatctaaagggctgtgggaagttaagaaagtacattaaaatcatacaggtgtgtacctggcatgtaattttaagctctatgttttttataattattattgactagtcaaatttaataagaaagctagcgttaccgttttgaattactaaaaagtgatatttggacatactcgatatgttatgtggagacagtcttctaatcttttacccccaattaaatggacagcacagctctgtaacatcgtctcaagtatggtcagtcaaatgtttcccttgtctctcaaacacccatgacttttgaaatcgaaagtacctgttttggcaatacactgcctcattgtattacatgtcttagttatttcatcctgactagatggtgagcaagttgaggcctgcaattctatcttctctacttctttatccctgttgaagtggaccacaggtacgagctcagcatttgtgtttcagtggatcaatgatacggagaaaagcagctcaaatctgaatgcaggtgatggagaggaacacaatttttaggcccaaagggcttgggggcacttacccaggtcttcatttccattgcctggtgcaagaggattgtggcaagggagatggtgttgatggggtgttccaaaggtaaaaacgtcgatatcagagtccttgtaggtctgcagagcaggaacaaacaggcactgtcagctgtgcccagggactgaaggccttagtttggacaagtaaagcaccagtggaggcaggtgtcaagggaggggaaggaatggggagaaagctgtccagctactgtcatgtggaactgactgcagggacagacaggaggaggagtgagttgataggactaaactcttcaaaatgcatttgcaaaggaagccatgaagagtatcccagagctttgcagaatgagtaaacaaaaaattgagtacctaccaggcacaatgccaactgctaa

SEQ ID NO: 40839 - DNA, 1499 bp, Bovine  19866881790758
  misc_feature (1)..(1): n is a, c, g, or t
nattaatttaacttcctggaaataaaaccataggaatgataatgtgctttgggcactatatattactgtgtggaattttgagtccctgtaaacaaggaggtaaattaaattcagaaatgtaccagatttggccatgctgcatagccaagcatcactggtttgggaaatgaactcgtattatagatgataataaaattgctcccaggttgaccttagtgaatggaagtttatttgctggggagggaggagagcaggtggaccagttcatgaaaggaagggatgctctagatgaggctgttcagtgaccatgttggtgcagttagaccctttgaggggatgaggcctttagaatgtacctttcccaatggcccacctttgctcaaggccaccacctaagggaagaaggactgctaaaattgggaggaatttgtttttcagatttggactgtatctcaggcagcagaggttagtgggaaaagcaactgcattgaaggcagagaatcttaaattcacatcctctcctagccagttcctcactgaccttggacaacttacttaatctctttgaacctcagtttccccaggctctaagttgaagacaataagtgtttatctctagttttctgtaaggattaaaagaattaagtagaaggtgccttactttttcttcctgctcacctcagtgaaataaatagttggacaaatattacaaaataagagagccctccactataattgatgtcctgatggctgagtactagatactggtagacgcaggatcaacttcagtcaagatggcagaatgaacagaggcaaggagtcctgccctctcaacattagaaatgccaaactaaataatgtttttaatttttaacaaactttttggctgaaaatcaggaaagaaagcagttgccaggaataaagaaagaagacaaaattatttagatgtagcatgtcttacaagggaaagaaatcacaggcttgggtctgcctaaggaactgtggaagttatggctgcccaggacatgacgtctggactgtgaaagttttcaattcacagagagtcatttttttctggtgtgctagcaggaaagtagatagaccatagaaagattaatcctgaaatatccagaaaattctgttacccagaattccccattctgctgttttcatttactcgaggttttaccatgtacaccaggaaatgattgtgctgacttttcctttaacccataatcactcagcgtgtttagctatttctcttttctgtatttctcagctcctttggagggaaatgagagaccctccccaggcaaggatgcaataatctgaccatggttttaagggacagtgagcttctttccagtgcattattaaacactatttacagaaggaaggatgaagacaaaggcttttagggtggagggcataagtgagagtccaagaatgaaggtgcaaagcagtagacagtagtttggtgtggagggaagggttgttca

SEQ ID NO: 40840 - DNA, 1014 bp, Bovine  19866880578578
  misc_feature (1)..(1): n is a, c, g, or t
natttatagtacccagggtaaattacccataattaaaagtagactttatgaacaatttgttaaactaggaattagctagggatgtaaagccacaaactggagaaattccttgcacaactgaaccagaattattttgtcgtcacttgcagattaaattaactgacttcgtcagtgttacctcccttgggaactgaggcatgttgggcctttcctggtgtttcagatcgtaaagaatccacctgtaattcaagagacccagatttgattccggggtcaggaagattccctggagaagggattggctaccgactccagtaatcttgcctgaaaaattccacggacagaggagcctggaggttacagcctatggagtggcaaagagttagaaatgactgagagactaaccctttcacacttcacttgtatttagcaattttttaaaaagtggaaatgaaacaaattaatggtgaaaattgctaaaaaaaaaaaaaagttgacgacctttgaagagaaacctttagatttcccgttatcttcattgggaaatattagggacaaataatttgaaggtttcttacatgcatattttctgtctttaaatggatgtcattaatttgaatatttatgataattgttatattatctaaacatactattgaaaattgaatcatttgaaaatgtgaaaattcttttgattttccattcccactcaactatttgtcatggtatgagaatactgttactcaataactttgaattactctggggtgaatcattgccagagggaagaagtttagaaacacttggtatcccttaaaacaagggagatctacaatggggaaaatattaaaacagcccagaagcatcacatgctggcatctttagaattattttttgtataccatttgatcaattgatcaatgtgtcactgaaaccaaagaacaaataatatttcttatagctggactgtcaatcaatacctatgtaatctggtggtggattagtcaccaagtt

SEQ ID NO: 40841 - DNA, 1321 bp, Bovine  19866880606337
  misc_feature (1)..(1): n is a, c, g, or t
ncctgaacagaggtaagattacttatgtaaactgaaatggatcagcctcatacaactccctgacaaacatcttagagcaattcctcaataaagtttgtcatcaagtttaccttcaaaatatgtgaaatagaaaatctaatttattcttatggcagggaatatatgtatgtatgtatatggagctgcactttgcttgtggggaaaatgtaaacatatttctgtcaagataagtattttaactttttattgctaagtataatgaaaaattaaaaaaaaaacacataaaaatatttatgccagtaattgaaatgcagcctatattattatatcagtcagaatgtgttcttaatatactgctgtaaggatatgggggtgcagaaactctaaataatgttgtactagaaaggttttatcacctaatttacaaagtgagagataggtaaattcctgttagggtgaaaaaaagaaaacaaaaaacattgaaaagtccaagagaagttaccatattgcatttgatatgtacattctatatttccaatttaaatgcacatttctttgggaggaaagaaagacattaatttgatgtgaaaaactatggtcttgttctatgcaacctttaagttatagttgtgagagacaaacacctcacttctttaacactgtaagagatgaatttaatagttaatttggttaattaattgaaaggccaaagtgaattttgtctaagccagcttaaggcaaattttgatagcccaaatagttcaactcagcttgctaaccacatttctagaagcagaaacagatgctccaggctaaggactgctcacaaaagattttaatgagatgaaaaagtatgaatataaattgcaccttatctctagtgcttgagagtgaattttctcagaaattatgtttagaaagatattgtgctgtgatgagcataaatgctcatactcaatttcacttattgcaagtgatatttctatttcttctgtctcctaaggaagagcttatatggcaaatctagctagattttggcaataagcagtctttgttttggggaaaacataatttaatatactatcttttttttttcattgatagaagagataagagtgacttaggtaccaggtattaatagaaaaccttcaagtctgtcaagcttcagtcacacaatttctgaaacccttatatcgttctgatgggagttgatatttctacaatggctgcttataaggtttgtgctctgcagctaaattgaaatcatgggttaaggtataaaaactgtaagcactgaaattctctctcccactttcaaaga

SEQ ID NO: 40842 - DNA, 725 bp, Bovine  19866880609619
  misc_feature (1)..(1): n is a, c, g, or t
nctaatacagactatccttctgccgcaagaaaatatcttatctatcagatcacatatagaagaataaaatgcgccctacacttagttatgtttactcccactaaaaccacaacaataacaaaaaagagatgaaatcaaagaccaatttactggttgttcttttataatggcagtaacaggtataatatccaccgtgattaatagtccttgtctacattggaaaatccaaaacaagaacatgttttgcagatattgaggtgctgattcataaaggcttttgattaacctatactaccataagcatttctaatttaaacagtcaatttttaaaatcaattaaatgatattccttgcattcaaacaactactttagaataactatttacaactcagtttttaaaaacttgataatgccctttggtctatggaacgtttcactggaataatttgaagtgatcactataattatccaaaataatagtatcaggttgaaacagaaagaacaattagaggactcctctgattgctcagctcaaatgaacaacattctctctttcaggcactctcagtttctcttctccccttcttgagtctagctcaaatttcatttatttccctgtctctacttcctcacctcatcaaaagtcagtgactcactgtgatatttttactgtagccatcttgtttgccttctcttgctctgacctgctcctgctgtgggaaat

SEQ ID NO: 40843 - DNA, 2514 bp, Bovine  19866880620153
  misc_feature (1)..(1): n is a, c, g, or t
ngcagattttttttctttattttacatgttccttatcttgctttcacagccatttacacacaagcggatcagctgtgctcaaaaggccttgaaccagttactgtaataattatgtgaatgacctttccagactcatctgaactctggtggtgaggtgggagggaagaatacattcaatttcctgccccttttagttcctgctcatctctctttcacatagcatttacaaatcattttttgttacactccatcaaatgcctattaggaaacaaggacattaagtaattttttccttttttatacttttattgcaaataagaaaagcaccagttatcaattcacaaagtcattttcgtggtagtttgtgttcccttttcctcagtctttaaccatctcaaatggctcctcttccgtcacattgtaactgtgagaatgacacatattcctctgagactccccaaagcctgcaactggcaaacgttcatcaaagaacctgctctttagttacagattgatgatttattaatactgtttatttgaaactgccagtcactaacgactgcagaaattaaaaaataaattggagttgtgtggtatttgtctatcaaatcaaactcaaattacttaatcattagattgacgaaggatctggggataggagttagttgttgagtctaggaatcaataaatgtttagatatagagaaatggtacatatggattcaagaaaattgcacttatgggctatattggttgcttcagtattgttgaagttaaggacaaatcctcatttcagatggtacctaaaggaaatgggtgctgaaagaaccttaaagattgcatagcctattatcagtttgtagatggaaaaatgagatcctgcagggaaagattagaccaagacacttgggcaagctggccagactaatcatatgatgcttcatcatttgatattctttacattttcaacattcttccttccacagtgccaactatgagagtgctttatttacttatttatttttgctctcagaggtgtcatctatttctagggacacagaaccaatttattactcacactttggagtcacagttaactggcatcatatttctaattcttccagagctggcttaggaatgcttaaactgccttacaagaaaaactgcatgcctgctaaaggtctcacagctaacgtgctgtagaagcagaccaggtcttctgattctaaaactaatgctctttccaacttattgtaacatttttcagttgctaagagtaatttccatttttatcaaagcaactatttttctggatgtattaagtttcccagtgattaggaatattagtatagaggacaagtcaccaaaagcataaagcaagagataatatcaaaattactgagctttatacttggattcttttagaaacacatccaagaaccttactttgggtgaatctccctgtagtttcatagaataacctcttccaccaaaagttgattgagggatattaagtttttataatataaaggtttttagcagtatataacctcatgactacaatttccaaaaacagtctttcttttaatgattacgtatttaagtttgtggtttcctttgggttttttagggaaacctttcagccttaataatcataaatttagaagtcatagtcgagggtctagtaacagaaaatctttatgattatctaaccccatcaattctagtgtaagtcttcttttcaatttagggtttagcctgagattcagaggatgcatcatatctgaatgtctttggtctttttgcctgatacttaatggaggagaaaattttcctttatattaatatctctgatgtcaatgacatacacatagcacactgaagattacatacaaagtttatttgttcactaattaaaaaaaaaaagtctttatctatttatggctgtgctgggtcttgtttgctgtgcaggcttttctctagttgtaacaagccagagttagtctttagttgaggttcacgggcttttcactgcagtggcttctcttgatgtggagctctagggtgcaagggcttcagtagttgtagcccatgggctcagtagttgcagctcccaggctctaaagcaccagctcagtagtcgtggtgcacaggcttagttgctccacagcatctgggatctttctgaaccaggaatagaacccaagtctcctgcactgacaggaagattctttacagttcagccaccagggaagcccttatttgttcatgcttaaatttgagctcttaccaactgagcaaccagagacataattccatctctgtctttggaattttagtgatttttaaaacttggaaacagatgctcttcatttgaggtagggagggtgaatcacatggaaaaggctgttacttaaattgtactttttaacaccatctcctatgcctttatcatacaggtaatattaactaagtttttatttatctttgcaataatatttatggaaaagattac

SEQ ID NO: 40844 - DNA, 1221 bp, Bovine  19866880681073
  misc_feature (1)..(1): n is a, c, g, or t
ntgtgttggaatttgtattatttaggcaacattgtttattttatgggatgataccaagatagaatgtattgactgatcactgtgggatactcttgtgtctgttcctttattcttttattccaaatatacttcaatgtggcttgcagtgatatataaaatacagctagaaaatatgaattaaaacacatgaaagtaaggaaaacatgaaacttcaggacataaaatggagctgggtttgaaactaattcagagtatctactgtaaatgtctataaatctgtcataggttagtcccatttggggtaattagttaaagaaaaagaaactttggtcagctatatatttcccactggtttaaggactaaaatgaaatagatagtagaaatgcagctatttccaacactaagattagacaaattttctgaagggccctcattaacagcttactgtttgatgtaacggttagtgacccagacaatattcttgatgtgtacataacaatgagtttcatctgctccaataaagatagatgaaattcaattatcaatagcaaaatgggaagtaattatctaacattgtgctcttttaatctttaatgtgcatacaatcacttgagagccttgttaaaatacaccccctttcaatagatcgggagtgagggccatataagctgcatttatcaaaaccttccaggtaatgcttatgcagctggtctgtggaccatgctcagagtagcaaggctctaggctgcaaactagtttgatataatttgtcttctgttgctcttgtttgatctatatttagaggatcagaaagaatggatagactgagtattttccaagtaatcttccataactgttttctcatctgagcgtttgaaagatcttggctagatgtgactttaagtttgttctccctgataacagcctgacatatggcttttgtcaggtaattccctttaaccttaatagagagtaaaactggtgttgacatgcttttgtgaaaaacaagaaaactaacagagcctgaatagaatgtcattccattcctgctcaagtgaagcccagaagtaccccagatagggttaagatttttctgagcaacataaaagtgtagtttgcagagcaatttgggaaagcaattccactttggtatataccacctggagtaaccctcccacacatgcacaagaaaatataaaagtatgctcactgcaatataa

SEQ ID NO: 40845 - DNA, 4318 bp, Bovine  19866880758644
  misc_feature (1)..(1): n is a, c, g, or t
natctatgatacaaaatggaccagactaagctgcttgattctcctgctccatgtggtgttgatcaaggtcacttggtgacattcagaaggtagctgagctggagtagagaatccaaggcagcttcttttatatatctggtgcctcggtggggaagaatggagagcaaggctctattttcatagtttttccacataatgtttacagcagagagtttaaacttcagcagttgagctgcctagagtgggtgtttcaagaggcaagaagcagaaactgtcgatctctttgggccttgacctataaactggcaaagcatcccttctgccatctcaatgtgttaaagcagttatgaaacctgcccatattcaagggggagaatacatagatgccctcacctctctatgagagaaatgacaacaattttgtcaccataattgatctgtcacagccattctatgaaatttgaattttatcctctagtgcatggtagctactgaaagattttcatctagagaaagacatattagaatcagttgtgacagcatgatataggaaataaagaaaaaaaaaaaacttggaggaaggaatcccagacattcattatcacagaatttttactttgtatttttaagtggttttttttgggggggaaggggcacggttaaagcccattccattgttatgattgtaaacatgattatgtttggtttctaagatattgatataattagaaatggtaagctttcacatgtgttgggtttttatcactccagttagactataagctctttgaaatagaaatcttataaatctatcacaccaagtattttgtaaatgctcagaaaatatttattgattgacagattaaagaaagcaaaacacatgaaactcttcttctgtaaacaaatatttattgtgcttttgaaatgtgccaggcatcattctgttattataattaaaatataatgagatataacattatatattttcaaggtatacattacattgatttaatatagttataaattgcaaaatgactatgaccattccaatagctaacatctccatcacttcacataattatcctttctttgtttaacatcattaaacaaacatttctttgtttaacttgttagtttctttgtttaaacaaacattaaacatttctttgttcaatatcatttctttggttaatatcgagttttttagcaactttcagtatgtttaatatcatcaactataatcaccttgaaatacatggaattcccaaaacttactaatattataattggaagttcttaccctttgtggatataaagttttccccaggtgatttcttgaaaatgctatccattccccactgaatattattgacccttttcaaatattagctgcccacgtatgcagtttcatttctgtgctcttggctgtgttccatttgtcctgtgtctatcttcatgccagtaccacactcttttgactactactgcctggtagtatactttgaaatcagaaagtgtgatgtatctggctttgtttttctttctgaaaattgctttggctctttgggggatcttctgtggtaccatgtaaattttagcattattttttctttttctgtaaaacatgccattataatttttataggaattgcattaatgttatagatggctttgaatattatggactttttgacaatgtccattcttccaatctatgaacacatatatctttccatttatttgaatcatcttccttttattcaacaaagtcctatagttgtcagtgtatagttcttcactctcttggttaaatgtactcccaagtattttattgtttttgatactattgggattgagattgttttatttctttttcagatatctcattgttagtatataaaaatgtgactgatttctatatgctgtttataaactatagagataccctgtaattcttactgaatttgttgattagttctaacagttttggatggaatctttaggattttctatagataaaagtaggagaaggcaatggcaccccactccagtactcttgcttggaaaatcccatggatggaggaggctggtgggctacagtccatggggtcactaagagttggacatgactgagcgacttaactttcacttttcaccttcatgcattggagaaggaaatggcaacccactccagtattcttgcctggagaatcccagggacaggggagcctggtgggctgccatctatggggtcgcacagagtcggacacgactgaagcgacttagcagcagcatagataaaagtatagcatttgccaatacagaaaattttactgcttcttttccaataatcatgtctttttttttgccaaattactctggctagaacttccagtactatgttgaataagaatggtgagagtgggcacctttgtcttgttcctgatcttagagaaaagtttccaaccttttactgtagaatgtaacattaactgtggccttgttttatacagcttttattatgtagaggcaaattccttctatagtcaatttgttgagaatttttattccgaaagaatattatatttttgtcaaatgcttttcatgcattattgagatgataacatgatttttatctttcattctagcattaatatgatatatcacaaactgatttgcacatatttaaccacttttccatcccaagaacaaattctatctgatcatggtgtatgatcttttcaatgtgctattgaattcaagttgctagtatttttttgagaatttttgcatctcaacatgcaaagatgatgagaaatattcatcagaaatattggcctgcaattttctttttttatatgtctttaattggttttggtatcagggcaatactggcctcataaaatgagtttccaagtgttcccgtctcttgaatttttggcaaaaatttgagaagaatcaactttacttctaaaatgttagatataattcaccaatgaaactatctggtcctgaacttttctatgttgagtagtaattactgtttattgggcatttagattttctgtgtctccttgattcaattttaatagattggatgtttctaggaatttatctgcttcctctaatttaactaatttgttggcatataaatgttcatagtagtctcttatgatcctttgtatttttctggtgtcagctctaatgcgtcctcaattatttatatttagactcttctcttttttttttcttatcctacctaaatatttatcaatttggtttatatatttttaaaaagtgctctgagtttcattaatttttgtgttctctatttcatttatctcagctatgctctttgttgttcccttccttctaattttgggctggctcattttttctagttccttgaagggcaaagttaggttgtttcagatctttctttttcattaatgtaagcttttataggtataaacttccttcttaaaactgcttatacagtataccatacatttggtctactgtgttttcatttttgtttgcttcaagtttttttttttaatttttattttcatttcttcgttgacccattggttgttcgtgagcatgttgtttaatttcaacagatttgtgaatctttcagcttttttaaattgcttctaatttcataccattgtgaccagcagagaagaggtattgttcttttatgtttgcaatacatcagtgaataaaacaataatggcttctttaggcaaacattttaaatctacaaaacccataatggatatggaggaccacctgaaaatattctgtaaagaatctataattcttttacacagctctcatctaagtgctgtccctgtaaaacttcaaaaatgttcttgtaaactgcaagtgaccttggagtcagaaattgctttgtctgtgtaaatagacaattattttactcaacactacagggtctataagtcaactaggacaatctagtagcagtagggtatcaatctaaagagagcatcttgcccttgcaggcatttcttcatttgaatgcacagctgcaactactattatgaaagcaaaatcctaattacactcgatcaacaacaaggatatttccatttattgcttgtccaaggtcatttatcttttctgctatctaacctgtgtaagtattcaaaaaatgaaaatgttttgaagtctttggatatacacacattccaaataaaagctctatatgcctgatccaatggactacataattggattgtgaacagacagagacaaagagagaccagaggttatcagcagtataaagattata

SEQ ID NO: 40846 - DNA, 1508 bp, Bovine  19866880768449
  misc_feature (1)..(1): n is a, c, g, or t
nctatatggcaactgcattgccttatgtggtttctacccatctaaaacagtaaaagtccccaaacatttgcacaatttccagtgatctgtgaatttctgtccccccaagcaaccacattcctttacacagatgctacaggaagctgtggagtgggttgataaatactaccatgtgccactgggggaagagacatgtccacaggggaagggcgcccaagtagttagtatataacctggccttagaatccatgggctgaacccagcaggtcccagctctatgtaagacacactgaaaatggccatggcagcaaaccaatagtcttgattctgattcccagaaaaatagacagctgactcattttagtactaattcctgaacttcaactctgatggtggtgttgagtggttgggaggcacaagatgcatatattattgccaagtgttcaggaaacttaaatccaccaggatggcaggtatcctgattttagataaggctttaaacaccttagaaaacaacctagacttctttgggcctcaattttctcattagcaaagtataataaaaatgggtttcttgcagggtcatactgaaaattaaaattatatatgttaaatacctaataatgtggcaggcacaatgttggtaactgattaaagataatattttactttaaatggagcaataacccaggagaaggaaccatactttgtagctttataaaatgtgcaaaggaaattgttgagttttcaatgttcctaaattctttgaatgcctgaaaaaagaacagtttattgtttttttatactcagaagtgaccttcagaacaaaaccactcctgacaagctacttggaaactacctagagagtctgtgagattacattgtgttttaatacaaattatattgtcagaacattcctaaagctagaatatccacccctacatattcctagatgctgctaatatgtgaaactactgaactatgacagtgtaatttaaaaaccagtagcaaattctcaagaaaacttgcattttaataaatatataaataagaacaataatatttccactatggtgtggtgcaggaaacaaaaaattcaaaatttgaatccatatggctattgtcttaaatcatcaaaaattaattaaaacaagtaaaaccaaagcaggctacaactacatataagtccagatttaatgagttgtggaaaatccaatcaactaaacaaatcacacattactactaattaaagggctgtaaaaggattccaggtggcttaggcaaataattattattttgtattttaaaaggaaagattttggtaattatcttgtaaatgtaattgatcttagctacttctatttaaagattctggtatttattccctattgtaaatgattatccagattacttaaaatatgtaatttctcaattccttatatgaagttatacttatctatcatttctcaaatatttaatatcaaactttttattttgctatacgaata

SEQ ID NO: 40847 - DNA, 1689 bp, Bovine  19866880848357
  misc_feature (1)..(1): n is a, c, g, or t
ntaggagtgattatgataatctgtatggcacacataggaatcataaggtaatatgcctgcttcatatccctggtgtttgtggagtgttaggtaggtaaagggggccagaatataaactccttgttacctcaggatttttcattagctgaaagtcctagcctatgccagtcttcttattatggttacttttgttcctagtttatcttcttaggaattaacacctatttcctaaggagtaaaagtctcagaatagaaaacagtaagtactcgactggcaccattctctttcctgatggataaatataaaaatgaatgaaatcactggatatgcttccaaggtttactcacgcacaaagcacttaggactgagagagcatctgctgcatccgcttcttcagcatgttagcaggtgtaagtcttgaaggcaattcataactaatcagaaaatgtatgaaaagcagagggtcaacaaagtcacacgttctctttggctcattcagctcaatagtaatattcaaacttccaagtagtatggcctcctagacgcttagccctacccctgcctgcatggaaaagggcttgttctccctcatcactcggtttcttgcctcctggatatttgtcttgctctgaatcctgataattcaccaggctgttgtactgtggtagctcagatggtaaaaaaatctgcctgcaatgcaggagactctggtttggttcctgggtcaggaagatcccctggagaaaggcctgacaacccgctccagtattctggcctggagaatccccatagacagaggatcctggtgggctacagtctatgcggtttcaaagagtcagacatgactaagaacggcacacagcacagctgtactctgttgtgatcctttgactgctacacgtttgctttgtagcagttcctcccagtctttcatctaatttaacaaagaaatcacattgtcatgttaataggacagaacagagtaataaccaaccaaagcttgaggctaaaaagaagagaggttacactcaaaagccctacagttttcagatcattccagaaagtgtaccacatccacgctccctttttgtctgcattagagaatatgcctccacccactctcttctcaaagtagtggtagtccttgtagcaaaaaaagaaggcgcaggcttcactttgttcatttaaaggtagtctaccaaaacataccttctgggtatggtattatggtgaccagacagagttttttgttcagttaaagcctccatttttgataccagctttacatagtattatggataatgcaaaagttaacagtttctctgcagtgtgttttagtgcagaaatataggttttcctttttctgtttgttttttgaaacagagagagggaaaataaagcttcttgtagagaaaggcaattttagtgttggccatgctgagaaaaatcagatcaatagtctctgatcatggagaggataaaagcaccatacttcccagagattgtcatcagagccaactgaaatgcttcaggttattggcttgggaaaagtaggcagtgagaaataaaaaacactccattacctcttaatagaatttgctttcgcagattgtagtgaggtgaaagtcactcagtcatatcagactctttgcgaccacatgggatacagtccatgggaattctccagg

SEQ ID NO: 40848 - DNA, 1367 bp, Bovine  19866880850214
  misc_feature (1)..(1): n is a, c, g, or t
ncagatttgtccttcccaaataattactgcttttataaactgacccttttatttcctttgtgcccacatgtgtgactcgaatagcttaagaggattatcaatctttttggtactgggcattcatgggggtaaataaataacttcttttgaatattgaaacaccaaggtagtgtttgatttatgaaagatgtagtttttcattaccagctcctttgtattttgtgacatagaggaaaattttgaagcagaagtagaaaattcaccctcgtataagaatgaccaaggaagtgaagagtcaagtaataccaaacaaccataagtgtcctgatgagatatccacgcacttgttgtttagtcactaagttgtgtccaactctttgtgaccccgtggactgtagcccaccaggctcctctgaccatgagattttccagacaagaatactggagtgggttgtcatttccttttccagggcatcttcctgacccgggaatcgaacctgcttctcttacactggctgatggatcctttatctttgagccacttgggaagcccattcgtgcacttagcctctcaaatttgtgatgtgttttcagatagtatatacagtctccatattacttatattaactcttacaatcaaatgtgaggtaggaatctcaagttgcaatttacttgtaggaaactgaggctcagaggctaagtaacatgctaaattcaacccagtaaaggacaatagttgtaacttttgtaactctagtaactcagtaagttacttaagtaagctacttaagtgtagtaataggactggggtttgaacccaggtatgtatgactccaaaactaatgcttttagtcactaccctgtatcatctcatcaggaatgtttttaataataatattttgctactgctttatgttattgtgtgtattattttgtatcatttgttatgcacatggcccaaaaggtcaccgtgagatgaattgtagagctttatgaacatgatatgcatggtaacaccagtgctggctttaaaaaatccaaatttatacattccttgtcaacatttgctttgaaattaaattatagtagccaccatgggttgtttaccctgtttccttaaacttgaaatggtttgcctttagagattcctctttctagctagatagaaaatatgcacattttcaaagacactgaagctgtggctgtaacatatttcatagtaacacttcatttattttggttgactgaaatgtgaaagaatataaggaaaattaaatcaggatagagtctgcctttgttctgacaacaaaagttaaaacagtagtatttaggtgtttgctcactaattaaatttactaacttggaa

SEQ ID NO: 40849 - DNA, 2108 bp, Bovine  19866880930204
  misc_feature (1)..(1): n is a, c, g, or t
naatgatagtaataacccaataaaactttgaaatattgtgagaataaccaaaaatgtgatacagagacacaaagtgagtaaatgttggaaaaatggcatctacagatttattcaacttgtacaatccatggtatctgtgaaacatagtaaagtgaagtactgtaaagcaaggtgtgcctgtatactgagtgaaaaagtcagacaaagaaaactgcatagtgcataattctggttatattggactctagaaaaatgcgtactagtctatagttacagaagagaaatcaaatcagtagctttctgggggtgggaatgaatggatggaaagaaaggaaagattacacctttacatgcagatgtttatgggtactgaagagacatgtgacattcacggggatatacatgtgttaaaatgtatcacattgcatatcttagacatttattgcatgtcaatgctccctcagtaaaacttttaagaagcagtttgaagaaatctttcagcagtacagttagtttatctaaatgaacacttgaattattacatttttttctacacatttaagtcactgaaaatgtatcagaatatttatcctttctagtttactcctttaatccaaaaatgaaaacaaaacaagaacctaatgggggtaaccatcatatatatatctctttaactatcactctttatgtttcttctactttatgttatttgtgacacagactcagtaacaaccagagagttaaaaaatgatgaaacaggtggaggaaggattctcctggactagcttcctttgtattcaactccctctttaaaggtgcttgtgtttggaccttcacagatgacatgattggaagtaactgagatggttaatgctagagtaaatattgttgacttaatataataaaaaatattcacttaacaaccatttccctagtagtttccagttctacagggcagatattttgcttattaactcagattttttaaattaaattgaatataaatgaaagaagactatgttatcactcaggttctgactttatcactaagattagacatataccactttagccttaattactctaattcatcacatccaaggcacttgtgaacatgacacacccttaagaataattaagaaacaaaatactgccaattaaactataacataccatcaattgtaaaatatatctaggcttcatatttgtaagcatttttttcaatatatgcttttgagtgtattatacctatgctttctgtggctaaatgtaatagtattatatgaaggtggaggaggaagatttcttcccctttatttctgtgtagggaaccctgatgcatgttcttctatcagacatgttgaggaagctacatttctctgtagggatgtataaaactagtgacctgatttcataatggatcttcctttgagaaaatggccataaataagacattctaaaagttgtaaccagattgattcgatccccaaaagaaaagtaggggctagaggtgaccaaaagtacttatcacttgcttttctactatgaaacagcagctgacatatgtccccattgagaatcactttttgcgtctactggttatcagttaaatttatcctccaaactaaaacatattattacaaagatttgacatgaaaactattctgtaccacatagctactaacaataacagtgacaggaacagaaggtaggtgttgctatattgcattaaaaaaagaaaataataataaagaaaaaaaatgatgacagaggtttagctgtcttaacattttctatcttgagatactctttctgctgatttaaatatttattcacatacacgtacatccatacccacatttaaatgtttcatttgtacaggcaactccgactgcttaattgcatcatatcctaccatgtgcatgtgactctatcactgaagatcaagcacacagccagggacgatgaatgcaaatagtatcaaatcaaaagagacacactttctattgtcatctgaaatggaaaatgcttacatataatggagaaacaaaaattacctaaggcaaaaaggcatgagctataattcagaagcagtttaattatacatt

SEQ ID NO: 40850 - DNA, 1696 bp, Bovine  19866880950409
  misc_feature (1)..(1): n is a, c, g, or t
nctaggaaattattttcttttgggaaagtgtccatttataaccaacatattatgttcagttttttttttttttttaatttgtatttgcttttaaaatgttctccttcagtggaagaactaccattctactttgtaggtagccaaattttggtaattttaattacaaatttaaaggtgttcaattgaggagatatttatcatagtgaatattacatacactgaaatatttatacttctgaaaattttatattcaagaaaggtaagtttcgtaataagacaagagtatattttgaagttcagcaagttctttagcatgtttacatattacccatggatatttgcaattttgtacataattagaagtgttttgcatctttctcacagaaatgacagccctgttctcacactttttttacctttaacaagaaaacagtactaaatgaattggtctgacagataaattatgaattacaaacacgaaagtttgtgaaaaaggaaagaaattattccacctacaaggcctcagtttcaaaacagacatgtttgaaatttatagttagccattgcactttactaataaatcacttcttagagattcgatggattttttttgcaagttctatcaaaaagcttttaattctcaagataaaataccaaaaaaaaattgttcttgacaattttgtctattagagtaataaaagtggttactgaagttaaactgggaacttcaaatgtctctactttgaatgctaaggaaccctcgggtggagcacagttgatttatactgccaaaacatttcaaaccgagtgacaataatagcactagttatactgtctcatttatatgacattttatagttcacggatcatttttgcatacatttgtacatgtatacataatcacttcatacacagttattatacagattgcatataatagtatatgtgaaagcaatttgttaactggcagcaccatcaaacacagagaagaaagcagtaactgttacatcttgagcagccctaataaattacccttatacctgctctatccttagtatcttaaactgtataaccttagatggctttacggactaattcatcttgagttgaaattgtttcttccttgcaaaccaaagcatcttgccaaaagcagtattcaaatcctgggcaattgttggattaaactagccttctattagagtaatgtcctttggaaaacaattgaaatcaagtgtgagaatcttcatcagttatggattcctgggaacagtttttggataggtcctgaataaatacaccgtacaggtcttcggatttgtttagatgaatatatcaaatattgagaaatatttttatcttgattaatgaacaatgattaggtgtatgtctacgacctgttctaacaccagagttaattaaatgatttttttttactcttctgtatgcttaaataaattcatacatttgagtgtttaacagaatcttcctatccattgtactcttaaaaaaatactaatatacattggagtaggtgaataaaagcttgaatgccgctgctctagaagtggtttgatcttattttccctcattagattgtggagataagtaacttctctgtcgaatgctataaaaataaattaaactcctgttcttatccataaatactgtgattacgtttcagaaaggggcagtcaaa

SEQ ID NO: 40851 - DNA, 2398 bp, Bovine  19866880967084
  misc_feature (1)..(1): n is a, c, g, or t
natgctgggagggattgggggcaggaggagaaggggacgacagaggatgagatggctggatggcatcactgacttgatggacgtgagtctcagtgaactccgggagttggtgatggacagggaggcctggcgtgctgcaattcatggggtcacaaagagtcggacacgactgagcgactgatctaatctgatatatgtgtgtgtatcactgaatcactttgctgtacagcagaaattgacacaagtttgtaaatcaaccacacttcaattaaaaatgcccactttatggaaaagaaacatattttataaaaacaaaagcaccccttaataaacttttaaaagccaatagtaaagttgtaagctgttagtttgcttctaaagaaatctctacttaaatctgaacttttaaaaaatcatatggtttttctataagctactgcaaaagaatacaacaggagagtactatttataccaccttggaaatctctctgcaaatagaattatacaacactgagtacagagagaattcatgaagtgactgtcacatgatatgtttagtattgtttagttcagcaaaggtatgatttcccccaggagggtgggaaatgggaaatgtttaaagaggatccactgggaaacaaaggtgtgtaaggcttgggaaatacagcaaagtgtaaaaatggggaggtgaattaatcactttggaaagaaaaggctgttttagacatatggaagattattatcaagagatcaccacaagctgttctccagtttcaccaaagtggggagagggagaaattccaacaatatgggacaaagccagcgaaattagaataagtataatgtagaagtgtttaaaaaagttattaaaaggcaaacgggctatcagagaggcagtagaagcttagaagctttttccccacactgctgcaataacaaaataagatctgtctgtcttctaacaatttaggtgcaatgttttctgaaaggagagaaatggtactgatcagggttggaaacgaacattttaaaccttctcttttgcctgccactcatctgcccactcagactgaattattaagagtagaaggttagagtcaggcagacttaattggctgccttttggcaactacattattatacaacgttttaaagtggttggtggcatgtgggggaaatagaaatgaagggtgttgccttttcttactcagcattaagcttcatgactttagtttggaaagaagcactgcctttgatatttcccaggttggcttttaaacactggacacagtacttttgaaaggaaatgagagaaaaaaggttaaaggacaatgcaagtaaggactctcttaggaccctaatgaatatttcatttcaacgttatctctaaatatggtgtgcctagagattatcatactaagttagacagagaaagaaaaataccatatgatgacacttacatgtggaatctaaaaaagtgatacaaataaatttatttaccaaacagaaacagactcacagacttagaaaacaaatttatggttaccagaggggaaaggctggaggaggagagggataaattaagagtttcagattaacatatacacactgcatgcatgcgagctaaattgcttcagtcatgtctgaccccttgtgacgctatggactgtagcttgccaggttcctctgtccatgggattctccaagcgagaatactggagtgggtttccatgccctcctctaggggatcttcctgaccaagggatcaaacccaaatctcttatgtctacctgcattgacaggtgggttctttaccgctagtgaagcccctaccgctgtgaagccccaacatatatgcactactatatgtaaaataaatagcaaatatccaccatatagcagagggagctctactcaataatctgtactaacctatatgggaaaagaatctgaaaaagaatagatatatgtatatgtattagggcttcccaggtggtgctgttgcaggaagggggaccccttctagggcctgaaactgggctcttgtctaacactcagaaatgaattgtccgaggagacacatctgctgacaaagcaagagattttattggtaaaaggcacccgggtggagagcagcagggtaagagaacccaggagaacagctctgctgcgtggctcgcagtcttgggttttatggtgatgggattagtttccaggtagtctttggccaatcattctaattcagagtctttcctggtgacgcacgcattgctcagccaacatggatgctagcaagagggattctgggaagtggacaggcacacagtgtctcctttccacctttcctgaactcttccggttggtggggcttatttgttccttattccttacaggatct

SEQ ID NO: 40852 - DNA, 1308 bp, Bovine  19866881023023
  misc_feature (1)..(1): n is a, c, g, or t
ntagcaagagcacactttactgatgcaagatataattaaaaataatgtaaagatctgctttattcatctttatgataggatctaaggaattcatcttatatttgtttccagctttggagtcagctctttcatttccatattctaactgtctatatagaaagatagaacataagctgagccaaattttctctgtaaaccttagacatctaagaaataatgctaaaattttagcatttaagtaagttacattaaggcgatcagtttatggaggatcaggacttgaatgtaaacacccctgaagataaatataacattttatgggaagttttatgaagttctatccaatttgatatttttcaatagtataggataccaatttttcctgatatatacttaaactagtttctgaatatttaaagaacaaaatattttccagttcttcatgagaacttacacttagataaatattttcccactggatattataaagtgaattagagaaagaaaagcacagaacaatctatttatgaaccatataatgtgcaacaaagtactcttaatctaatttgtgatccataccagagactataattttctacggtaggttaaaaatgacttatatttgttcatgaataacatgttgaagggctctgtaattaattaaatgtccaatgacaaatgtgattgctctgattccatcttcagaatcagagattgatagaaggcacagggtcaggggaaccatttatcacagtaatagtgaaacggaggattgatgttgtatcagtctggaatgctttatttgaagatgctttgcctctgggagcatcaacaatgccatcttattatatttcagcatttgtgcaaatgttcctgaaagtgcaggagccagttaagtatcgaattaaagaggggatttcaagagttatattccttgagtagaatataactcttcccaaagtgtcagtgtgaaaaatgtaaagccaaagtaagtttgtaaccttaaatttctccataataaaacatggttataaagatataccaagggagagataaagaaaaatatgttagatttaaatgtaagacctgtcaatagaaacactagttataaatgacacccagggtcagatatttggagggtggaaatggaaaagtttagaccagtcttttttccacttaagtaattttgttagaccaaatggttattgtttaaaaactgatgccactcttggttaaattattcagttaactgttcactttagaaagcaacaaaattacaaggacagagaggctgaatgaaacagacca

SEQ ID NO: 40853 - DNA, 1188 bp, Bovine  19866881085141
  misc_feature (1)..(1): n is a, c, g, or t
ntacttttaattatggttaatttaccctggttactataaattgctgcacaagttgcctggttatgatctccacataggcacaacttgaacaaatcactagttgcttaaaggcttttgttttccaaatgccgcccccccaaactacaactttcagcttaatttgtccttaagacaaacaatgtctaaaatacttgggaagtcaagcatctacgtacatgctactgactgatccttctccctccccaagtgactcttcagtgactataaaataatgaagagagaagattcctaggatgttcagaaaacaaagtattttatgatggacatttttaccttcctctgagagttacagtcatttcttttcagttttgcataaatcatgatctaattcaactatggttgattcataatgggaattagtggggttgtttacaaattagggcatagacacagcagtcttgaaaacaatgaaaaacaatctgcaggtcatttccataaaagataatctacacatgatatcattagcatgtttgcatttctttgttcaaatgacagaattatttatgagatagttgatagatagctacaaaaatataaggggatcactgtgttcttagatgtatctcgaggtttcagggtaccaatttatttttgtttttctctcttttcatttggagttaggagctccacttcttttcctaaagccaaattgcctagacactgttatatttaattccatttattttagtgaaaacaaaactttgttcaatatatactgaatgtaaaacattatgccaggtcataacaagtaagagagaatcccatccctcaaggtggtacctatctaaagggcaataaaattaactcatagataattataatacagctatttagggaaataataacatagaaatattaacacagggttcttaatagattttacataggtattattaacaggattattaagataacaaaataactaccttttattgagaattggctcttttatatatgcagtacttaatatcaatcctcagaataaggcccctttgtaagggacatataatcaacttcaaccttttaaatgggataataggtcacacacatagcaagctacagagtcagaaagcccaattcttgttcgatttaagcccttctttgtgtattccactctataaaaaataa

SEQ ID NO: 40854 - DNA, 613 bp, Bovine  19866881151908
  misc_feature (1)..(1): n is a, c, g, or t
nactctctgtcaaagttatgcctatcctgacagtgcatcatggaaccatcttcaccctgtgttcaaattgttgtcttttctacccatttgtttcctatgccttgtgtagctgaaactgattttgattgccttgacttccccagtgtatgaaggcagtttctagaatataggtagaacaatgtttgaggggaaaaaaacagctatgttaataggtcttttcatgcctttttaattgcacatcctcacaatagcaatttttgagatgcatgtctatcaaacagagtgaacacacactgaccttgtagcccatgacttcagactcgttggctaatggtctgacagggtcccagcccagggaaagctgagagccctgttgctcccacctgaggttgttaggtgcttgactgggggctgcaaaatgaaaagaaaagtgagtgcaagagatatcttaaatacctttattcacttaaattcttgtgagtatttcaatctttttttgtgtttagtagttggctggcaccataggcttccttccagtgagaatcagataaggagggttttgctccaggagtatcattttaatagctactctgctgagcttttgaacccaaat

SEQ ID NO: 40855 - DNA, 2455 bp, Bovine  19866881193667
  misc_feature (1)..(1): n is a, c, g, or t
ncaaatggatcgtggcctaaagtacaggagtgttcataaactatctttgtaatatattgccttctgtcagtgagaaaggacttatcttaaatcaagagttgaaatactgccagtatctaagatacatttatttctttaaaggtggtaattttttaagccaaacttctcccctgctagattagaatttacatcagtaagtaaaatccagacatatttaagatattaacaatcttgcaaactgtagtaatttagctgtatttaaataaagtgtgtcattagtacaagagaagactggtttgtttataaaaaatataatttttgctttcaaatacatctttttgtaacgtgtatatttctgttactaaaatggaataaatacattatattctatctttatagaaacagtcctaaataataaagagaatttttcattgaccatcctaaatagatggtatatctttagagaccagtgttcttaccaaatgtctcattaatatcccttctagacataaattacagtcaaatcttctattcctagtttggcttgcttctaaatttgtctcccttgtcaacacactgtaaatcaaatttgatccatattgaaagcagtataatgtttttaaactggtttctttatggatgacaatgtcagaaaaattaataatcaatattcagcagcctagaatttaatccaattgttaaaatttcaatactgtccttagccctcagttctggattgattggcaaaattgaatactaatttaaaaacaacatatagggatgttgactaaacagaattagccattattcttataccttaaatagtttaatgttttcatgatgccatggaataaactattcttttcagaaccaggaaaatccaattttagaattttaagtttggtgagagctttggttttctaccaaaagtagcacagacttctttcctaaaagaaggcagtctaaattctagtggcatatcaaataaatcacgatagccatccctgctatgcctaaggttgcttcagtaggctgatgcactggtgaaataacagattatatttcaggagcatacaagggagaaaaggacagaaattctaattaagtttgaaatctgtgtatttctggaatgatgaatacacaggagaatatggtaatccagaatgtcaatctcattttcactaaacttctaaaatttttaataatactctaatttctcaccttcatataagactcaaggtccacttataataaaggtctcaaaagagcccaaaggcaaactcagatatcacatttttctgtttgaaaagtgcagtgtgagcagtccaggttccaggattcaggtttcattgtcacgcccttgctacacaggttgcagtgcaaagaaaccaccataaatcatctcgaggctgtacacaattaattttacgttctgtgcttgtcctcctctatgttttatgctatttcttctgatatttgatttttgaggtcattcttggtttgaggtgaaatacctcaagcttaatattaaaatatcactgggtgttattatagtataagttttaataacaaaattcagggtcacctttttttccacaagttttaaaatgaatgtcataaatgtgtccaaagaaaacctgtaactccctaacccttttaactataagaaggtattatgtgggtttactatataattttttgaagggcaaaatatttctactctccctgcatgttttcacaatgatctttatcttatttattattaccttggaagtggtttcagacttcatcagagtttcttaccacttagatgatttgaagtaaagcaggaaaaaaaaaaaaaaaaccctttttaatgattttcagaatagctattcttccagacgggagtctccggatcctaaatgcttctaaatcagatgagggaaagtacatttgccgaggggaaaatgtctttggctctgctgaaatcacagctacagtatctgtaaaaggtaagaaaatgtgatgaattttctataagcatagtttcatggccttatctgaaagagaataaatgtaacatgcatgtatgtgtgtttgcttgtatatgtgcacatgcttctgttgatgaaatctaattgcaaattaaggacaaacacagtcaaattgtccctttccgttatttaggggactgtgaagaaaggaacatattattggtagaaatttaagtattttgctttgaacaaaatatgtgggagggtaaagagagctttctgaagttttagttggtatctcaaaaatttcaagtatgccagcagaaataaaaatattttcctcaaccaagattaattttagcatcaatcagtaatgctgctgtgttaccacttcaactgggaatttggggcaaaaaagagaagcagaaagaggatatgaacatgtgctgtggagtatgcatcagataagcaacaccaga

SEQ ID NO: 40856 - DNA, 2472 bp, Bovine  19866880225063
  misc_feature (1)..(1): n is a, c, g, or t
natgctttggcattgcctttctttgggattggaatgaaaactgaccttttcagtcctgtggtcactgctgagttttccaaatttactggcatattgagtgcagcactttcacagcatcatctttcaggatttgaaatagctcaactggaatttcatcacctccactaactttgtttgtagtgatgctttctaaggcccacttgacttcacattccaggatgtctggctctaggtgagtgatcacaccatcatggtaatctggtgtggcataagccctcttagaggaggtcaccattaaccccatcatagagctcccagaacttacacaggactggggaaacagactcttggcgggcacaaacaaaagcttgtgtgcatcaggactcaggagaaaggagcagtgaccccacaagagactcacccattcttgcctgtgagtgtccaggagtctccagtggaaacatggttggtggtggcttgctgcagggtcggggctctgagtgtggcagtgtatgcataggacctttgaaggaggtcgctgttatcttcattacctccaccatagttcagtctcagggtccctgctcatggaattctccaggcaagaatactgaaatgggtagccattcccttatccagggagtttcccggccagggatcaaaggtgaatctcctgcattgcaggcagattctttaccatctgagccaccagagaagcccaatataggttattacaaagaatactgagtatagttccctgtgctatacagttggtccttattaggactttatttaatatttgattttctcatgatttttttgaggggggtggtgaattgaaacaatgaactccaacagggacaaaaaaagcttcttgggattttggagtcatcactagcttttttttttaaccaaattaaaatttttattgtgtgttatcacatgcaactgtcaagaaataatacagagagcgcctctgtatatctgtatattttgcccagttttccctagtggaaacatctttgcaaaactctagtactacatcaaaatcaggacattacagactccactgatgtacagatttccagttttaattatactcatctgtgtgtgtgcatcattagttattcagcatagcttacattgttgttatttagtcgttaagtcgtgtctgactccttccatccccatggacatagcccgccaggttcctctctccaggggactttccaagcaagcacactaaagttggttgccatttcctgctccagggaatcttctcgacccagggatcaaacccatgtctcctacactgcaggcggattatttaccactgagccactagggaagcccagcttatattactgatctgctaccagtcattccaacttaaaattgctcatgcatgactgtagatttttcagctctttacaatgtggcagacaaggtgccaaacacctcacgggcatcatgtaaacaaatccccataaccttcttgcctccttcttatggtaatggaagctctgcctcctccactggtcaactcaagtgccttcttctcctctggccaagaggcagcgaagggacttaatgggcctggaagatacagtttctggaatatgaccctgatacaagagccagacttaccacattctgacaagcctgcccacaggtcctccccaaaagacccaagggctctggtctttgtcctgtctgagatcgggttctctgtacttttctctggttctgccagcccctccatgtgcttcctatggaccccctttctgctgaagtcacagagtctgtgtctcttgcctgcaatcaaagaaacccatcaagggcgcgggtgctgtgattaagatgctgtcttgagacgaggaagcaggtctgtggaagtcagggagctgccccaggtcatgcggctgagaaggggcaaggatgcggaacagctggcctgtttccagagctgatgcccgatgcttgtaggaccagagacacaacacagagggcatctgcgactctggtttccttccccggaacatctctgaatggtaagttcagccacggtctgacatgtgcattaagtctccaagcagacattctgtgacggctactttctcatggccagacatgcctgcgtgggactgtgattcatagtcctgctgccattacagaaagactgcagcagactgcacttagcactcgctgattaaaaggatcctttccaatccgcccttccctgaacctctcccccccagggtcccacacaggaaatgttgcttcaccattcttgacattaacggcgaatgtttttaaaaaatgaaagaggagagagggaagcggggaaatgcatacattacacccttgagtcatcgcgatgcatttctcgggcattagctcgtgctttcacaactggtcttcatcaaagggttttcatctgctcgccagcgtgtcatctgtcctaacgactcc

SEQ ID NO: 40857 - DNA, 855 bp, Bovine  19866880348772
  misc_feature (1)..(1): n is a, c, g, or t
naattcgcatcaacagtacgtgagggctttgggttttcctttgtggtcgtgttctttaggggattacaggtggattctgcttgtccctcaaggtgatggctcaaaaagaatgccttatgctgtgcgggttgtgtgctgtgaactccagtggatgcctttcacatcgtcctctacggcaaaggggtgtcctgtagctgttcaatgcacaacctgcccagccgtacgtggtggccccattagtctcaaaccccacagaccctctcatcaaatcaccgcatccatctgtgagtgggctcagcaccatccgctgcaggaacagtgagcggacccatgcaggggagcatctgagtgcaatagacaaaacacaaaacgttatgcagttctgttaaatttctgttgatattggtagacatctaccgcctcataaactttgttttcaattatgtatgctcacaagctgttccatttttgatatatttaggaaaagttcagtcacatattcagaattgtaatgatttcccataaaacatctgattccaaaattttgtatctgtacagcacaaataacataatggcaagccaatcaggctacatattaccttcctttatgctgtagttaaagttattacagctttccaaacagtttttttttccccgatattataaagatcctgggggtacaggctatttaaaaaaatagacatgatttgaaggccctgtatttacatacctttctgatacacactgtatttcttcacagtctaatttcttcaataatatttgtatggaagtggaacctttaaacttgctctcttgcccaggggcccagtacaactataggggcagaacagaatt

SEQ ID NO: 40858 - DNA, 1822 bp, Bovine  19866880402875
  misc_feature (1)..(1): n is a, c, g, or t
ncccagggattgaacctgggtttcctacagttatgggcagattctttaccgtctgagccaccagagaagtccaataagtcagtataattaaaaaaaaaaatgagaaagaactcttctaagtttaaaaaaatttaacaaatataagaaatgcgcttcttgactggatactgatactgctcttagcaaaccaactctgaaagttgttaaggacaagagacaattttaactgtgaaccaatagtacataatatttttaaattatttattttgccaagtgtaataatggttattattattaatataactattaatgacagttattgttacattattatataataatatattatagataatatatcaaaagaaatccttaggacttccctagtggttcagtggttaagaatttgcctgtcaacgcacgggacgtgggttcaatacctggtccggaagatcacggttgcctcagggcagctaaggccacacgccacaactacagaggctgagctctagagcctgtgacctgaagctgctgagccctggagcccgagctccgcaataagagaagccaccacaacgcaacaaagagtagcccctgctcaccacaactagagaaagcccacgggcagcagtgaagacacagcccagccaaaaataaatacattttttgggaaaactccttatgttttagagatgcatgctgcagtgtttggaagtatgtcatttactttaaaatactgcagcaaaaaaaaaaaaaaagatgaagcaaaattattcagtctaggtgataggtttatgcgtgtttcatctttatgtttgaaatttcttaataagtaaagttaaagcaggggaagggaacggcttgagatgtgataagcagcttatgaaacagtttcctggaccagcctcgctgcagtcacctgggttctgctgtacatttcaggtgccctgctcagcattctccatgaagatcattaaggcagacccttgatgttaaacttcaaccagccccgtagagcaaataggttgttcggtagaggatgctgcctgcagagcccgtgtgcctggtgggcagatgtgcctgtgaatataaatgcagaacaagcagtcctccccacgctgagcacacacagaaatgagctctgggactgcgggccgggatgcctgcagaaaggggttgtcgttgtgcagtcactcggtcgcgtccgagtctttgtgaccccatggactgcagcatgccaggcttctctgtccttcgctgtctcctgaagtttgctcaaattcatgtccattgagttgatgatgccattcagtcatctcatcctctgtcacccccttctcctctggccttcaatttttcccagcatcagggtcttttgagtcaattctttgcatcaagtggccaaagtattggagcttcaccttcatcgtcagtccttccaatgaatattcaggactaatttcctttaggatggactggttggatctccttgcagtcccagggactctcaagggtcttctccagcaccacagtttgaaagcatcaatttttcggtgctcagccttctttatggtccaactctcacagcagtacatgactacaggaaaacccatagctttgacaaagtgatgtctctgcagatatctcttcaggagggggagcatcctgaaacagagggagccttgggtgcaggtggcaaggcctgagacagtcgagttcttgcccttggaggctggactctctcagggtccagtcggcacagggtagtgttcacagagtcaggcagacacatgaccaacatcttggcagctgtctgactctg

SEQ ID NO: 40859 - DNA, 1449 bp, Bovine  19866880406865
  misc_feature (1)..(1): n is a, c, g, or t
ncatgggattttccaggcaagagtactggagtggggtgccattgccttctctggtgatattaactaactaggtttaaatcatgaagatgaaggactgggtagacagagcattctgagtaatatttaaataggacaggtccacccgctgtgcttggccttgctgctgcctctctactccacatccttcatcccgggcccatccccccaaaggtgcaggtaactgtcagggccccacacagaggggtccacctctctgaccagcttccccagaggggctgagtctcagcggcccacctcctgtctccggcacctggagatcgttccctcctgtgggtacctggcacagaccacagtttggcagagggatcctgtgacatacttgtggctggagtttcggggaaagtcaggggaacaagtgttgtggcatctggggtcgaccaccaaggctggttgggaagcctgacagagctcactgcgtggagatggtgctccgaagaatgtcagcttcccagatctttgtgctgttgctgcaaaagcagcagaccgtgcgtcaacagagaaattccggagttatgcagtcaactctgtgatcttgcgaggggagaatcagaccggagacaaagctgtattcgatcaactgctccctggcggaagaatcaattgcaaggggggatacaaaagcaactggagtagcaccagcctgggagagtttgagaaagaaaatagggattaaaaatcaagtgaaatatggtgtgaccccagaatacattcagagctaggaatgtggaggaaaagtcgagagtcctgagggacgcccccattagagcccagcagattacagtcctgcagagaaggaacatcctgctttgcttcaaaaagggctgatcaaaagatgggcaggcagggagagctccgtcctggaagagagaagagagggaggaagcaaacaagtcatccttcttcacttgagtctcaaagggggacagataaggagagagaaaggcctggagatcccagtagacagggggattaaagaggaaacagctctttaatggagggaatgaagtccaatgtggaaaataggtcataacgacgagctcagccatggagcttatccttcctttgaaaggactccaagtcaaacgggaagttcaggccgtaagttagttttgtaccgtatcgtatgtctccccaagatgccctgccctccttagcacggtttcagcgcagtgttcctggttctcctggtctctctcttgtttgcacttgctgctgcgtgcctcatcccctgctcccgaggccctagcccaggagtatccccatgaccaacggatgctccacagcactgttgggcacaagtagcaaactgttccaatggtggggagaggatgctgccctcgcccccaagagaagctcagcggctgtgttttgtgatggaacagatgtcca

SEQ ID NO: 40860 - DNA, 3199 bp, Bovine  19866880458546
  misc_feature (1)..(1): n is a, c, g, or t
ngaagttttctgaggatggtgggctcatatctccttgacggtgtgggagacagaatattccccgccatgccccccaacccctgccaaatatccactccctaatccccaagacttatgaatatgatgtgtggcatgacagaagggacttggcaggtgtggttacggttacgaaccttgaaatgggttgattagtcctaagttactcacctggagctgaagccccaatactttggccgcctgatgtgaagagccgactcgctggaaaagaccctgatgctgggaaagatggagggcaggaggagaaggggacgacagaggatgagatggttggatggcatcagcaactcaatgggcatgggtttgagcaagctccaggaattggtgatagacagggaagcctagtgtgctgttgtctgtggggtcacaaagagtcggacacgactgagtgactgaacggcagcagacactgggtcccctgagcagaggactttctctgactgctcgcagtagagaggtgcggtagaagtggactcaggctccgaggctggggagggctccacgcccccttgctggcccggagatgtaggagcccacttgctaggaccccagggagctcagggtggcccagctgacagccagcaaggaaacggggacctcggtcctgcagccacagctggattctgccagcgcccccagtaagcccggaaacagattcattccagagcctcccgtgagagcccagctggccagcaccttggctctgagacccaggaacactgggcgtctgacttggagcacagtgagataataaacgtgggtggttttcaattgccaagggcgtggtgatgggttatggcagcagtcgggcgggaatggaggtggtgtggtgagcagcctgggcgagactgggttctctttccagccttggctttgccaggaggcaggttgacctccacatgtccttcgctcttcactccaggccaaactcaaacagggaatgtgggtattggcaccgagacatctttgactcctgggtcttagtcatcatgtggcccttgagcaaatgactcctgcttccttagcctcagtttcctcatctggaaaggggactcaagcctgccttccgcagagaccagtggggattcattgagatagtgtcctcagagcacaaagtgctgaggtcagcatttgagataagccaggcagtccgtgcagcaacgcttttagtaatttttttaatttaatgaattgcagtttagaaatgtggtgacaagcgatttcctctttggattcgacagtcaccatggctgaaggaaggctcttcttgcaaagttaattttctaccagggagtgtgacatttgcttgataatagagattatgacgtgtgtattcagattagctctgagcaatggtaattgctaggaatatggtagtattccaataagtttgggagtgtggagctgcagagagatccttcatgttgcctggaatagcaagcaagctgctactttgggggatgaaaaattacatttgatcgtaagtaaatagaaatgcagacattttcattcaccggagttgcagaaaaacaaaacttaagagcgtattatatttctgcaaatctgattttacttgggaaacattatacacatttttaaatgtattgttgtgccagggtcggcccagaatagcggagtgttatcaggattgcctgagggtgtgtgaattgttctttcgcttgtgttcttgtgacctctgaggatgcaggtagagaaatagtcagtggtgagtcctgagctgggtgcagcccagaagccaagtgcctgtgcccgagggcccctgtgacctctctctgtctctgtctctctctcttctctcttttctccccccttccttctttcctttctcccctccttcctctctcttcgttagactttggatttccatataattacacacagcagttgtaagaagtcatacagagaccccacgtacacatcgccggttttcccccgaggttctatcttgtaaaactccaacagtgtccgaacctggatgtagacgttgaagatacagagcgtctccatcccccccaggacccctcccgtggtccttttgttgccgcacccccctcccatttccctgccccataatccttggcaaccactaatctgacctctatttctgcaattttgtaatttcacgaatgttccgtgaatggcatcttgagtatgtaagctttctggattgcctttttccctcagcataattctccagagtcatcaggttgctgtgtgtatcagcgatttgttccttttctttgctgagtagtgtcccgtgatgttggacgtgccacagatggtttaactgttcattcgttgaaggatgtctggttttggctattgtgagtaaagctgctgtgaacactcatgcacaggttttgtgtgtgtgtgtgtgaacggaaatctccatcttctgggataaatgcctaggagtgcagttgtgttttgtttgtttttaattaaaaaaatttttttggccacattgtgcagtatgtgggatcttagttcccagaccagatattgaacctatgccccctgcattgggaacacagagtctttaagtacctgactgccagggaagtcccaggagtgcaattattgaactgtgtggtggtttggctttttaagacactattaataccagacttttccccagtggcttggccgttttacattcccaccagctgtgtgtatacgtgcctgtttgtgcatgtgcatgggtgtgtgcttgtgtgtgatgtgaaggtgtgtgtacatgcgtgtctgcatgtgtgtgtgtgtgaaggtgtgatgtgcgtgcgtgtgtacttgaaggtatgtgtgtgcatgcatgtgtgcacgtgtgtgcatgtgtatgtgaacgtgtgcaggtgcgtgcgtatgtgcatgtgcatgcgtgtgtgtgtgagatccagtctctccgcatccttactgacacgtgtttctgttttccccagtctgagcggtgtgtcgttggggttggaatttgcgtttccctcactgcagtgcaccttgacggagatcttggtgtaatttgggagacgagccgggctgggtgctgggtggaggcggggggctgctgatggatttggtgagatagttgggtctgctcagggaagggccagaagtccagcttgca

SEQ ID NO: 40861 - DNA, 1646 bp, Bovine  19866880463354
  misc_feature (1)..(1): n is a, c, g, or t
naccacccaccctcccatccatccttccatccatatatccatccttctatccatatatccatctttccatccatccatcctttcagtccagaagtatttattgaaatttactatataccaggcactactatcagagaaggcaatggcaccccactccagtactcttgcctggaaaaccccatagacggaggagcctgttaggctgcaatccatggggtcgctaagagtcggacacgactgagcgacttcactttcacttttcactttcatgcattggagaaagaaatggcaacccactccagtgttcttgcctggagaatcccacggacgggggagcctggtgggctaccgtctacggggtcacacagagtcggacacgactaaagtgacttagtactttgcactaggcactactatattctaggtgctggggatttaacagtgaataaaacagacaaaattcatgacccactagagcttaaagtgggtccctctgaatactgttggtcacagagaggcccagaacttacccttgacgttatactgcagcctctgtgccacatgtttagggaaaggaagaagctctgtgtgtgtgtgtgtgtatatgtgtgtgtgtgtgtgtgttatttgtgtgtaagggggcaagtactggcaaaacttcagcagcagtgtcctggggaaaggaggaagctgtgtgtgtgtgtgtgtgtgtgtaaggggggaggtattggctgaatttcagcagcaatgttttcacacatgttctaccacaaataaaatgctggattaacgagcaatgacaggaaataattctctgctgttgtaacataagttgaaggagatttgcagaactaaatgcttaaaaatgggccagccctcctgctacgagaagtcacacggggacaaggctctggactgaggaggcttcagtccccacatgaagcctgaacgcagcaaagcaaccaaggaggcaggtggtggcgagggccctgggaggcagggtggcatggccggcctagtcccatctagtctggaccacggagctccctgggagggccctgggaggcagggtggcatggccggcctagtcccatctagtctggaccacggagctccctgggagcctgaggtgggaagcaagagcatcttcctctgaccagaacccccaagtagatgcccttctcctctttctgaggttcacagctgccacacaagcttactggagataagacacagcaaggtggagagtcaggggcttggcttctggggactcagccttacatcctggggcttccacttgggtatttttgaaaacataagcaattcatttaactttctgagctccatcacctcatctttaagatggctataactacacccacctcacacctttgacggatgaaagaggacaccccagtgccatctagggtccaagtcaactttgcctctgttcatttcctccaaattggatattcaaggaggagaggccacgtggaatggtcttcccagcttgacctctggtttgcatccagcttaagaggagcagacattctacatgcccttgggcagtgactattactatcccaagtctgcactgattgcagacaaatcctttcatttttcagtgagcaaaatctaatcctgtg

SEQ ID NO: 40862 - DNA, 2539 bp, Bovine  19866880479354
  misc_feature (1)..(1): n is a, c, g, or t
ntctggatgttgagaagttgatcttagcatttgtataacatgaattatgttatcctcatcaggctttaagctaacacacatcataaactgaattaagattttaaaatatgaattttaaggagaaagtctctggctctgggtcaaggggggtctgagcgttccaactgatatcaaagagcaaaaccgatctctaaggggaaagtcctgcctatttttcacttaacaagcccagaccttcttccttattaactgtgctcatcacacatccaaagagatcgcctctttgaacaataacagcagtaagttttgactctgcacagctgtgggccactctgacctctggattattatatgatagaggttcatggaaccttgcttgtctctgtgcatttttttttaatgtctaaatttaagacctatacttttgacttcaaatatgatttcctactgaaatataatcctgacacataattatagaaaaatgagagatcaaaacccaaatctttatgaaagaaaacccaagcagttgatcaatgccacaatcgtaaagctatcactcaatgcagagcactgagtggccagcacaagactgaccccaaggactgtacagtctgtggaatcctccaggccagaataccagagtgggtagcctttctcttctccaggggatcttcccaccccagggatcgaacccaggtctcccgcattgtaggcggtttctttaccagctgagccagcaggggaagcccaagaatactgaagtgcgtagcttatcccttctccagcggatcttcttgacccaggaattgaatcagggtctcctgtgttgcaggcagattctttatcaactgagccgtgagggaagcccaagggttaaagaggaaacacacaattccgtgaagtctgagcccgaggattgtacgatgggcccacttattccgtaattcccggtgtcactgatctacctggagctcaggttgactcggtaacgtgctgctaagtcgctccagtcgtatctgactctgtgcaaccccagggacagcagcccaccaggctcccccatccctgggattctccaggcaagaacactggagtgggttgccatttccttctccaaagcatgaaagtgaaagtgaagtcactcaggttgtctacttgaaagttacacagtcgtgtccaactcctagcaaccccatggattgcagtctaccaggctcctccatccatgggattttccaggcaagagtactggagtggggtgccattgccttctctggactctgtaatgtaaaaggagctaattgcaatgatgagattgatttagaggaggaattagaagaaaatgtccttgactggttgtctggatatgcctttcatttatcatctgtctttggggacagaagaatggtaatctcactgttcttgtaggctgcttagttctcagataactttgggggctgtttttttttttttttcaatttatttgactgtgctgtgtcttaattgcagtatgtgggatatcattgcctgacaaaggatggaaccagggccccctccattgggagcatagtctcaaccactgggccaccaggggagccccaggatgtctggttttgattccccttggtttgggtcaatacaagcatttgtctattctgagttcactcaagtgcttctcggttactacaaggttcagtcactcctgtgagagctgatgagaccacagtgaataagcttgggcagacagcgaacaaacaaccacatctccaagcaggagaacaaggaaggcgatgtctggggcgctgcagagaatgaaaatgggaggggataacagagggagggaatggggagaggacatttaagaagggcctcccgacgccatgataggggagtccgttccaaggagaggaactgggacaaccaagcccagtgagaaggacgaacttggtgtatttaaggagcagatatgcagcgtggtgggcaaagcttaatctaggagagggtgacataggggcatagctcagggctgagaggtagatggcctagagacctggcaggccatgataaaatttgggttttattgtaaatgtggtttcaagctttggattttaggctgagagaagtattagtaaagcatttaatgctttaatttaattcttttattcttaatatgtattttaccacaaagctctgttgtatttttctgtgtacctatgaaggaactttttgtcaaattattttattacacatactttcttttctgtcccccaccccaccttcaccgctggtttttttttttttttgctacaattcaggtagaacttccccaaccaagacttgaacccatgcctcctgcattggaagcctggagtcttttttttttttttttatggggatgatttttaaagtctctatggaacttattacaatatagctgctgtgttatattttggggttttttttttggccatgaggcatgtgggatcttagctacccaacccgggatcaaacccacacccctcacattggaaggctaagt

SEQ ID NO: 40863 - DNA, 1582 bp, Bovine  19866880485276
  misc_feature (1)..(1): n is a, c, g, or t
ncccctacagttgctaaaatgctgtatcaacagttttatttattatcgtttgtgaaactaaatgagagagagctggagagagaaaacttttcttttttaattccaggggaaaaaattgttttgatcattttgagtctcttagcaaatgaaaaataacaaaagaaaaccttatataaatgcttcactgttcatacagatgtacagttctaaatcgttaggatcccaaaatgccaaaattgtaaccaaaaaataatttgatgtttatagctaaattgaattgagtgctaagtgaaacaggataagccccatttagcactgtggaaaacatgatttcagaaaaagagggagtataatttgctgctgcttgtttttcaggctgtcagaatcatgtcttcctggcaaggcagtgttggccagtggtcaggatgagggtggctttggagccaagcagagtcaggttcagtctgtacaggcgtggctgtgtggctttggacaagtcgtttacgctctgtgagtgttttccttttccttgttaggcagttgatagtggtccctataccaccaggtctctgccaagaaaagtaagacagtacacttgacaagcaggtggcatgccgcccgatacactgtgagccaacagacagtagggttaggagggagatgtgcagctgatgaaggtaacaggacatggatagtgttggtggcggtaccttgcttcagccccaaatcaagacgccagagcatatgttatttaatggcttatggtaactcttcccataaggaaaacaagaatcataaatatgtacaaagattatgttctgaaagaaattcaggcaaagctcaggtgtggtaaataccaagtctctgattctttctcttagtttccgtttcctcctattatttcttacctcaatgcgctgtctttatagagaattgttcagtggtctgatcttgccataaagtcatccagaggggacttccctggtggtccagtggttagggcttcaggctgccaatgcagggggcacaggttcaatccctactctgggaactaagatcccacatgccaaaggatttttttttaagttgttttaaaaatcgtccataagctctaatgacatcagccttgagccccatgattccagcccatctagacagactgttcactaaaaaccagagcaagttcttccaggatgtagaagaatccagaatcctatctggatacattctggcttttttcctcaatcttttctctgtatttactttagctctggttgaggaataggtaacttttcaataaaagatattctttttagtaactcagaaaaccctgatcatgaattttaattatgatttttattgtacgatgcattttgttaacgctccaagccatgtgaaagtctttggagcttatttccaaattctcataaaagaaaaccattacccaaatttatatatgaatgattttgtaatttgtggaataataacttgcggtggagtaaatcttcaggagaaaactggactggagcctttgaataccaaatgggtttcactaggaagctcacgaagcctccagcgttag

SEQ ID NO: 40864 - DNA, 2378 bp, Bovine  19866880625963
  misc_feature (1)..(1): n is a, c, g, or t
nacatctgtgccctgggcccctcttcatgtccattaactcacacacctaaaccaccaccgctgaacaggcttcctctgaaactatagagtgccacaaagcagctacactggagaaggcagcactgtccagaactcattagcaaggagctgagcacatctgtggctaaaatcctgagtttcatgaacttcctgtcaatggagggctggaccagaggctctgagccctccgcagggtagggcccaccccctcgcccctggttgcagtggctttctgggaagaggcttcttgtcctcagtacagaacggcaagcaatttgttgtctgctttaagaaaatcatgccctcgtttttgtcttcagccctgtttgtttctctgatacattattattcctaaattctggatattttccaagacactcctttttggagctgtctccaagtcttctctggaagaagaagggatataaattagactcacagagaggaaattaaataatttctctattaggaatttgattaatgaaaaggggagcaggactgacctctattttggagcatcattttggcaaactagagctgatgtctgtctgtctattcacctatctgttgatcagtaaaaaatgagtgactgtggatgggagcctaacatacatatcagaggacgctgtgttctgtgcctgaagccatcaatcaccattcactctagcctcaggttttcagctaaaatacactttgtacacttttgttcactcattcactcactcacacacatgctccacaatgtttcttgaaggctgacctgttgctaggggcacagtcatgagctagaacagattagggactccttttcttatgatgctcctagatagaggttcacacctgtgtttcttcaactccagggctcctatgatttccctctttgcacagatacaaaggttttaaatatagtacagtaagcagaatactcacatgtcccaaaaattctctttcttttgagtgtgaacagaacctgtaaacacaatgggctatcattgctacaactaaattacgttatatcgcaaaagggtcttgcagatgcagttgaggctgtgaatctgttgctgtggagctaatccaagggagatcatattaggtagacctgacctaatcagatgcgtccttaaatgaagtcagggggattcaaagcagcatagactgtccttctgaccttgaggaagcaaacaaacatgctgtgaactgcctatggccagaaccacacgacaaggcctgaggacaacctcggggagctgagtgtgccaaccgagacacatcaagacaatggggactttagtactgcagccacaaggagttgaattctgacaataaccagggatcttggaagaggcctctgagctacagatgtgatcacatctgtagaggaactcatctgacaccttgattcagcctggaaagaccctaaacagagggaccaaaactgtaaaataataaataggtattgtttcaagatactaagtatgtgatcatttgctttgcagcaatagaagaataacacagatagttatctgcccagattgtttgagacaggaatactagaccaccttacctgcctcctgagaaatctgtaggcaggtcaaaaagcaacagttagaactggacgtggaacaatagactggctccaaatccggaaaggagtacgtcaaggctgtatattgtcaccctacttatttaacttatatgcagagtacatcatgcgaaatgccaggctagatgaagcacaagctgaaatcaagattgcagggagaaaaaccaataacctcagataaacagagacaccacccttatggcagaaagtgaagaactaaagagcctcttgatgaaagtgaaagaggagagtgaaaaagttggcttaaaactcaacatttagaaaatgaagatcatggcatccgatcccatctatttcatggcgaatagatggggaaactatggaaacagtgacagactttagttttttgggctccacaatcactgcagatggtgactgaagccatgaaattaaaagatgcttgctccttggaagaacagctaccaacctaggcagcatattacaaagcagagagatttctttgccaacaaaggtccatctagccaaagctatggtttttccagtagccgtatatgaatgtgagagttggatgataaagaaagctgagcaccgaagaattgatgcttttgaattgtggtgttggagaagactcttgagagtcccttggactgcaaggagatccagtcactcctaaaggaaatcagtcctgaatattcattggaaggactgatgctgaagcttaagctccaatcctttggccacctgatgtgaagaa

SEQ ID NO: 40865 - DNA, 1235 bp, Bovine  19866880751696
  misc_feature (1)..(1): n is a, c, g, or t
ncacaccccaccctccccatcctggaccacgacccagctgcagggtctcttctcagtaccaggtctcctccatcagggccatatcccacggcgggagcaaggccagcctgtgggttgccatggcaacccccttccaaggcacttagcaaatcccaagatcactgccttttttacctgggggcattcccccagaggtgaagaggtccaaggaccagggactgtgcccagcacagagtgagtcctcaagaaaagtttgctgagagatggaggaagatgcttcttatgccactgctagagccaagcccagggggcccaggaggctcccagacaaggcaagaaagaggccacatatttgtgagctttgggaatgcaagccatagatgatgagtgagtcaaaacagactggggctgccagcaggacctttataatgctacttcctggactttctcgggtcccagctggtcgtgaaaatcccccgtctccacacaggagcctagtgaacgctcacatacacgtgcatgtacacacgtgtgcccacacacgtgtcactgcccctgtcccttagagactgcccgggactcactggccaacaggaagcagagctggcccgctggccctcgctgtaactgcccttgacgtccggagcacgctttgcccccagcccgtgctcaatggggcttctgtcagctgctaagggccccacctgaacccctcaggtctgtgccaggagggccatgatcagaggcagctaacccagctcgaatagcaattcaagtcttccttctatcagatgccttgacactgtagcgggagctcgttcacgcatatgatttattaactaatttagcatgtaagaaaagcatctgcatctcgcttttatcatcttgccagcagacaggctgaagacgagacgcggcctgtagacatgcttaatggggccttaagcactcctgcgcttgtccagagctcacacgaggctctggtttcagaacttgtctgagtgggccggcctaacacaaacaaacacgagggtaaacctctcatcagccataaataccgcggggatcagaagagcagccgtaaaatcgtgtgccggagccctctcagagcactctagacatcaggactgtcttggaactgggtaaataaaaaggtgcctcagttatttaaaactattggctgggtctcatcatcttttattattatacatattttaagatttttcagtcaaagg

SEQ ID NO: 40866 - DNA, 898 bp, Bovine  19866880826913
  misc_feature (1)..(1): n is a, c, g, or t
nccttgatggctacaaaatatcccaagtcaacaaaggtatatttttatggatgggggaatgcttatgaattttttttttgccttctgattaatggaatgatacactgccccatcttcttaatgtttctatgtctttaaataatagccaatttcaatgacttagaaaaatcttaatctgaccataaagtggaaataaggtgagtgagcctgcagaaaggaagggaactgcattaaaaatcagaagtggggaccacagccaaatacacacccatcaccacgtctaggttatccttgcaaggacgataatcagtcagagccaaagtcatttatctcaccattgataccagaagctcagaggaacctaatttttcaagcagaacaaaatattaaaatattgtattccagggactccaaaataactagatccctccctggcactaaataaatgcttcaggctgcaagcctggcactcacagggcacgggggagtcatttattgctatgaatatttagaggcaatcttgattaccactttaatattagtgcagtggttccatagtcaggaagatatgagcatcatggaattgagagaggacaaaattgaattagccggagaataacacagtaaggatgagggcactgcagcaccataatgggcgttcctggcttggagacttttagatattatgtaaatgatgataatgtttattcatgagtcattgatacttttctctgatgggaaaagaacattagcaaacctcttgttaaaatgtgcagaatagcacatgttatcctcaggtaagaagtgcttttaaaagatatggggatgtagcttgaagctgtttgtgtgttaaaatgtgagggtattttctgcactggttttttcttactggatttct

SEQ ID NO: 40867 - DNA, 1000 bp, Bovine  19866880831914
  misc_feature (1)..(1): n is a, c, g, or t
ntattacaatggccccagtcactggatggaaggttcaccccaaagccagtatgacctcatcctgactacacctgcaaagaccttgtttccaaatccagtccgttcagaggttaaggctcgagcacaacttcggagagacacaatctaacccagcacggtgtccccagcaggccgccatcgccgtgagttctcattacactgccctgtaatcatctgggcgtgggtctgtcccctcaagttgatggaggccttcagagggcacctcatcatcaccttccctcccatgcccagcgcagtgcctgccaactgaagaccttcaccaattgttgactgaacgaataaatcatttctcattttgataggcattatatctatgggagaaaatcagaacataccttcctcagacagcttgatcatattccactgatgtttcaaagacattttacttagattcaaaggtctgttaatggcaaagatgcactgggctaaagggaagaaaaattggccacagttcacatccaaaactcctctcggaatgagtcaagctcccaccttctgtggtgggctgaagaacctccaaacactctacctgtgatgaagtcaccagaatgtttccatggcaaccagggagcgggtgaggagtccaccctgtgctatttctcctgagaaggaataggaatcatcactttgacttttatatctgaggctttgttgacaagttaaaaaaaaaagtttgtacaaccattaagttttctgcagagcactgttagatgtgagatgacaattttacctactgcctacattcagatacacatttcccctcaacttctcattattttttattttttaccttgttttgatgatgctggttctcttgccaggcagcattttttactgtggatatgttccctcactattaaaatacattcagataacatcacaatgttaatttgtttatcctatttgtaatacatgttaccaatttttacaaagggcttat

SEQ ID NO: 40868 - DNA, 1412 bp, Bovine  19866880835837
  misc_feature (1)..(1): n is a, c, g, or t
ntcatgcccaggcttggcaaattgaaagcgctcctttctgcaactgtttcagagtgagtattaattagagctgctccttaagaaatatctggaactattccagacagaagaaaagtcaatgccaaagttctgctagctcagcgacaccccacgtatagatcaagtggccgtggacttccccaggcaactgccttcactcactggcggacggggcttggaaacagaaagctcagtgggtctgagatacgcagggggtgtgatctaccgccatcagtttccattatcctaaactggaaaagcgcatgtctaagctggcccacctgtccaataaagcattttgatcaaagatgcagatgcacagagcacctgtttgaggaatggcctgggtgtccatggggatccagcagagttatggaacttcacaaagtgggtccccgccgttctagaggcagacagcaacactgtgaaaaatgcttctccggggaagctttgagtttctttaaacattcaattatagctctacaaacacagatttgaaatgaacagcatctgatctttgcacaaattagagatgctagaaggaaaataaaatagattctcctaacaatcaagtaatacaaatcagccctgcttcatgaaaaaatcggtttacaccaagtctgggagtggggttacttaggtgactcccttttcgcatttattttagatgatgacttttatgattggaggcactgagggaactttattttggttctgatttttaagcaggttttaaattaaaatagatttctggatatagtccgtgggtacaggtttttagccccgggaaagctgctggaggccttgctaacatccactgtttccttttgctgaataggaaacacttcaacattcctcattacaactattttcagtttttacagaagctttttttccttcaaattaaaaagttttcctaattttaaggataatttcttgtaaaatattgagaaagtaaatatccaaatctttgtggcattcatggacacaagtgtaaccttaagataaaaactgaatatcatgtaaagtaacaggctgttcacactgactatattatcaacagtttttacattaataaaaatctccattatcatctttagctgtactgctgcatagcgctctatttcatagctgagtcatgacttatttaatcaatctcctatggacatacttttaggtataacattctgcaatgaacatccttagacccgggctgactctccactgtgggctctgaagcaaggtaccaaccaggctccttctgattgctcaggctctatgttctggtgggtgtgaaaatttacatttattttgctttcttgcacatttatctctgcttcatttggataaattcttcattttggatctattgg

SEQ ID NO: 40869 - DNA, 1227 bp, Bovine  19866880837055
  misc_feature (1)..(1): n is a, c, g, or t
nctcaaaagaaaaaaaaaaaaccacaggaaatctggtggcttgaggcggccactgtgccaggagcattgcatggagctctgtatgtgcaggtccttttggatgtagcagcccttcaaggtttactaccatcccagacagtccaacttccctcgtttccttactccgtttccttatcaccttggagtgtgtgcctggaaaccaggtgaatcacctcagttcactgctacttgagcactggtatctggaagacccattagctgcaggaggagctcttgggtgccaagctgaagttgacatcaacaggacccttatcctgggatcccatttaatccccagaacaagaacagcttcttgctaaatcacactgtctctagaaagtcccaagcagttgattatataagtaggattaacgctggtgtagtgaaatgccactcggagaggttcggcttgcaggcagatgcattcaagctctgtgcctttaatgggggttgtttccatcgagcagatggcatatggcccttccatcctgcttgcatgagcatctcctctagcacacccaccaggatcgcaaggacaaaaccatctagtgagagtgttgtcagcagcaattatgagaagtgtatgtcatgtccccaggagttgacacactgattttagtgaagtgctacacagatctttgatctcttggcatgttgtttaaaggatgattgtcatcctcataagatgaacaagaactcatggagccccagatcaaggtggtcctggcattctagaagagcagtagggattcctttttgagagagaaagtgtgtgtgcacaaaacagcagctgcagcagaagccagttctgtgtctgtgcatcttgagatacagcaggttaaaagccaagatgttaatttctcctgcttttagatcctttgtcaagaacacctgggcttcccacgtggctctgtggtaaagagtctgcctgccaacacaggagatgcaagagatgcaggtttgatctctggcttggaaagatctcctggagtaggaaatagcaactcactccatgttcttgcctgggaaattccatggacagaggagtctggtggactgtagtccatggtcacagaattggacaccactgagtgactgagtacacacatatacaagaacaccagggaacttctaaacaagggagcaacttgatggggcttttcaaaactgcacacctttcctgaattg

SEQ ID NO: 40870 - DNA, 1527 bp, Bovine  19866880848934
  misc_feature (1)..(1): n is a, c, g, or t
ntttcactttcatgcactggagaaggaaatggcaacccacttcagtgttcttgcctggagaatcccagggacaggggagcttggtgggctgccgtctatggggtcgcacagagtcggacacgactgaagcgacttagcatccatatttaagatgtgcatgccctgtgatgcatcaagttcatttacaggattcaatcccacacatgccccaagagagatgtacacattcacgggtgcttgcttttgttttagaaaaggaaaaaaaattaaaaaattggtatctggtaaatgggtggtgttgattttgttgagaacctcaaagcaaaacctgaaagaccatttggtctctaagtgccctgaacattccttaaatcacccataagttacatacacatgatttgtgtaaacaactcagtacagcactaaaaatgttaaaaatatataatttacactctaatgtataatatgtagttccataaaatggctgcaacaaaaattaaatcactcaagtgctacactgcttagacacccttccacaaaatcgtaaatattcaaagcttccagctttgcctgttgatggataaacatcgccacggtttggttctttcatctgaaaaacggggatacctcaccactgccccagagggtcacagtgaggccgtggtgagttaattccgagcaggcctggcactgtgccagtgcagaatgagccttacaataaacgtggggtgcgttagccttcagagggttgctattctggaagaggagagagaggactgacagttttatagcatgcgatgtgatgagggctctggcagctgtgggcacaggtcttgtggaggacagagaagaagcaggatgaccacccagaggacccctcccactgcctctcaggctaaatgaagttgcctaccaatccctgccctgcgaccggcgccagcgtgctgctccccacagcacagacgccgttcctctctgcctctggtctctaccatcagcacatatgcttaagaattctctgcgtttgttctctggaaagtaaactgttggaaagaaaaatcaatgttcattagcagtgccattacttttaagaaaggcctttctcaaggaaaagtggtggaggacactcctgaggccggtgtccccctgacgtccctgtggggcgcagtgccttactgactcagcttcacggcggtcatctctccccagctggacgctgggggcacacccgcactgctggggcagccgcggcctgtgggtggggctcgggcgaagtggggagcctcctgtggggtggggagaggtgcgtctcagttcagctgatggaagcacccatctggggtcaccagaccttctcgcttttttaagaggaactctacgcctgaatttttgtgtgaaactttccaatttttaaaatattgtcaacaaattcaaagcaaacagtaaaataacactctcagagcccaaccaaataattttgtgggtgaacctcaccccagagccctagttggtaacttttgtgacaca

SEQ ID NO: 40871 - DNA, 1416 bp, Bovine  19866880854133
  misc_feature (1)..(1): n is a, c, g, or t
ncaggctgggctgggtgctatgaacccatcatgctaaagagagttaactatcagtgtaaagagagccgatcacccaagtgctcacaaatccaaagtggaaaataggagcacctcccactttcttgatgccagtgttgatctctgagtcagtgaacacatggagagcctcagaaccaggaacccggactgggcctcaaggagtcacccaaggggcagccaccagcagtccattggaagccccctctccggagggctgtctcctgaggcctcagaggttgagtgtagcctcttgagcctcgatgcttgctgcctggcacttgccaatgcatgtattacatggaatcatggtcactgtcattctcgaaacaagggggacacattcaatcagagggacagctcaccggtgcctcgcctctgggatcatcgacggtatattctgggcttctgcataaaccgtttgtttgcagaaaggtgccagggagcacaccgtcatccctgctaaaaaagcatcgttgtgtccagggcaattggcctctgagttcttccatgaaattgaatggacaggtttctaaggcggggctctgctcccagctgtgtgtccttgggcaaaccccttagcatcactttcctcatctgaaaatgaggtacttatcccattgggttgtcagagaaagagctgagcacagtcctgactcacagtaagagctgagcgcacaagcttacaatgcctcttcctgcagagagccgtttccagggccccacagccacaaggcaggctggactccttctgtccatggcgtttcccaggcaagaatactggactgggttgctatttccttctccaagggaatcttccagaccccgggatcgaacccaagtctcctgcattggcagacaggtagacaggttctttaccactgagccactagggaagcccatgatataaacacattacgagtttacaaacagtttgtcattgtttagttgctaaatcgtgtctgactcttttgcgaccccgtggaccatggcccaccaggctccactgtccatgggatattccaggtgagaatacaggagtgggttatcatgacctcctccaggggatggatggaggcttccgtgggtctgaccagcatgctgacccagatactcacctacggcttctactctggggctctcaccctgcatttctgggttgttttctaaccataaaggggatagacatcacagtagggacttcaattttcaggaacagtcaatgatagcagagactgctgagcatctgtaatctcaccctttcatagtgtgagaggcagttgataaaaagcaggcaggcttcctgtctgcatgcactcactctcccattccgagctgttttgtgactctccttagagacctcagcctttattcaataca

SEQ ID NO: 40872 - DNA, 831 bp, Bovine  19866881005802
  misc_feature (1)..(1): n is a, c, g, or t
nctataaagaagagtatactgcccaggttcttgacaggtatgattctgatccaattaaagtttcagtgttttcattaaaaaaaaaaaaaagagtaccggagtggattgacatttcctcctccaggggatcttcctggcccagggatttaacctgcatctcttgtgtctcctgaattggcaggtggattctttacccctgcgccacctgggaaggccccactctgacctctcatctggctcaaaactctcccttagccattgaaacagttgctctgcctgcttctgacccaagatgacctgtttgtggagaacaggctgtaggttgaagtaaggacacagaaagatgggggatggaaaagcaagaagatgtgatttgtgtgccagaaggaatgaggaatttcctttaccagatctttcccatgatggcgttggtgaactatagtctgacctgtgggaaaaaatggtcctcaaaattcctgatgaagaattctgtgtctgcctttatcatcctgaaagatattgatctgttcatttaattaaaacctactaggtcatttacaggtgacaaaatatgatagcgtcggccaagtctgagtctttgctgagaacaatacagattcattttctgtaactcataggtagaacattttgcttaaaaggaacaaattactgcgcttggcagagtgtctgaacgatcctaccacacttattgtttttcttgcagtagatatgagctagcaatctttagctgtaatgtaactacattacattagcgataacacacatctatgcacccatttctaatcaccaacgaatcggttaaatctatgc

SEQ ID NO: 40873 - DNA, 755 bp, Bovine  19866881011603
  misc_feature (1)..(1): n is a, c, g, or t
ntgtctagcactggggagtggctgaacttgattcactgatttcaagttgcttcaacttgattcaggaagaagtactcagattctctctctccttccttctttctgcctctttctcatctgtgatgaacatatagctgaatgggatattattctgtcctttacaaatcaagtgtcaagccatcaccaccactgctcaggtagttgaaagactagaggaaagggaacctgaccttgggtgcattgtaggcatccagcatttggtttgtttgcttgctgctgttttggtctgtaacatgagtataagcttatctgctcttcctccctcttagggtcatggtaagaatgaaatgaaatgatgtctgtgaaaatacgctggaaactaaaaactaccaccccaatgtaaggtgatactgagagtttaaagtatctttagggaccaatctccaatttcacgtcttgaaaaaaatgaactctgggtccagggaagacatatcaagatggggttgctcctgaattgatctcaatggagctcagcctttgaatactccaggaaatttccaatctctagctttctcgcatgagaatgaaatgatggaaatagtacgtgaaatggaaaataaaaaggcaagggggattagaacatgaaaccaaagcttcctgtagcatattgagagtctgaaatatcaaatagcagctaattaaaacagcagaggtaatgtctgctgcatagactttccgtttgctttttttcctgg

SEQ ID NO: 40874 - DNA, 1789 bp, Bovine  19866881014441
  misc_feature (1)..(1): n is a, c, g, or t
nctggtgaaactggtcacgttagcagacgttttgtctagattggtcagtggcgaccaacagttcagccagtcgtttttgagacaaagaatgggaattgggggtctgtgtctggctttctcgtgggtaaacaaggggggagtctgcaattccgatctaaatcctgtagacaagagtgggtctctgtggtgggccgctccctggaacacaaaaggcaaggggcagtgtttaaccattgctgtttgccagagcaaggggctcaggaaagtttgacctcaccagaagaaacagaagcaggcagcagagggcagtcgttggcagaggggagggtagcttgtgagctggagctggagctggagcaagcaaaccaggcctcaggcagcagtgagtgcggtgggcaggctcccgtcaccctcacatgcacatgtggtgtcgttagccaggcccctgacttccaggagctctttcctccaggacggtcagatccatcaggaagaactgtgtggctgacagactcctcactgggccttcgggtgggcagcttgtccaggcaagaagctttgggctttgaagctgggtggctctgaggctctggcacttgaaagtgaggacccaggagaaagcctgatgttcggtggatgagatcacatgttgggcttgttcaggaccttcagttctctagttaaccgcatctaatggcggagatggaatctgtaagctgttggccttggcacaaacgagacagaaggtgctggtctgtttcctaagttgcatgtttcaattagaaccatgtgctgaactataattttctgtcacattggttggccttttccttgaaagatccatttaattatctttgtttaaaacctacagggtgtaaatgaaagtatctgtagatgaagactcctaaaaaaatcacaagttttaggcaacaaaccaacctcctttcgttttggttgacaaaaggagatttcagttcagttcagtcgctcagttgtgtccgactctttgtgaccccatggactgcagcatgccaggcctccctgtccatcaccaactcccagagtttactcaaactcatgtcctttgaatccgtgatgccatcaaaccgtctcatcctccgtctcgccttcttctcttaacttcaatctttcccagcacagagtcttttcaaattagtcagttcttcacatcaggtggccaaagtattggagcttcagcttcagcatcagtccttccaatgaatattcaggactgatttcctttaggatggactggttggatctccttgcagtccaagggactctcaagagtcttctccaacatcacagttcaaaagcattaactcttttgcgctcagctttctttatagtccagctgtcacatccatccatgactactggaaaaaccatagctttgactagatggacctttgttggcaaagtaatgtctctgttttttaatatgctgtctagtttggtcatcttttaatttcatggctgcagtcaccatctgcagtgattttggagccccccaaaataaagtctttcactgtttcctttgtttccccatctatttcccatgaagtgatgggaccagatgccataatctagttttctgaatgttgagctttaagccaactttttcattctcctctttctctttcatcaagaggctctttagtagttcttcactttctgtcataagcgtggtgtcatctgcgtatctgaggttatcgatatttcttccagcaatcttgattccagcttggcttcttccagcccagcgttt

SEQ ID NO: 40875 - DNA, 1231 bp, Bovine  19866881077639
  misc_feature (1)..(1): n is a, c, g, or t
naaaagcaaagaaaaactcccaggaagaccatctttcagttaacgcacatggcagagtggtgctctctgcatagactgggcataggttctgatgtccacctccaaattcagcccgttccaagactcacatcaatgtgcacatcatgggagtcttctatcttcatggcaggttatatggttttgggcaactctgaaattatggtaaccgatttcctcatgacttttgtttggagcttgcaacaaaatctacatatcgcagcatttttgccctcattttttctctactattaaaagatataggagagaacagaacagcctagtccttcacctgggccaacagagactcaaagactccaggaacccagggtccgagaatcttgcaagggagatagtaaaatatgggaactttccccaaatgctgactgacaagcattatcgttgatgacataaaccatcaacagaaatgctcaacagaggagaacagacgcttcccttgtatttatcaagcctctgcagaggcagtaatttgctaaatgatactgggctggttgaaagaatttagtctcatttcaaaggtgcataatatagtccagactcatgggatcaggctctttatctcccataaaatgttacaaattggtggagtcaaaggaagaaaagtcgaatttttcgattacagaagtatttttaatcaagtaggaccttccgatgagacattgaccatctgaccccagcagcttatctaaggcaagatgaatgccctgagaaagaagtgctggttgaagcggctctcagggctggtggggtcgtggccaaggggactggcacatttctgctgataaaagaaactgtctggggttgcaacgagcacagcaggaccccaggcagaatcacagcggatgggtgctgccccctcacaacgcatggcccaggctcaaagatggctttcaaagaactggagctctgcaggaaggagatgaaagcacatttaattttgcacatgaagtgaaaagctcactgataaattgagtccttggaatttcagtgttcagatgcacctggccttgggttgttcaaatcaccgtttaagtggtgtcattctaatgtcaagacttgaatataaatgaatgtgtgtgattaaggagatacccagaatgtataatgtgtttcgcatatcatcctgtttccttaaggataaagcattgatggccctgtgagggaagggggtggg

SEQ ID NO: 40876 - DNA, 1093 bp, Bovine  19866881084698
  misc_feature (1)..(1): n is a, c, g, or t
ntttaactgtgtttgaaaatgggacattacctacaaaatgactgaagcttaatagtaacatttatgatttccatttctttctagccctctgtcctcattcctgggatgtgtgtgtgcgcctgtgttagttgctgagtcatgtccaattctctgtgaccacatggacggtagcctgccaggctcctctgttcgtggtactctctaggcaagaatattatgatttccatctctttttagccctctgccttcatttctgggaaaggaccaggaattctattattttggcttatagaaagtacactgtgaagttgctaatgctgtgcacaaaagcaaactttttccttcaagagctggagtgaatattttacgcttttcaggctatggggtttctgctgcaactactcaactctgcacaagtagtgcaacaatagtcacagaacgatgcataaacgagtgagtgtggatatttcccaataaaactttatttacaagaacaagcagtaggccagatctggcctgcaggctgtaacttactgacgtctcaaagacagatgaaatttgggtgatggaagtgaaaacactacagccaagccacctggtgagatcaaaagtgtggaagcaggaaggcagacgtgtctgaggacacagaattatccattttgtcaaagatggatacgaagcctagcacgtggtatcacacagaattctgaaacacaggttaggaaggatactgcattccaaacagaggctatgcatttatcagccatatttcagagagaactggcctaggagactgtgcagggttgatgtgggtgagagtcagggggtggagtggagagacagcaaaaccagaaggctgctgcagagaaacatgtgccccacattttccatataaagtaaaccatcctccagacttccactgcctctgctcacccaatgtgttcctcccccagcatacaggcaggctcctgtgacagatcacaacccacaccctgtgcgtggggtcatataccgtaaccacatggcaacagtgaagacaggtgctaccctcgcaacatgggagacctggattcgatccctgggtcagaaagat

SEQ ID NO: 40877 - DNA, 1353 bp, Bovine  19866881111321
  misc_feature (1)..(1): n is a, c, g, or t
ntctgtaggacagtgttatttccaattaaaataatgtaaggtaaaaacacagaattgcagagtggtaaggaaaaaagtctttatgggaactcgcccaattgcctggattttattttccaaatgatttcccttttatcccccattgcagttcagtaataaacctttcagtgacactaaggatataaatctacttggcaaccagaatgaaagtttattcatcatctataaatcaccatattttgtggttctctaaataatgctgggaaaccctggaactgagcaagcagtgactcccagatcaacagctagccattcagacgtgttctagttttgctgttttatggtgaagtatgacttgagccattgcctagtttctttacatgactaatttaaacttgccattcagcccacacacgcacgtgctcgtgcacacacacacgtacacacacacacattcttaagaaaatgtgaaggccgtatagtaattttatatatttaaaatcctgttttatagccacaaataataacaatgaaaactgaaaactaattataacttgctaatgttctgcaattgtcacttctcgccccagcatccttaggcctagacaatcaaaaatacattcaagagggagaccaattcctttggattattttgtaagctgtattctcttgggaggtttacaatgcccatgtatgttaaaggcactgataagtcctgcaacaatgaagcctgcttaaatttgtttaagcttgttttctctaaacttctttgaccgtgaaatgcttttacctaattctcgagcatccattttagaaacatagctctaggaatctttgcttttaagactatctattgggttggccaaaaggtttattcaggttttgttctaaaagatgtgaaggaaaaaccctaacaaactttttggccaacctaataccatgctttgctaaagaagccccaactggaatttcgatctgccatttcccacaaaaatctgagactgcaggaagaaggtcttattctccttatctgaatccctttggtctggcagagccagaaagcgatgactgaggagcctggggttctctgggcggcagggggtggtgccagtttcacaggctgtggccagcttgcctccctggaagcttgtccactgacaggtgctggacctctctccatgtggggtcccctggaatctgtaacaaggccgtcacactgtcacccaacggagtccagcagagaaagaggagccagtcaaaaccccttcagaaagcactcaccaatgtcacaacatgaaataaccagggagggttgtgttccccacaccaagggcggaaaaggcagagaagcaa

SEQ ID NO: 40878 - DNA, 1133 bp, Bovine  19866881152274
  misc_feature (1)..(1): n is a, c, g, or t
ncccgtgataagtgagaaagtacatttctatgaagctcacatgaagcagaatgaactgtcacgagcaccgcccagactgcctggagtctgagtgtcctgccgtttccccagagaccctgcggctggggcaccacccctgggattcaggcactatctcctgctgtgaaccacagtcaggggccctctggacggcttgtggcagagagattatagccccgacaactgcccccccaccccagaggggctgctggtgagcctggccttgctaaggaaagggttggggtctagctgttacttgttcccaagtcatggcagctgctcagcccccaggcaatgcgggcctttcctctccactgtgtggatgggatgccagggatgctggagggtcaggagtccaggctccctgatccagcattgctgctcactggccacctaacgttggatgtgtcactacccccacgtgggtctggactccatcatcagtcagataatgaggctgcactagatcattccctccagccattaggaagaagtctacgatccaatgaagacacagaaagactgcgttttatgctgacagtcagctacgctcaccaccaacaaacccatctgaggtgacactgcaatccctcatggttacagcacaaaagtaatcttatgcaaacctccataattctgtgttagaatcattggcaagtgtctgcaagttttaaaaatagaatttgaagcaccatttctgcagaaaaggcttcagaaaaacaaatgaaccattggcatagctaatcaagattaatatgattccattggaaataattaagcccatcaggaaaaataaattaggttttgaacaattagaatcctcccctcccccaaatcctctgaactaaaacaacagccttctttagttgaaacccactgtatgtgatttcaagagcatgtggtcagtatgtgctgtcttctttgttttaattgcttttggaaatatttcagttcagacacatattctgaatcttggttgtgagagagacagctccgtttgaaacgctaatgaaaaactcttcatgaaggaaggttagtgttaaaattactttgaagatgacaaagtcctttcaaaaaaatccagaacgtcaatt

SEQ ID NO: 40879 - DNA, 749 bp, Bovine  19866881163934
  misc_feature (1)..(1): n is a, c, g, or t
nctctagccccgtgtgggttctcttgtctgtttttattctgtgtggcagccatggggcctggcactgggaaggtgctttgttaacacgcacagaacagaaggatatgtttggacctaagtgctgacaacacgtaggagactttctggaggcccatcctggccttccccagagctgacttttggggtgtaaacagcaggcccatcctggcctccccagagctgactttcggggtgtaaacagcataaacgtcacatgcattgtctcccacaagagatagtgtaggacgcaatttccttagatgtggccagcaaaggtttgagccacagatattttgtcctgtctgaacaacagagagagaaaagacaagggaccaattccaaaattaaatcagccactagtctgcctgtcaaccagcttatactgattgttgagagattaaatttgagaaagaaagatgctagccaaaaagtggttcttattttatatataattttaaatttagtgaaattcactgtgtgctgacttggggggaaagtggggtgagtcagcacatttcttcttgtttcccagcctgattcaatagaaacaaaacccccaaagctgcatccttgtctctccacccaccctccccacccctacccctacgaaagacaataggaggctatgagttccctgagagggtttctgctggaaggacaggctgtcgaggcctgcgggttttctttaagcaaaagcaacagttcactca

SEQ ID NO: 40880 - DNA, 756 bp, Bovine  19866881198845
  misc_feature (1)..(1): n is a, c, g, or t
ntcccgcacgctggcctcctgcaggctgctcctcttctgaataatggcttttccgattgtttgtggcagatttttcttcatctctctaatctgtattataaaagagtagaaatgtaatttcccagttagcttatattttacatgaaaaatggctagtttgaatgagacaaaagggaagacatctttcaaagggtaatgacccctgtttagtcaaatggcagctttcccatttcattgcaggagaagggaacaattcatttctcctaaattgctttccttcaggccatcttcctccctacaaaggagcacttctaagaaaaccgagagtgggtaaaaaggagccttccagtctcaggaccctctggtctcaggtctcttcattctcggtgtgagtgagaacgccggtgttcccggagctctgggggcatgtctgaggttggaagcagaaattctcttaaggtgggaaccgcccacgtgtggcaccactttgcattggaaacttggagtgtcctccgtgctggtcggatggaggctttctgggcctcggcaccggtgagaatggaggcaggataaccgtggttgccggggactgtcctgcacgttgtcgggtgaccagctggatccctggcctccgcccaccagatgccccagcctgtccccccagtttttgataagcacagatgtctctcgatgtcgccaactgttccccggggtggggggggagggatgcaagactggtcccccagtcacgggccg

SEQ ID NO: 40881 - DNA, 1103 bp, Bovine  19866881217388
  misc_feature (1)..(1): n is a, c, g, or t
nattaagaatctgccttgcagtgcaggggatgtgggtttgactcccagtgagggaagtaaagccccacatgttgcggagcaactaagcctacatgctgaactactgggcccactcaccagaaccagagagagtccaggagccagaggaatgatccacgtgacccaatgaaaatctcacatactaaaatggcccaacaccgccaaataaaaataaataaataaagggcattaagtttattaaaaaataaattaataaataagtctcatttgggcaacctgatacagacataacagtattcccattatataaggaaatctttggcattccccatcctgcactagataattcgtagttgactgacatctaaacactgccttctgctgaaatcaacaagggttgggggaagcctaggatttgggtttgagatcccaagcaatctgctgacctttccccaacaccacttactatattggcttccctggtggctcagacggtaaaacatctgtttgcaatgcaggagacttgggttcgatccctgggttgggaagaagacctggagaaggaaatggcagcccactccagtactcttgcctggaaaatcccatggacggagaagcctggtaggctacagtccatggggtttcaaagagtcagaatcaattgaatggtgggttctaaagagagcaactgaatacatttgtgctttgggaaaaagcaaccaatgtgatcctcaaccatcatttagttagaaggggaaatgccttaaagggagtcgttttctttcaattgcaatataccagcagaacacatatggattctataatataacacaccaaaaccactgtgatttatctgcacaaggtaacgcctgagccaaaagagaatctaaatctcagagcaatcacctttctctgttgggaaagtggaagggccatctgtcctggaggtacaaaccgcataagggttgcagtgccctctggtggtgattgctttttcctgcatcgcaccctcccaggaatccacttgccccatggaatccaagcagctccatgcaatgggtggtgtgggtgatgggaggcccacaggaagagagtatctgaaa

SEQ ID NO: 40882 - DNA, 2019 bp, Bovine  19866881273071
  misc_feature (1)..(1): n is a, c, g, or t
ntgtgttttataaaaagtagcaattagctgtaacactgggacagaaaaacttgtttgcactaggcttcacttcggacagaatgacttgatggtgcctccgtgatcgacagcaggattactttttcaaagagtttattatattgcgctaatgtttatttgaaagagattacagtgatgttttataaatggcccttcgtcaacatatgaatgggatagtctctctagaagacagcttgcctgcaaacaaactagcaacttaagctattaacttccactgactgacagtttcgaaatggggttgtaggaaaaaaacggtacgtgaatgtttccagacatcaagttagttagataaatgaactttgaattggaaaccaggccttctagttaataaacacagtgtgtattattttacggctgtgtcttgtaaaactaggcaagtcattccaaaaagcgatgctctgtcctgttttctattataatactccagattatatcagtaagcaaaccttagaaaatgttatctttaaaacttttcacatcaagatgaagagcattcatatgtcctacgttgtgtccacgtgggtcttccagaaccttccaccctcttctgtaacactggtcagacaggaataagatcttccttccatataaaacaagtgttactgaactcagtttcagctgcttgatgctcaaaagccaatattctttctgacttacttcattctgtatgaaaaacaggtattgtatgttaacgcatatatgtgcaatctagagagatggtatagatgatcttatttgcaaagcagaaatagagacacagatgtagagaacaaatgtatggaatccaagcggggaagggaaaggatgggaaaaattggagactggcattgacatgtattcccatgggactgacctgtgtagactagataaccaatgagaacctcctgtatagcgcagggaaccctgctcaatgctctgtgatgtcctaaacaggaaggaaatccaaaaaagaggggatatatgcatgtgctcaatcactcagttgtgtctgactctttgcaaccccatggactgtagcctgccggactctgttgtccatgggattctccaggcaagaatattggagtgggttgccattcccttctccaggggatcttcccaacccagggatccaacctgtgcctcctgcattgcaggcatattctttaccaactgaggcaccagggaagcccctataaacaggccaccaattaatgaatatataatatttctctttgaaaacttgttagcatcttacagaacttagttttattatccccacttagatcaaaatacagaaagcagcaaagggtttcaatttgggtaaaaagcaataaataataagtgaaatggtattttgtcactgtcgttctgggaagtagcagtttcgtttgtgattggatttctgtaataaacatgcatttccatcttgtcacgcacaatggtttccagacagacattttcctctttgtctctcacagcaatcttcctgacgatttcagttttctattgctgttctgccaaactgccacagcttaagtggcttgaaacagtacccctttctgatctctcggttctgaaggtcacaggcgggtggctgagctggatttcctgctttgcatctcactaggttaaaatcaaaggtctctccgagctgcccttcttgatggcaacgtgggggagggtctgtcctgctcatctgagatgctggcagcagtcagttcttagaggttgttgggctaagatccctgtgttctcgctggctgaaggtgaaaggccattcctaacttctcaaggcctctgcttccatggcttgcaaagcccttgctccatcttaaaagtgagctaaacggtcagactttcctgtacatctgtccaaccccagcagtgaaagttacctctgctttttaggaccctcgtgagtacgctgggcccatctgaataaaccaggataatatctccctgtgcctctgtacacgt

SEQ ID NO: 40883 - DNA, 1141 bp, Bovine  19866881281322
  misc_feature (1)..(1): n is a, c, g, or t
ncagagggcaaattaggctcactgcccaggcagtcaggctataagacacaagatattgttgctgtttagttgctaagttttgagaccctgcagtctgcagtctgccaggctcctctgttcatgggatttcccaggtaagaacaccggagtgggttgccatttcttcttccaggggatcttcccgacccagggatcgaacctgcgcctcctgcattggcaggcaggttctttaccactgagccaccagagaagccctgtatgacacaagaagcactcattaaaaaaaaaaaaaaaaaaagggaaacaagactcaacaccaccattctatttctccaggctgtgatgcaaccgcaaccacgagatgaaacatcattaactcagtgataaaggcgggaaaccctgtgaaaattttataagccggtctcaagtttgtgtaggctgacacatttaaagcaaagctgcaaagctgctgcccatagttgcaggtgaccggcagactttggcaggtaaataaaagatcaattttaagaatggaagaataatgccatactattgatgccaagattgctgaagcttcgtccttaggaaacaattccatccatccttcattcccagggccttacattcttcactctgaaggctgagtccacattaatcccaccttcaagcgcctgcctgtaaatcataggcatcgaagaaggaaattgtacagacaaatgcttttgagcccttgaccatatgtggtccccaccggtaactactgatcaggtgaaaactggagattttattttctgttcaactgaaggcaacacagctgaagaggcaggaatcctatggaattggatttctgttaaatcacttttttaaaaaaaaaactttcactcaagggttcacttccccttccccacacccagcacttcagaggcctcttgtgttcattaaagctctaaacggggcctgccagcaagggtccccgtccagctccacactcactccctggcccctcagttaggaaaccaagatgatattgcccctttggctctaagagcctgtgaattactggcagaggtccccaactgcccccagggacccgttttgtggaagacagtttttccacggactgcgggcgggggagggggat

SEQ ID NO: 40884 - DNA, 1287 bp, Bovine  19866881307615
  misc_feature (1)..(1): n is a, c, g, or t
nctgtagtccatgtggtcgcagagctggacacagcttagcaactgaacaacagcaacattttttacagtctttatcaacttttattatactattgcttctgttttgtcttttggtttttttggcctcaaggcgtgtgtgacctaagctccctgatcagggattgaacctgtacccacttgtactggaagatgaggtcttaacgactggaccaccggagaagtccctgtgtatttgtaacttttactagaaagatgacattgcctgatagactgttgaaagtatttggtcatttggaaaaagtgacattgcttgaagaaaatatttgttcctatgaaaatggcgatcgtggtttccagtggatggtcttggagagagtgggagtcaaaagcagccctttcaggccttgggtggggcccaccctcaggacactcctgtccctgcagtgctgcagcgatccaggccccggcccctgtttctgtgccattcatctgggtggggcgggtggacctatttcctcgaactgtgccaagccagggcttggcacctgttgagtctcttggcaggaacattgggcttttagcagatggcatcaagttttgacctttgcaaaacatttacaatctgaaaatgatgggaaatgatacaaaagtaatgaaggtggtgcaggattacataattacggagttgacagaaccacggatgtctaggccagaatgcctcctggtccggctggtctcattcccctgcccatttctgtgtgacacttcctggcacggaatagggggttggagggcacagtgggacagaacgaggattttatgcctgatgggtctcggattgcttgctaggtctgggagcttgtcgtctcttgggaagaagagctttgttagttgttcagtcatgtctgactctgcaaccccatagactgcagcccgctgggctcctctgtccatggacttctccgggcaaggatactggagtgggtagccattcctttctccaagggatcttccggacccagggagccatcccgggtcttctgcactgcaggcgggttctttaccatctgagccaccagggaagagctgtgggaccctgaatgtgcaagcttccacagcttggggaactaaggggtgagctctggtgggagggcaggtctttggtttctcagtctcgagatcctctggggacatgagaggccctggagttctgtgtgtgggccgagcagccgaggaagaccggtaccagggatctcacacagccactcctctgtcctagctgtgggg

SEQ ID NO: 40885 - DNA, 1223 bp, Bovine  19866881317008
  misc_feature (1)..(1): n is a, c, g, or t
ncgtctgcggccacccaggctaatggctctgcgtgctacaaatgctccgccaaccaaaacaacatcacaatagacacttttaggattgtctccattaaaatccaaacttgacgtgggaaaaaaaaaaatcaagtttaaaaggggccccaaggctcctcaagtattgctgaactactgagaaagcagatatgtgtcacctgcaagcttttttattaaaaagaaaggaaaaaagaaaagtcacgcttctccttggctggtaacccagcacattgcatgtggctgtattcatgtattcacggttcattgtaatccttgtgaaccggaggcagcagcgtacatctaaaagaaatattgctttaaaacttgaataaagcaaaagcttgccgcgagcaccggtgtttccgctccgcgtggagctttgccctgaacctgttctctactttattgcagatcctggtttatgctgcagtctctctcttcctttaattccctgcaaagcatcctttctgcctgcagacccaggaactccttggggcagggacttcattaaggttggtgtcaatcaatgcagagtcacatgcattttccagcacataatgaactctgcacatggcctgactcccctcctttatcttcccccccacgccggccttctctttaagttgcaggaatcagatgcatttaaatgaacccttagaagttaatatattatttgccagacagtgcagttttatttcatagtagtataatgtaatgctcaatgattttttaagcagtaaaggagttactttcaaacttaattaggaaaatttagagactatccaggattcttactgaatttctgaaaactttggaaaaatgcactgagattcctgagacttatccaatggcaaccccagcgagggttttctgaactgttttaaaatcattctcaagtgttcctccgtcttgcagtttcaccaaatctattttactggggggaaaaaataaccaaacaagactgtggctcctatgagaagccaatccacattactgtgtccttcctgtattctttggggaggtccctaggaatcccttatgtttcattaaacagggtacagctgggcccctttgccacgcttcccattttttttcactgtctttcaaattaatataatctcatttaaaagaaaaaagataaaactgttgagtcaaatagaatcttcatcaagaacccaaagcat

SEQ ID NO: 40886 - DNA, 1013 bp, Bovine  19866881350530
  misc_feature (1)..(1): n is a, c, g, or t
ntgatcagggcgcctgtggacactggaaagctgtaccctcgccccgtatttcgccaaggataactgctttcgtgtattatcacagagtgagttttaggcaggatgaaaatgtaaaaaaaaaatcatcttatcccaagcctgtgttttaatgccacacagattggtggtaatttatgacatctataaaatagatgggtacacatattatgaatacactttccacttctcagaccttgacgtcctgatgggatattatttgcctctttcatcttaccttgacgtgtgaggtagacgttctcgggctctgtatagaaattacttgtcgttcttagagacgtatggagacctacgtgggctcagtcttatttgcatgttttctctctgtgctatgacctgcgtgtaaagttgacaaggtgcccttctgtttaatgaagctgttgccgtctctgccctttcctctcctcccaggcaacatgaaacggtcatcccaggcgacctcccgctcatacaggaggtcaccacgaccctgcgagaatggtctaccatctggaggcagctctatgtggtgagaagatggggcttttgtgggtgtttcttttaatgggcggataattgcgttatattttgttggcctctgccatacatcagcatgagtcaccacaggtgtaacatatgtgcgctccttcctgaagcgccccctcccacctctcaccccatccttcccctgtgggttgtcacagcactgagttgagcttgcgtcccacaacacattcccactggttgtctattttacgtgtggtaatgtgtatgtttccgtactgttctcttaattcgtccccccctccccttccccttccttctcctctcctgtgtccacatttctcttttctatatctgtgtctcccttgctgccctgcagatagattcatcagttccgtctttctagagtccatgcatgctaagtcgcttcagtgtctgggtctatgtaaccccgtggactgtagtccgccagg

SEQ ID NO: 40887 - DNA, 1514 bp, Bovine  19866881366777
  misc_feature (1)..(1): n is a, c, g, or t
ngggcgcctggcaaccctggtcgctggctgggggagtggagggctctgacccagtaatgtcatccccaagggagaacttggaaggagtcagggtgggttgtggggagaatgtctcctcttttcatagctttttctcctctgatggtaaaagtgatactggtctgatgtaggaaacttgaaaagggcaaaaaaaaaaaaaaaaaaaaaaacgagggagagaagaggctgcccattcatactacactgtagtgaaaaggagctaattggagctattaatacatgtgttaacccaaatgggtctcaattacaatgagcaaaaaagcaaatcctagcagagtggaaacaggattatactatctatcaaagtttgacaacatgcagagcagtatcatatattgctaaaggaatcatccttttgtataaacataggtcatgggaaagataaacaccaaattcaaggcagtgcttacctgagggagggggcagatctattaccagctgttttggtgatatttatttttaagctgagtgatgagtttcccttggtgcagttggctattcattacacctctgtctgcctcaaatatgttaggatttttttcataagttctttatttggctgtgttgagtcttagttgcggcatgcagatcttcatttcggcaaaagaactgtgggctcagtagtcgtggagcatgggcttagttgctctgtgtcatgtaggatctcagttccccaactcagggctgaaccctcatcctgtacattgcagggtggactcttaaccgctggactaccaggggagtccctctcatgatttttaagtcataaaaacccctcgcctcagaccaaattattgacgtatttcctacgaacgacccttctcccttattcagagccttcacagagatagctgggccctacagccctacccacccctctcaaagtcaggggtttgggcttgtaaacaaattccttgtctggggtcacacttgggtgcagagatgtgacccagggtttggccatctcggcttttgtgagccctctcccatgcccttcttttcagagatcacaaaacaggttgaaaacagtgtctgagttgccattattgattaagaacccaaaatccatgattcgacccactggaaataaacctgaagcccaccttactcctaaagggttatttgttctcacccagaaacctacagcaaacaagaatttgctggtggggtgtgctcagctggagtgttccacacactggcttaaaaattgaatttcatttccagaaccaggatgaaatgaagaaataatttcacatagtgtacatttattgaaattatatcaaaataagcaatgaaggaaaatttctctgggtaatataatttcaaggatcatttcatgagtttgcagctagaaaagcatctaggtttgataagcatgtggagaaaagagtccatgctctgctttgagcaggaaaggagatgctgtccctttggttcactttgctgggtccacc

SEQ ID NO: 40888 - DNA, 1026 bp, Bovine  19866881377883
  misc_feature (1)..(1): n is a, c, g, or t
natgagctggctctttggctctctgctctccacacagctcagagccgcctgaagtaagggcctgcccctggcaagcggggcgttttgctcaagaactgtgggggccagggggagggggatgagacactgagaccacctgctgagctagagtcccacaagaatggtcagaaacacagacacagccctcgacatcacttcacaaggacccacaccaactaaacacagaaggagacggtgtgtttacaaagacagcaaagaacaaccacggagcgtgacaactacgaccttccggaggtctacacggcggccagcgggccacacggctgggcgcagacactttcaactcccccagccttggccttgcctgctcgtggggcaatgttaaagggtattattattatttaatgctaacaataacaaccactcagagaagacaaaccaaaccaggcgaaccacgggaggaacaccaagaagagatttctaaaggcttttattttaaacacatgtctctaaaacagtcggtgaagattgccaaaaacacagcgttgagtctatttgtcttcttctgtgcacatgatttgctttggaaactgcctataaatgccctagaattcttgtctctcatcaaaaaacaactgaggaatggtacgaggagttctgaagcctaacccggttatttcatgcagtggagtgagagtgaaggaacgggaggatgggaagacacgaccgtgaattgaggggggtgggtgtcaagaaaaaggtttgagtcatcccatcgaatcgcacggaagaggcggccccttgtacggcctttggaaaaccagcccagcctctggcggccctgcaagttggttgcggagggaggagaaagtttcattctggaatgccacggggggccatggcatcatgcaaggaactccactggcattcaatccccaggggttgctgggatattctattcccttcttttggcatgggggccctggaagatctctctataaagccataggaggaaatccacactcg

SEQ ID NO: 40889 - DNA, 971 bp, Bovine  19866881384539
  misc_feature (1)..(1): n is a, c, g, or t
ngtttggctgtcctggatcttagttgccgcatgtgggatctagttccctgaccggaattgaacccaggtcccttgcactgggagtgccgagtctcaaccactgaaccactggggacgtccctgaatatacttttgaaaaagaattttggccaagagaaggtagcatggcataaagcaaagtctgcataattgggagtcagaccaatgccccaggcttgaaccctgggaatgaccttgaactagggtccccaagctagtgttcctcatctgtgtcctggttatatgcctgtctcctaggactctatgagggctatgggaggtgtagggtgtgagactccaccctcttgggtcttcccctctcctctttgttcattgaaataattaccagttacgtttacttttaaaagctgctgttgataacatttctagtccccccgacggggagataaggcgccccttgctgaagcactcacaccaaagcacggtcttaaggcagcatcagatggtgcccggcttccctgctctggcggcgaggctccttggcctcgtccccactgctcgcagcctccctgcattgtggccgcccggcccgggggccacttctgattccgagtataccatctggttgaggcagagacccctctgcacagaccctacactgaataatccagcttcccaaatgtgaccgtctcacaactgtgcggagtaccttcatgttctcttgaaagtcagcttgaaaatccaatttttccctcttagccacctgatatggattttgattattaatgtctgttgttgtcatgaattgtgtcccaggggttgtccttaaagctggggcccaagggacagtcatcgtttggactttaacaggataatcaagggccaaaagtagcccatattctggaagcccctgcttggtagcggagggtgcactggggtggggtatgtgggccccatttagactttccccg

SEQ ID NO: 40890 - DNA, 748 bp, Bovine  19866881393607
  misc_feature (1)..(1): n is a, c, g, or t
ntttgatatcagatatgtggtcataaaatgggacatctttttgaccgattgagaaaaagccatttcttcacctcttgaaaaatgtgctcctcttttctcaccacagctgggagtttcaaatgtgaataaatcgccaggaatttggcagtaatgggatattcataaatacacatgaaatttggtggggtttggagaaaaatagaattgaaagagcacattgtcaggtttaagcccagacataccttgagacgaaagatgagtttgtttcttaaggttgttcatttgctttgcaaggatggatgccagacgctcagcccaaagagacatgggtactcgcaacctcggggcggcatgttcgcggtctcaggccctgaaacagaagtcgcagggctaacattcagcaaagaagctgggctccggttgcacagttcatgtccacaggcgttgtttttgttcagtcgctaagtcgtgtgcaactctttgcgactccagcatgccaggctcctctatccttcactgtctcctagcgtttgctcagactcatgtcccttgagtcggtgatgctacctaactgtctcatcctctgccgtccccttctcctcctgccttcaatctttcccagcatcaaggtcttttccagtgagtcggctcttcacatcaggtagccaaagtattggagcttcaggttcagcatcaatccatccagtgtatatttctggggttgatttcctttaagaatgactggttt

SEQ ID NO: 40891 - DNA, 1066 bp, Bovine  19866881576929
  misc_feature (1)..(1): n is a, c, g, or t
ntttttcggactcaaagttgagttctcagagccagagttcttattatgaaagtgtgtgggggccattcttcccgagaccttgactgtgacaactttgagaggccagggaacagcttccccacttgagcaagactcaaagaatgcctccaaccttggagcagaaatggttgggccattctcagaggctcatgttctcacctgtttggggaagggtgtttgtttcctcaatctcccctcgacccaaatgaaaattgcatccagcaaccagtttcaatgtttctctgattcaaaatcaaacactttgaatatgattttttaactggatagcccagataggtgggaatcatgtggaggtaatttaagcctctctgtgtgtgcagctggtagaaaaggaacctctgcagccatgaaccggccactcccctgtggctttttattattatgtggttaggcgtctctctgagcttgcaattctctgcattcatgagaaaatgtggacttctctgaaaactgccgagacaggaaaatcgggctcttgtgtttgttttcattatctggaattgtgtattttctaaatgatgatccaaggccatttggaactgtcccctggccattcatttcacccctttgcagtcagaaaggtgtaaacatctaagcaaccagggctctctccatgagtttttcgatgggaggttaatttatttttcctttaatagagctgtattttcttctgtaagatgagtctgtgaatggtaaatcagggaattatggggggcagaggcttctgccttccaacccctcgggaaggaggaaccactttaagatggcatctcattttgtgtagaccagcgggcaccaccggggctggtcattttccctttgtgagtaggttggtccccatgaaacatgcctacaacatatagttactaaactgaacttttttccttgtaatgttgttaaagtatgagaaatcatagctttcatggtgctttactcttcctccctccaaaaggtttccagatttcttgaaggaaaggaaagtgtcagtgcttagtcgtgtccagct

SEQ ID NO: 40892 - DNA, 901 bp, Bovine  19866882162804
  misc_feature (1)..(1): n is a, c, g, or t
ncaggtctcatgcagaagttccctcttacagcagggcaccgcccaagtctgctcgaatgccttcagccgtggttgctcacccacccatcgaggtgcgtgctctggtgttggcactcttgcctgcagcacggtcatcccccccagcacggtcatcccccgccttccagcttctgtaatcagagggaggctacgccctttcctactggataactattcgtctaatgccagagctgcaagaagccttaaaaagcatgtggtcacaaggttcccagatgctggtctatatcagaggcacttggaaaactttcaaaatacagaatgctgggccccactccttaggatcctgatttctcacgtctggaatgctgactggaaatccctgtctgtaaaaatagacttggatcgtgaaggccggcagattgggaagctagtggttcagtccaaccccctcattttacatgttagaatataaagctcagagaatagtacagcttcgccctgagccattcaacccaaggaagccctggaaaaactaaagaagcattttgtataatcggaattataacaattctgctttctggtaattcagactttcaagtgtgaaaagtttctaaaagctacattatcagtaagatgtagtgtttggattaactacaggagaaggttccccccccagaaacctagagactgctgggtataggatattagatgttgttgcagtgaaactcatttcaagaccacctgcttgaaaactaaacttctggagctttgattttattttctgctggagtatcatgttttgaacttacgtccagaaaccacctgcttaatttggctgtgggaagctaccaaaatacattatgtcaggaataatactagttaaggaaaggaagtatttcca

SEQ ID NO: 40893 - DNA, 2192 bp, Bovine  19866880260049
  misc_feature (1)..(1): n is a, c, g, or t
nacggcagcccaccaggttccaccgtctctgggattctccaggcaagaacactggagtgggttcccatttccttctccaatgcatgaaagtgaaaagtgaaagtgaagtcgctcagtcatgtccgactcctagcgaccccatggactgtagcccaccaggctcctccatccatgggattttccaggcaagagtactggagtgggttgccattgccgtctccgtaaaattatgtacagtgacattcaatacatttttgttctcttcctttttctcccaccaataatttgttttgcttcctctgaatcagtgtacagcttacactgacctttcaattggaagaacttcatgctaagggtgtttgcgtcttcatttcagttggcatgtcacctgcccttaaactccaaaagtcaaaacaacgaatgtattgagctgtgattttctcgattctgaaggtccctcttcatttctgaggaggtccctgcatttacagtttcttccatcatagggactctcttcttggggagagctggtcaagggtgcccctcttggaaaggcttacaggctctcaagtttatttcacaaagagaggaggtgggggcttataactcagcttaactcagtcagatgctttccctagaatgaaaagtttgtcctgtttctctcagagtgcagtgaggactccatcctcgctaaccacggtggaaattccgtcaggtaggcatgttctgagtggaagcaagtgtctctgttcttttgcaaacactggtgtggaaacccacaaggccttggctggcatttgaaagaggctttgcgggaaaagcacccatggctgcaagggaacttctctttctggctcagacctgctaggaagcaaaacagaatactcactggctacatgaaaaatcacaagtgatttgtttttccttttattaagataaattactcttagtaaaattagtatcttaataaaattattcttattagtgcaataccaatgtgctaataattttctaaaacagtttttgagagaagtggcacagccaagtacctttgctgctgttgtccccagacagcatcgtaactgtctccagtttacagcaaacatagactcagcgaaacaggcagagctggagtcagcagaacttaattttatgtccaattctggagcttgcttattggaagaatttggaaaaagataacaatacatatattccaacaacaataaaacttagattctcggagctatggtccctgagagggaatgggaggtttactcagatggtccatgcatgtaaaactcatcacaagacccaacaacatccacacgacacaacatccctgcatctcatcttgtttaattaggaaatgcaattggaagctgaagcctggggatttattagatccatttcatactgttctcaagagatcccagggtgatccagttgcaaacagcaaaatgctttacctcttacacggcctatgatttatttgcaagaaaacaacaaaaaaatatattgatacttattctgcattatttccacaggatgttgaggtgatctgctcatgtttgttggtatgtgttttgttacctaatttttaattatctagccttaattttattacttttttgaaaggaagtgaatcattgtcatctgcttatagcaaattaagttatagccaatgtgctattagaaaccttgaataagccttgatagtttaaaaaataatacttaaagagcatagatattacaaatttggtctgaagtatttcatgatgtaccagaacaaaaagggccttttattgactttaccaacaaatttttgaagagaaagttacattttattgtatgccattgtatcttgttatgatttaagtaattagtttggtattagaagtacctgattaattcacacatctaaaccagtgagagcagtaattatgtaaatgaagcatgaataattaaaagtgaaaaatagtgagtgtctagatctaaagcttttacaagtattgtgtgcaatctagaaccagcaagctgtgcagagcagtgtctaggagggagaagttaagtagaaaaatcaaatagtagacttctcagtttaatattttttaaaactggagtagttgctttacaatattggattagtttctgctgtacagtatagtgaatcagctatatgtatacatatatcc

SEQ ID NO: 40894 - DNA, 2109 bp, Bovine  19866880455860
  misc_feature (1)..(1): n is a, c, g, or t
ntgactcagtttttcacatcaggtggccaaaatactggagtttcagcttcagtgtcagtccttccaatgaatattcaggactgatttcctttagggttgactggttggatctccttattgtccaaggaactcaagagtctctccaacaccacagttcaaaagcatcaattctttggtgctcagctttctttatggtccactctcacatccatacatgacgactggaaaaatcatagctttgactagacagacctttgttggtaaagtaatatctctgctttttaatgtgctgcctaagtgattcatagcgtttcttccaaggaccaaacgtcttttaatttcatggctgcagtcaccatctgcagtgattttagagcccgagaaaacagtctgtcactgtttcccttgataccccatctatttgccacgaagtgatgggactggatgccatgatcttagttttttgaatgctgaattttaagccagctttttcactctcctctttcactttcatcaagcagttctttagttcctcttaaaacttatctatttatttatttgtggctgtgctgggtctttgtggctgcaagggctttttctctagatgtggcaagcagggcctgctctctgcttgctgtgtgtggccttctcattgcactagcttccctggttgtggaacacagctctagggcatgcatgcaggcttcggtagttgtggtgtgtgggctcagtaattgcaactcccaggctctaaagcacagggtcagtagttatggcacatgggctcggttgctccccgccctcctttcccccggactctgcatgtgggatcttcaggatccagggatcaaacccatgcctcctgcattggcaggctaattgtttgccattgagccatcagagaagcctttaccaaaattttttaaaattgaaatatagttgatttacaatattgtattagtttcaggtgtacagcacagtgatttagttatatatatatatatatatatatatatatatatattccttttcagagtattttcccttatagattattacaaaatatagttccctgtgctgtagagtaggtccttgtcgctacctattttatacatagtagtacactactcacccggtcttttaccagaatttgctaggcacttactatgtgccgagtaactgataccaaagtgaatgaaaccaaatcccttctgctacaatgctcacagtcttggatgaggcacgaacagtcatgacggacaactagaagcaggtaacaaagtatcaactcctccacggttcactaagcgaatatctaaaatgattcgttttcatcttcctgagaagaaggcaggtttttacagtgatttacttctggaaaaaagtgtctgtcctccaacaatgaaaaatttctactgtacagcattatttcaattgtgtctctgcaggaaggaacaagtccagaattaccaagacgttggttgtaatcaatgacctctcccaagataccttgaactttcctttgttgatgggaccttctcaaagtgagctgggagtcagactcttctggctggcccccatttcaaacatcacttaatcgcatgatgcgacagcttgttatcagatgaccctgtgctcatatacaaacacagccactatcaggcacagacagaccagaatctggcaaaaccttgatgaaacagaaataaacacaatgtgtagtgcatattaataaactcaggcattctggcacacatgagcattacagacaccctgcaaaggaaagtgccgtgaggctctgcttccggacgtgaatctgaccatcagtatcaacaaagacagataaaggaaagaggtgaatcttttgaaaccttgtatcatttcgatcttagaaataacaaatcttctcctgagaaccagtagtttctgcaatatgtcattttctccaaaggaggggccaaaagtatagcaaagttcttgccctcctgcctgagattttactcatttaaaggtaatcaaatggacttccccagtggtccagtggttaagactctgcatttccaatgcaggggttacatgttcgatcccggttggggagctaagagacca

SEQ ID NO: 40895 - DNA, 1172 bp, Bovine  19866880555450
  misc_feature (1)..(1): n is a, c, g, or t
ncttacatcagaaaaataatagattaaaatgtatccttcttcctcaaaaaaaaaaaagacacaggaacatttatttttctttgctcctcaaatttgtcttttagtagttgagagcagatgaaatcttttatcactatatttagacgtcaaccaggcaggtcggtgctatggcaaccactgcacaaagagatgttagcaggacagacactggcaggctgggagaggtgcttacttagtgcatcacaagtggattaaagatatggcctggccacagtaacatgcccggctgctcctgggcccctacaactgggttggcgggccacccaaacaccactgtcgcctggtaccactgaagcccaagaaacagctgaaatgtggatgcaaatgaacctctgggttctagttctcccacctggattcaggctcctctgatccccagtaatgctgccttggccttaataaatcctattcactttgagtctcaggattatcctagatgctcacagtataataagatatggatataataagttcatgctcccacatctgattccatgggatttccacacactgatctgatggaggaagtcatccagtcaaataattgggagcttgccttttgcccgacactgtttcaggcactagagatagaaaagggaaaaaagacagcagggtaccatcttcccagcttcagttcactgggatcgagagacagatgatagaatacaagggtaaacaatgatagtaaacagatagggcatgcatccatacttgcttagctgtgtccaaatcttttgtgatcctttggactatgacccaccaggctcctcagtccatgggattctccatgcaagcatacctgggagtgggttgccatgccttcctcctggggattatcctgacccagggatagaacccatgtcctctgcattggcaggcggattctttacccactgagccgttgcaaaatgctatgtatgcaagcgatgaaaactacccctgggggcagtgttcacatggctgggctggagggaagactgacatgtcaagagctgagacttgagtgatggggggacaggccatccagctggcagaggacagctttccagacaggacagctgggcacagtcccccttccaggaatggacataggtccaatgtggcagaagagg

SEQ ID NO: 40896 - DNA, 1725 bp, Bovine  19866880593056
  misc_feature (1)..(1): n is a, c, g, or t
ncaccataattcttatacccatgaaatgttgcttccatgtccaatatatgtacagaactcacatgattactgatcgcaaggggaagaaaagttgggttaaaatggaaaagaatcattctgggaatcccctagaggcaagaggtggtctgaagacaccattaggtcttttctaagatgaagatgaagggagagagcatagttagaatatcagtgatggatcttatttagaagggcaagcatgcctttggggaatcagactaaatgggcagtcggaagagatgatggggccactcggtagctcagaccccaggtggtcacctcctgtcctgggttacatgtgacagcacctgctgatggccccactggtgtacatcttcatttggtttcctccttctgggtcttagttttctgcctgtatgatatgattggtcaaaaataatatgggtggggggaggtgggagggaggctcatcagggagggcatataccatacacatattgctgatttgctttgctgtacagcagaaattaacacagcattgtaaaacaattatattacaataaaaataatatctaaggttcttttcatgtttaaaactctgtcactttaagtaacttaaatgtgcattaatttttttttaaacccccatccttgaaaagtagaggaggacaaaaaagaagcaaatgtagaaaaaagtatgggaagcctattgagaatctatattttttgctgtcccccttgactccccactcctgcagcacaagaaagtacaatatagctcccattttcagcaaagttccattaaacatatactgagcctcaaaaacagtgtttggaagtctccaggtccatatgtggaagtctactttctgcagatattaaacaaaaatctttaaaaattaacctttatgttctttcgaaatatagatcctgctcttattatgggcttcccagatgatgctagtggtaaagaatccacctgccaatgtaggagacgcaagagaagcaggttcgatcccagggtcgggaagatcccctggaggaggaaatgacaacccactccagtgttcttgccagaaaaatcccatggacagaggagcctagtgtgctacagtccatggggttgcaaagagtcagacatgactgaatatacaccctcttataaactcttttctgcttatccggcctcagagtatatgcaccagaacatgtgttctcaggtcatcactgtggtgttgtataagtgggtcaaaggggatctgcaaggtgctttccacagttgacggtattcacatccgaaacccaggaactggtattacttagcacatagagaatcttaagcttaattgtataatgcaacttattttgtggcatttccaatttttccaatgaaattaaaccattttcattaaagcccattatctaagtatttgaagctgacgttcaaagtgttccatatcaccgattctaagagatgtgccatatagacttgggaagccagaattccttctgtgcttcatgtggtgaggtccacacagctggagggctaccattagcaaataagaacagtgcttcagaggcttaaaaagaaatatccattatatcaacgagaaggctgttgtcagaactagatttgcttttaaattaaaagcttgtcccgggttacactgtcagtgatttaatatgctggaaattgaattaaactttatacaaagagactgtatc

SEQ ID NO: 40897 - DNA, 1807 bp, Bovine  19866880818937
  misc_feature (1)..(1): n is a, c, g, or t
ngaggagaaggggacgacagagatgagatggctggatggcatcaccaactcgatggacataggtttgggtagactccgggagttggtggacagggaggcctggtgtgctgcgattcacggggtcacagagagtcagacatgactgagcgactgaactgaactgaactgaagtttccagaattttaacaaaacatctccaatagtcttagctctgacatatgatatatacactcataattatatcttttaagatcttttgagttcagatgtttattttccaaaattaaaattatgtaataatttacataaacataaaaattggaatcagataatttaaaggaatttcaagtcacctgatacaatgtcttcacttattaagtattcctaattaaagtaactgggagaaggcaatggcacccccagtccagtactcttgcctggaaaatcccgtggatggaggagcctggtaggcagcagtccatgaggtcgctaagagtcgaacacgatgagcgacttccctttcacttttcactttcatgcattggagaaggaaatggcaacccactccagtgttcttgcctggagaatcccagggacgggggagcctggtgggctgccgtctatggggtcccacagagttggacacaactgaagtgacttagcagcagcagcaattaaagtaactaagttccacagatgttaagtaaattttgtaccacccagcaacaaataaaaacagtgctagactatacacagttcctggtgaacataactgagataaactaagtatatttaaagtagtatgatattcagtctaattttgccaggtttccttggagtaaacatcaagaattgattaacaagaaaactaaagtaataaaaaatcagggaaacacactcaaccttatatcaaaaaagagaaaatgaggcagtaaaattcagaactgtgaactttagtaatattatactctagagtgtgaattactctcacccatatttgaaccaaagtatatttcctatcttgatcattcaaataacaatcaaatttagatttaaattttacttatctggtacaatacatatatgttaaatgaatgtctattttttaaaatctactttaaaacaagaaattctacttaagtttcccaacagtaaaaaggcatgttaggctaccaaatcatcttggtagacaatcagttaggaaataaaaatgctggtttaaagaactgaaagatggacaggctgtctttaacaatggcagaagcaactaaatggtaattacaaactacagagctgggaaaaccctagctgttttctgtagagtaactgtatgttagcgcttgtttgaataaagtgaaagaaagctcttcagcttttgctgccttagaaatgcagcaaagagttcaaggagatcaatactcgctaaatgtacaaggaccaaatcaatagggaaagaaattgccttttccaacaactacgatgtgaaaagatgaaaggtataggaacagaaataaaactgaaaataatgaaatatgaagtctgtttaccatatgtttttgcacctctttaaatcactaaaaccttaaccttggaagggagtgttgtaaaaaccatagtagaatctaaagatcatgaactggattcatcttttagtttataacttcaatcaatcaacaccctacaagtcactgagttctactggacctccagggtcagagggaggagtagatggaaatcatagaaagacgtctcggtcctcttctagtctataatctagatgaagcaggaaggccaacacaccaaagag

SEQ ID NO: 40898 - DNA, 1204 bp, Bovine  19866880832635
  misc_feature (1)..(1): n is a, c, g, or t
nttttggtgacacttccgcaaggtatacaaaaatttaatcactacgttgtacatctaaatataattttgtatgccagttaaacttcaatttaagtttaaaaataaaatgtacttttatcataaaaaaagaaaatttggcagttgaaatgtggatatcattcaaaaagtcttcaagttttgtgactgacaaagaagatcaagttaaatggtccctaggatccgccaccccctggagggtcaggtgtgtcagcccaggtgccacttagcactgcaattcctgcatatgcctgacagagtcagtgtgaaatatcaccagactccaggtttcaagtccaccaaaagataagtcaacaaacaaatacataaatacaaggaggagaagaagataaagaaggatgcaggggaagaagagagaagataaaaatacaaagaaaaaagtcatacaaacttgtcctgaaatcaaaatgacacactggcatccatttagctgatggctgataatttgtaggtccacatagacatccaacctgtaaacactgaaaaggcccaagataaacattcctgctctactgcacactcacggtctcgtgccagcccagccagctgagtcttggctccctctgctgcttcctcccactccagcccccactcgtgtttctgcacagacccccatgccagcagagccacctaccagccatctgccaggctgccttcctgccctcattcatctgaaaaagtatcttcaatcccactccatcaggaagactaccccaatttgtgggcaggattttaagaatcggtctcaggaatataaagacaagaatgttttatactttatatgaagagctttaatttcaaactctcacaatctgtacaatagcattataaggtattattgtacctatttttacaaaggaggaaattaaaacttagaaacattatttgtccacattgcctagatagtagagatcaaagttggaactcaaatacaggccttctaatttttgctggtttaaattgttttgaggctttctaggtagctcagtgggaaagaatctgcctgccaaggcaggagatgcaagttcgatcccttggtcgggaagataccctggagaaggaaatggcaacccactccagtattcttgcctggaagatcccaggacaagagagcctggagggctatagtcccatggggtcgtaagag

SEQ ID NO: 40899 - DNA, 1530 bp, Bovine  19866880849393
  misc_feature (1)..(1): n is a, c, g, or t
nacactggaatgggttgccatttccttctccaatgcatgaaagtgaaaagtgaaagtgaagtcgctcagtcgtgtccgactcttagcgaccccatggactgcagcttaccaggctcctccgtccatgggattttccaggcaagagtactggagtgggctgcctttgccttctctggagccacaggtctagcggtgctttattcttcaagccacagtgatggtgtcatttcccacaggtatgagtaaatggtagattgaactgtgcttgactttataaaaagctctttctatagttaccttttaactttcaacatcaaatgcagaatcaaactcattgtaaacatagagaaaaaataataattttatctcctttctgctctctcttttttctttccctcagatggcttccatttatgtctcagggcataatccatgcagagattgacttggtcttcaaggtgaggatcaatgacagctgcagtagaagaaagtacaagctgactttggtacaacggacatcaaggacactcccaggtgtccccagagcattcccttccacagcttatgtttcacatcaaattatacacagaagagtgtgtaaggtgtgtctgggcaatgcacaggcactcctgtgagttaacaatcaacccaaggatttgcttccatttaagagttaaagtcacacttttttttcctatcacttataatgtcattaaacagatctattattaactgcacttcacttttatttttgcagaaatacaaataaatcatcaacctgaaatacaagaagcaaatggcaaatgctgttgccacctttttgtctatttaatcatctggaaataatttatttctgttccaagattacctacctcaaacaatttttagtatattctgagtttaaactattgactaaaaaacacttaaaatgattgtagaaacaggtattaagtcatggtctgatttataaactaacaaaagccacattagccacagatgctttttcccttcaataatttaaatatatgggaaaataattatttttcaaagggttaatttctattaattatactcttttttttaccactaactttgcatactgatttctcagttttatttttaagtcttttgagtttagctttttctattagatcttcttcaaatcaacctgtgattgttattaacatgtttacattttaaaggtgatccaagtggggtcggtaaatacatattccttaatatgcatgtcaagtcatcaaacctctatgttttcaaaagtgtttgtactgtgtatgataatttgaaactaggcagggtttaatgctgacattgttgtattcatgaaatcctatattgaccaggatggccactgagatgaagacatgacattcaagctgataattatctttattaatattagaaacttcattttggcttatattttactttttgttttttagttatttacagaggaaaggctttatgtgtattaatataaacagaattttactaatgtactgaaatctttta

SEQ ID NO: 40900 - DNA, 938 bp, Bovine  19866880987662
  misc_feature (1)..(1): n is a, c, g, or t
naaaattgtgtttttgttggagatggcaagaggacgtgatattgatggcatcatattgatgacatctgaaagacaagcaccccttatgtaaactaggggaagagaaaaaatttgaaaaaaagaaacctacttttgtgagtgtgagggatgctcatgtatttaaatgcagcatgcacaaatgtacattactttatgcctggaattacgaggctgatactgaatactcctgacattcccatctaattgaagcctgtgtgaccctgagtgtattcatcacaaagggctttccagacaattagctaatagctcctgtggggcagacccagaacccaaagggtgtgattatcattaagctcttcagacctgaacatgctgtgtagagagacccccactctgtgtttgtcacaagaaaaggactgacatctttaacagctcaagtgaacagaaatgccaaattgacatgccagctgtgaaaaccttcagggttgaattattattattactgcagcagctctttttgtaacgtggctttgaatcatcctccagctttagcagagggtcccgtgccagcagttaattacaaagttcagccccaagactactcccgctactgagatcgccagccggtgaacgcagtcttgaaaatcactttcaaatttgccaactggcctgacatgagcatccttctctagaggatgaaggtgaaattggcaggtgggcttgcagatgaatgtctgctatttatatcatcacgctacctgtttcaacgcttaacaactgataaagaggttttcttcctagtctcacaaagaaaaacaacaagatactcttagatacaggcttgtcaaccttccaaggtgagttttcatccttgctctttttttttctttaccgccaagacaaagggatcaggatctaatctgcttacaatggtgata

SEQ ID NO: 40901 - DNA, 1151 bp, Bovine  19866881038884
  misc_feature (1)..(1): n is a, c, g, or t
ntttcctttcttcattgtaggaaaactgcccaatcttttctcttgaacctcagtttcagatactaaggtcacactccctatcacagacttcttctgcctcactctccttggtccaggtgtagggggcctgtagaaacgatgcttcactcgatcctgagttccctgggtggcatctgtgtccagagcagggttctcccagctggtagaactaccagtttcaacatcttgatctttcacttgagtgttcgcctcctccgctagactgtccacctgactaccacctttctccagaggtgagacgtctgcggacaatgaacacgcagtaatctttacaccagatgatcgatcatccgttctccctgggagactgtttatttcacttttttcaccattattggacagatcagctctacagagagtggttgtccattttatggtttcctcctcttttatcttgaatcgaattttcatctcaactgtcatagtaccatcctgattaaaaataattgatttctcaacatcatcttcagaaggatatatcaataaattctgagaatcatttttttctaatgccaagtaattttcagaagcaaaagaatgatctgagtaggaatcattattctgcattttctcagaagaaagagaataaatctgagacgttgggcttgaagatacatgtgtgctcactttcaagattttaaaagtaaaacacaacgtggaagacagagaagtcataaatatccaatagaggacgcagcaaagaaagaaaagaagaaaatgaacgattagtatgaaaaataccctattttctaaatgtcatagtatgttgttaagtttctcacctctatgtattcatttggtcactttaattcatggtaatatctggtacatttctacaacatactcttttaaaaagaacttaaattctactttagagaggaaattcacagaattgtacttaagtcttaatgagtttaataaggtaattttaatacagaaagtataaagtagaaactgctaaggattctagcaaaaataaagaggtttctgtgaggtttggttttgctgtattattctgtttcacagtactggacttggggtgtaatccagtgctgcttacctatccatacaagcaaggggatagatttttt

SEQ ID NO: 40902 - DNA, 2785 bp, Bovine  19866881141513
  misc_feature (1)..(1): n is a, c, g, or t
naaattcgcctacattctcccattttcccctcaatctcagcttctttttcagtccaatctattatcggtccagataatttttcaagccagacattgtcttctcaatatacttgtaaattttactttgcaaaccagaaatgtaggtgtcaattctagatacacaaagatatcaaatatgaatatgctgctggctgaggtgggtcttcataggcaatctgattggatttcggtgtgtacttctagagcctgagagacaataaaaaaggaaaagacagtctcgcacagacaaaaagcactgcattactattattaaactttctttaaatactgaatgcaagtctagtaattactaatcaaacactgttattttcaagcagttataccttggccaagcacttgttccttagagagctgaaatggaatggagagggaaatattaactatctcactcactgacacaaactcagacaagtgcatttattcattctgtcttcatccgtctgctcctttgttctttcaaacgatgccctttggcacctattgtgcaccaaacaccgaggagagcggggaggtgtctctgaaaaagacaccatcgtcttgccatggacctcacagtttatgggaggatggaaccgcacaggcggctgtgacatgtgatacacttacatgagaggtacttacgatgaactgtgcaagtccagaagaaaaaacatttagttgtctggtagctaaggtttcctggctaaagaggagtttgctgagcaggaaaaaggaaagagggacagagcacagagcgggtatggacagagggctcagcctcagtgctgtgaagacacagggtctgctgatgaaaatagagatggtcgggtaggcatgggctgggggccctggtaggggtggggggatttcagttgaggaatgggagaattagggaggatcccacatgccttgctaaatatgactgatatcttcacaaagtgcaccccataactgctggatgctacagttctattttatctatgtagtctggaatagctaaatctaaccctctattaacaacttcctccctcccacttcctccttcagcaactcatacagtatacgaaaacataccagcatcactctgcaataaatctgctgtgtttaacttataagcacagatttgcatgtaaactgaaccaaaacaagaagggaaggaaatggcagaaaaacgtggcttgcagttccacttacccaaagtgcttgaaaagcgtagcttgcagttccagttacccacagttgcaaaatgtgctttatgataaaactactgttctgattaattttaagactcaggtatatcaatcaatgataattagcaagtaacccatgagtgtttcgatcatcttagagctgtacagcataactgaggtcatattgaaaagacggaggctttatgggggcaatccaggaatataaagccagaaggggaatggtcagtgctagggctaaatctccaagttcatggggcagggtctgactggtacaccatgatgtacagttggaaggcaagcatttccttgacagatagcagatcaatgtggtttccccttgtgtgggattattgccaataaatagccaccatgggttttgataagcaagcctccttggacccagcaccgcatgctgttatacaaggtgcttatgaattgccccatcagacagccctgcttctgcagcaggttgcatagaaccaggctcaaatgtaacagccaactctttcctagttccagggtgctggcttctgccccacagtggcctcagctaagctataaatactccaaaaggcagagcctgtggcagcttctgaaatgctcttttcagctggtgaccaagaggagaatgatcatcctgttaactatcaaaaccgatccccacgtcgccgagagaaaccctgagcaacattacgtaatgtctaaatttaaactctgtctccattccaaaggctccccatcgccccctccagacccacttcttttcttcctttctcccttctcactcttggtgtgtatgaagctggtcaaatgcatcatctctgtgaccctgtcctggtctctggcctccctgtctttccccctgcttcacatgctcagggcagctctttatgacaggactacaatttccttcctcactggcccttaatctaaggagttcaattgaaaatgagaactagctgactgaagtaagcaaaggagacaaattagtgagacaattcagtggacaattaagaatattcagatgggtcagcatgacatcacagaaacttggatggtgtagacacagccagcaaacacaaggaaaatggctgtctgaggaggccttataaatagctgtgaaaagaagagaagtgaaaagcagaggagaaaaggaaagatataagcatctgaacgcagagttccaaagaatagcaagaagagataagaaagccttcctcagcgatcaatgcaaagaaatagaggaaaacaacagaatgggaaagactagagatctcttcaacaaaattagagataccaagggaacatttcatgtaaagatgggttcaataaaggacagaaatggtatggacctaacagacgtagaagatattaagaaggggtagcaagaatacacaggagacctgtacaaaaaagattcttcacgacccagataattatgagtggtagtgatcattcacctaaagccagacatcctggaagtgtgaagtcaagtggggcttaggaagcatcactagaacaaagctagtggaggt

SEQ ID NO: 40903 - DNA, 3271 bp, Bovine  19866881172341
  misc_feature (1)..(1): n is a, c, g, or t
naggaaagggaagaatttatgacacaaacctgaagctgtaggaatgagcagttcagtagacaaatgggaaagtttgggagaaatcagcaaagcaattaagaccccaggggattgatttgtgggaagatcagtcctttgatgtctagcctggctaatcaatgattcttttttgccttttttttgatgtggactaagggacaagagaagagtaagagattaagattaataacctagaaatacctggaatacataattttacaggacagacaggaactccttttggattgtccaacataatttagtaaacctaagaagttaattcaaaagtattgtgtcacaattttttaaatcccccagtcagctcttcttatactgaatatacattcactgactctttgttagtttaaaatagaaaaaaaaattacaatttaaattcttactagaaggatgtttgaaatatgaaaacaattgcctttaagaaacaatgaagactcaccacaggagatatttaaaactacatcaacactaacttgaatcagatagagatgaaaggactgaatttgtctcttccatttctggtatataaaaatttttgtgggaaacgtgttttaaatttttcttaacatattctcctattaaacccctctaattagtataagattaaggtttgggggctgtgattctgacaacagaaaaactacttagctcttacttggctttttaaaaaatgaaaaggctgaagttagagaccagagctcaggaactgccttgtagggtcagtaccagcatctcgggaccaggctagtacctgcttccactgccgcccatctggtcatcccctcactccttggactcttctccacatgcctctcgcaggcagaggagccttctataagtatgcattggatcatgtcaccttctccctctgaggcttcccattgtactgggatcaagaccaagccttgaccgcacacctttgaggaccaagcagaccacgatttccctctgcatccctcacttcctttctgaaggcgccctctcccctgcctgatggctcttcccccagatctggaccaagtccacccttcctgtgcccctaccctgcaccccaacccgtctcactcagcagaggtgcccagaccgagcagctacatcgcatggcagcgtacaccctcccttccggatttctgtggagtatttattgctctcctgagtcatattatttatccatgtatgcatttattatttgtcttctccagtgttagttcatcccatggaggagcaaccttgctctctgaagcagcacccccagcatagggcagcatcagacttgtatttgctgaaaggaaggagaggggaaggaaggcagggagggagggaggaaaaagaaagaagaaagggaaggggatttccccggtggtccagtggctgactccttgttctcaatgccaggggccagggtttgatccctggccagggaactagatcccacatgcttcaacaaagagcctgcatagccaaataaataaataaacaaatattttaaaaagagaagaaaaaaggaagggaggaggagtcactcactgtgtggtcacaaggggctctggagagaagcataaatattactatgagtctctgaaaagcagagggtaccgtctttttgtgagcaacgtatatatgcctggtgtctagcacataactcaaagatacttgagagtagaaatttaatagtgggttgacaaccccgttgaggatggtcttacacaggtcaaagtgcagtaacagctctgcagcctggtcctgctctagggtctctgcaagatcagtgctggactaatccttgcagcaacccaaggagaggcaccctgggtgagccctgtttacagctgtggatgcaaaagggccatccacaaaggtagtgtgtgtcccagggcataagagcatgagtacagggccgggtctgaggaaacggcctggctccaggatccatgcacataattgggagcatctcatcactcaatgcggtgtgatctcatcatcatcaggacacgaggctcacagatggggtggtggggagagaatagcccagaaagcaggtgaggagcaggtgggggtgggggagccatgaggcaggtgtggagaggcacaggtggagagatcttcagggtagatggtccgggggagtggtaaagaacccgcctgccaatgcaggagatgcaggagatccctgagtccggaagatcccctggaggaggaaatggcaacccactccggtattctttttttttttcactccaatattcttgcctggagaatccgatggacagagaagcctggcaggcttcagtccatggagtcgaaaagggtcagacacaactgtagcgacttagccagcacagcatatttctaggcaaaataacaggtttttaagaggttgtctgggttgtaacctatagggatgcatcttgaaggctctgttggaggaattcacacatgggagaatgtgttggttccaagggccagcctggcccttgggtgttccctccatgaggagactccgtttctgaaactgagtcaagtcctggctcagactgcgcggaggcagcgaggcctggaatagacctgccttcactcaggcacccggcagggcccctccggcaacctgggcagagtgggcggctgcctcgccactccttggggctcccagagatttccagatgccttatctgggccctggagtcagccctggggcctgactcaccccttctcttgccagcagatcctggtggcccacaatgtgaggaagtcagcagaacacaatcaattggggaggccttttgtgtggccgtgagcttcacttttcctgactgtaaatagcgcctccgcagtggcagcgccatggcaggctcacttctattttcagttctgcaggctgagcttctgtaggttttggttaaaccaaatatccagggatgtttcctttcattaatactgtgacttcatctacaaagtgatgacagcacccactcctttcaggaattgtgaaaagctgccttccactcttatacatcgacacatggccatccaaacattttcatcttaaatttaaatagttgcaaagaataactacaatatatagtgaagctatatgtaaccttgttctatgtattttctgaatctcctgtcagcgtgttaccatacttccataatttaaaacagaaaaagaaaataaataataaataaataaataaaacagaaaaagaaaaaaata

SEQ ID NO: 40904 - DNA, 939 bp, Bovine  19866881276537
  misc_feature (1)..(1): n is a, c, g, or t
naaccgcccattgaaaatgtgatcaatgaccatggaacatgcagtcttgggggaggatccaacaggtaagttagtgccaggtgagccctagaatgaggaagtcaggcatctggcctgagctaccttctccagctcgggcccaacttagtgggccttagcagtgatcaactcatcatgctgaaggcttctcatactggcatcgagagcttactaattaatctctttaaaatttcaggtttcaaagaatgaagcaaaggccatcagagatcaaaggaaaagagaatacaccatggattcagctagagatgatcatgctaagtgaaattaagtcagaaggagaaagacaaatatatgatatcacttatatgtggaatctaacatatgacacagatgagcctagctaggaaacagaaacagattcacagacatggaaaacagactcgtggcttccagggagcggggggtgtggtggagagtaggggaggctggactgggagtatgggggtggtagaggcaaactattacgtatcggatggataaacaaggtcctgcctgtttaacacagggaactacattcaatatcctgggataaaccacaatggaaaagaatgtcaaaagaatgcataaatgggtatagctgaatcactttgttgtacagtaaaacttaacacaacactgtaaatcaactaaacttgaaagaaagaaagagaaaatacaaagttaagttattatttcctgtccaggcaaggaaacacacagcaataaggaaatccagagtacttctctcagggggcaagtcaggggctgaaggtggtggatctaggtgtggtgattatgttaactaaggaatgaaggctagcactctgggaagggcagagtccagagtaaaagaagggtgaaaacaagccgtattggtcaagaaccagtgttcagtgaggg

SEQ ID NO: 40905 - DNA, 725 bp, Bovine  19866881420046
  misc_feature (1)..(1): n is a, c, g, or t
ngttaaaatcaggaaacggatccaacatagagtcagattttctgttccctgttacataatctcaatgatatttcttaaaaaagagtggcctagagtgctattctgttggggacagaaagcatttttctgggacctgcatatccacaatcactcaatgtcgtggtcctggagtgactgtcaggctctttcccaggtgggtgcttgggtgggtaggacaggggcggtactgcatactttttgaagatttgtttagttatgagggcagaactctgatctgttccaggcagctgtgggctgaataaggattctaacacccccttctccccccatctccgtttggtactccattagtttgtatacatcattggtgcccaacagatggttggtgagtatctctttcaaaccgtggaggttgttaaattaattcaatctgtcataaactcagtgtatggaaagaacagaacttcatgttgctcatgtcaggaccacaactctttgattttttccctaggttcccagtctgcaggctgtgatcctgagctctggagctgtggtggcagcaggaagggaaccgtttaaaccaggaaattatgacatccaaaagtacttgcttcctgctagattaccaggcatctctcgtcgtgtgtaccccaagggaaatgctaggtcagaaagcagaaaaagtaagtcacttaaatatatagcccttatttttagccctaagt

SEQ ID NO: 40906 - DNA, 1562 bp, Bovine  19866881662064
  misc_feature (1)..(1): n is a, c, g, or t
nggatctccccacccgggatggaacccggtctcctgcattgcaggcagtttctttactgtcggagccccagggaagaccctagaattggaatcgaactgtaaatgtttttgtatcttatttttatttaccatttcatgatgagtgttttcttatatcattaaatagttctcaaaaccatgattttaatgccatattaatatttatgagtgaatatttatataactctcacattgtcactaatgttactgtcaaaatagaatgaagaatcttgtgagtaattttttgtgtgtgtgtatctctttctttaaattcccagaagcataattgctgggtcaaaatatgaaggtttgtaagcctcctgatagtgtttcccaggtggctcagatggtaaagaatctgcctgcaatccaggagatgtgggttcaattcctgggtcaggaagatcccctggagaaagaaatggctgcccactccaatagtcttgcctaggaaatcccatggatagaggagcctggtgggctacagtccatggggtcacagagtcagacaagactgagtgactgagcgcgcgcacacacacacacacacacacacacacacacttcctgattggatgccaccttgcccatcttctaacccgtgtcttcttacaacaaaaaaatctacttaaatgaaaataattcccactctagcaacaaggaaaaaaaagtagttttgaattaaccttagctagaaaattgcctagttaagggaatattaacagaataaggtgctttcaacatgaactatatttatgaaagaggaccttagatgtcagattttccagaggttaatgagtagtaagtttgatagtttaaactctgcttaaagctagatgacagatacagtataattttagagggatctccagagagttttaaggcctgattcaaaatctggtaatatgttcattatgtaccatttatcttcccttcatagaaaaatggcaggttttatatagaccctgtattgaggaaaaaatgaagaaaatattacataggctgtgtattaaatttagcattaaagttttcctgattttttttctatttaacatactagcttttactcttttgaaaaactcttcaaaaaatgtgttattgaatagatctatataagatgcatcaatgtaattactggggacatcccaggcagtcccgaggttaagacaccatgcttccaatacaaggggtatgggtttgatccctgcactgggaagatcccctggagaaggaaatggacacccactccagtattcctgcctgggaaatcccatggacagaggagcctggtgggctacagcccacaggatcgcaaagagtcagatacacctgagtgattaatacacacaggggaactaagatcccacatgccatgtgacatggccaaaacaattaaaacagaattgggtctttaaataaaaatacaaacaacaataataatgtaattattgaacatttgaatggttttcaatttttcattactgggttaagagtcagggaattcatgtatatattctttccat

SEQ ID NO: 40907 - DNA, 952 bp, Bovine  19866881712262
  misc_feature (1)..(1): n is a, c, g, or t
ntgtaaaaaaaaaaaaaaaagcttgcttagttatactaatcctaaaacaaaaactaaactaatttcaatttaattaatattaaatctaggattaaggcaagttactccaggaatttttaaatattaaaaaaatagagtgctttgaaaaaaaatgtctattagatgatattaattccagagtcatttatcatcttctgagcagctagagatataccagacagagctccccttaatggccactcaatccatctgtctccattaaaagaaagaggaagtgttttatttatagaagactaaaagtatccatggctgctttcttctgtgctttaaaatggtgaagaaatagaagttgcttcccaaactcttcagcacaaggcagactttattgatcggtcctaagttaaggcttcccaggtgggcgcagttggtaaagaatccgattgcaatgcagagacacaagagacaagggttcgatccctggattgggaagatcccctggaggaggaaatggcaactcactccagtattcttacctgggaaatcccatggacagaggagtctggcaggctacaatccatggggtcacaaagaataggacaggcctgagcacaagcatgcaggtaagtcaaagatatcaaagcctagaaggcagtgaccccagatcaccacctgatgggaccagcctctcagggaaagtcacatgtacttaagtttgaaggactccttgactctgtgacacagggtgtccaacatacagcaacttccttagaataccagggctgaattaggattaaaaaaaaaaaaaaaaaagcttttttgaaatatttatagatcggtaggaaattgccaagatatctcagagaacatctctgtaccttcacccactcccatcctccaccactgttacctctcgggtgaagtatggtatcagaaccagtaagctgacgttgat

SEQ ID NO: 40908 - DNA, 1622 bp, Bovine  19866881715329
  misc_feature (1)..(1): n is a, c, g, or t
ntgaacctcaagcccaggctcacttaaggcatcactgtgctcacttcctgcagatcaatacacagatcaccatttcagacacttagatggtgttcaaccaaagtttgtcggattaatgaaataatcaattttgacaattcacaccactttttgtccttgtgatatgatcctggtcagtaagagagatgcctgtcttttgagtgtaggtaaaggagcaggctgggcttcccaggtggctcagtgataaagaatctgcctgccaatgcaggggacctgggttggaacttggaagttactctcccttctgaaaagttatgatccccaaggacagtctctgaaattaaagagcaaacttgccacccttacaacttggtcatatttgagtggattttaaggtgaaaacacattttgcatgttattgaccgataatgaatatggacacactgatcaatcaggcagatgtggtagaggaatgaatccacacagtcgctgatggaaagtattctttattagtaatggaaaacagatagactaagcagggcctatttacacatgaaaatcaaatccagtatcgaagagaattaatatgacacacagttaatgaaagacattaattaaacagagcacataacaggtcacaacaaagaggtttagtataatgaacactgatattaagtaaccagattatactccagcgactggagttaaaatccattcccggccctactgtagtagcacaaagggaaattatacgaagagttattatcatgtcatgatttgtctacacagatcctctcagttgttgttctgtcgctaagttgtgtctgactctttgtgaccccatggactgcagctcgcttccctgtccttcactatcttcctgagcttgctcaaattcatgtccattgagtcggtgatgccatccaaccatctcatactatgtccccccttctcctcctgccctcaatctttcccagcatcagggtcttttccaataagtcagctcttcgcatcaggtggccagagtactggagcttcagcttcagcatcagttcttccaatgaatattcaggattgatttcctttaggattgactggttggatctccttgcagtaaagggactctccagagtcttctcagtcctcttagaaagcacttgaattattaggacacagagaaagatcaatttccaggaataccctgtggttttctgttggggagaaagcttacagcctatgggagattgtcagtcagtaatcagtcctgagtctgatttttaagaactaaagttttcatcttaaatttggaattagtgttatcacagcatatagactttatattaggcaaatgatggttgtgaaaacaggatgggtcgggacaaacatttggtctctagggaaaaatcaagagcgcttaggcaagagctgggtctacatctgatatttgaaagttcaggtttatttttctagttaatttctccaacctctacacttttatttctgatcgcagcaagaggcagatgccaaatcttctgagagaggctgttcacagggtatttctagcctatctgaaaataggaagtgctagaaatttcataggaaagtcagttcttgttagcttt

SEQ ID NO: 40909 - DNA, 1681 bp, Bovine  19866880341638
  misc_feature (1)..(1): n is a, c, g, or t
nagtcttttaaatctattctgatttatttactgtgttgggttgaagaaagctaggttgagttgaaaatattcaaatagctatttagtcctatgttagcagacctgttgcattaaaagctttctaagaaacatctttaaaaaccactctatttagatgcatatccttaaaattgtacattatttttttgtctaaaaatgcatctacttttatcaccaaacactgttttatgaaaaaataactttattcctcttatttttttaagttggttcttttttttctggagacttaactagtatttttataatttcatgagaaagtttcttctgaaaccacacggctgaatgactttggaatcaatggggaacagataactttgtaaaataccaagattcttatttcatgcagataattggaataatgagactgaaaatgatagaaaaccttgggtacaaaacttttggtgatcatgtgatggcattggctactgtttaagagaattaaacttttatatttggcataatactatctgtaacccttgatctcttgaaatagtgttatggtttagcttaacactagtggtgtttggctttaatgtgtgggtcagtctttaagcacataatgaagcaaaaagaatggccctataagccttatttggcagttctttctcgtttgtaacttagagtgctggaactcaagatatggatatatgtgtgtgtgagagagtggacacatgccttatttaaaaagaaaaaaatatctttggaaaaaagaaataatatgtatgaagttagcaccaattattacctattcttgctataagttattgggtcaattagtctaaaatataaaagtgattgtcaatttgttgttcaaaggaaacttttttgataacgaaagtaatacgtgaagttttaggaattttgtaaaagaaaagtaaaattaaaaatatcaccagtaatttctaatacaatgacttctttccttctagcctctgttctaaattatgaagatgacagacatatttttgaaagttatgatgatactgtatagatgatttatgtgccatctttgctttgttttgttttatacatttaatgcagttatacatttagtgccatttcctataagacattgaagtttttagagttggacacaactgaagtgactgagcacagcacagctggataaaagtataatacatgtcctctgccacagatagtattataaataaatactgctattgaacattttccctataagcttaaaaaagagttgatttttttcaaagtatagtatgtgtaataaaaagaacatttactatgtacctagttttatgataaatgtttgtaggcattactttgtttacttttttttaaaatattcctttagcttggcattagtttcctaatacttcagttaggaaaccatgatttaaagaggctaaataaaatctttaggtcatgaaactggtataggactgagctggaatttgaatagttatgtcttattgcaaagccctttctcttaagtatttaaaagtaatacctgttttatgcaataaatttggcaaatatatttcaatgtctagtgagtatttaaaacatagctctgtaagcaaaaatgagtagagtgagctgtatatgaatgaagctagtatttcttaatttatgttaatttttt

SEQ ID NO: 40910 - DNA, 2240 bp, Bovine  19866881185564
  misc_feature (1)..(1): n is a, c, g, or t
nccaactggtatcacttaaggaaacatttcttaaaggtctgaattaaaatgcagtcgaacttgctttaaatatggtttcttcttccatgcgagccagtaagtatattactgtggcaactcctatggccccagaacacagcctacaaagtgggacacagtgagagctatctgtccccatgtagataataaggtaggtgcattgcagacaaattgaaaacaacaataaaacttaaagtcttttattattattattattactatcatgcaagggtaattctcaacaatttccatacaaaatactcctccctgaaaacatcttttgtttgactaggttctacataattgctaaaccagtcaattctaaaggtactcaaccctgaatattcattggaaggacttatgatgaagctgaagctccaaaagattggccacctgacacaaagagcctacttgtaagaaaaaaccctgatgctgggaaagattgaaggcagaaggagaaggggatgcagaggatgagatgattggacagcatcaccgacttgatggaatgactttgagcaatctctaggagatggtgaaggacaaggaagcctgatgtgttgcagtcagtggggttgcagagtcggacacaactaagcaacggaacagcaactaaaccaatactgaatcattcataaatgacgtcatatcctgtaaccaaccctatattctgtaatttattctctattctcccctcaatatgtccccagtaaatgtcaaggtttcttcctttctcctattgttgctttactagtcccacttccttttcattcatattgtagggaataaaaaagataggcatatgtgcttttaatagaagagaaatacttattaaaatgtcagactattgatagggtagaatagtaattactttcatatggattgtaagggcaatgggaaaaatgaagggagcagcatatttatagaggtgatgaggaaatagtctagaaactgtagaagaaacagtcaatagtcattggctctctggcctcatcctgggaagtcatccaaatgtactttaaaactctgttggaattggaaaacctaatcacaccccacactgatcaatagtattcaggttgaaatgaagagggtctaaaatcagaaatgatcagagtaacggtgacctgtttgagagtcaatccaaggcctcatctctgttctcatcttttctgaccactcaaccatgactcatagagttgaccactctgtctccattattcctcagctatgcagaggacagactccactggctaccaaaaccttctgctcagtttccccaacattttctttattgatacattgtggttcatttccagacagacaaatctgatctccaaaggtatctgcaacaaaattaaacaatgccagtcacattcgcattcttggttgctgaagatttagtcattgctttcccattcctggttgctgaagatttattaattggaacagaattaaagttatgggctgatctttctatagaatgcatctcaatagtttgtttcataaagtgtatacattttcccatgggcttcccaggtggctcagtggtaatgcagaagatgcaggtgcattcctgggttgggaagatcccccagaggaggaaatggcaagccattccagtattcttgcctggaaaattccatggacagagaagcctggtgggctacagtccatggggtcacaaagagtatgacatgactgagacactgagcatgcacacatacattttcctacttagatttaggaggaatatgtctcctgctctcttccttctttatattaaactataaatgattcaagttgcagagatgcctgctttcagcaacttctcctgggcactactctgaagaaactgatgtatacactcattaaatcctgggctttgactgataaggattttctacgtgccttcttcagtccaatgatattaagacagagttctcaatttgtacctgtggtgatttactgttcctgctccaacagtaatgatggaaaatgcttttccactatcatttaattcgcctggaatcctagtagaaattagtcttccagatgtaccagcagaaaaaagattgagagcagctataaagaaccttgcaccaagactggacaattttaatagcacagcattggtattaaacactatcaataacggtagtaatcctttactataaatgggttagaaacagacatcatta

SEQ ID NO: 40911 - DNA, 1693 bp, Bovine  19866881655213
  misc_feature (1)..(1): n is a, c, g, or t
ntgaaaaaatgatacttagatcgctgagcacttgtccaggtcacacaataaggagtcagaagttgaatccctttgtgtctgacggcaaagtcccaagctctaaaatgtaatcactataatataactatgctatagggggctatttatggctttttactcccaccacaaagtgcccccaagagctaattttttaaattctcgaatgatatctctactgattttcctatcatattatcaaaatctaatttatatttctcacagaaattagaaaacaaagcttattaaaaagtatgagcaaattatagctcataaattattactctaggatagcactttatttcaagtcttcttcagtgaaactttagtcttgaaaattatcttaagataatatgtcttattagtgttatagcttatagtatcatttaagataatactatctattctagcaaagtacttccttgaaagaacttgccacactgttttataatcgttgagaaaatgttttcctggttagattatatcctacctggggtaaagaatgagggatgatttgggtttgtattcccatttatagtagatccttgagaaaaatctcccccatgaagcctataaaacacaccaacaatgcccactggaaacaagtttttcttcctgtgggaagctggaggcattagtagaatgttagagtgtatgctaagttgctttagtcatgtccaactctttgtgaccctacggaacatagccctccaggctcctctgaccataggattctccaggcaagaatattggattgggttgccatgcccgcttccagtggatcttcccgatgcagggaattaaacccgtgtctctttcatctcctgcattggcaggtgggttctttaccactagagccacctagggagcccggtagactgtgtatattgtacctactgtcctaaacaagctgcctaggtctgtgtgccattacccaaaactagagtctgcacattgcaataaggaaggagaacaccaaatatcctctagttacctagaaattttttggcttcatatttctgttttaaaatagaaaaatagagataaattttctcagaagcatcacaactgaagtattaataaaaaattatgcttgaatgttatccaaagatccatatctgttcacctaagaaggagccagaaatcgcccctttgcaagttatttaagagaataaggataacttgaagcctagacccactgaaatagctgaacaatctcacctttaggcagagaccagaagtagttaacttctgaatattgtttaagattgaatttgaacagaaaataaatgaacagtaaaaccattttgtctagtctgtgtctcctgatatcctgaaatttctatttcattgtaatttaaaaaatcaaagcagagtgttttccagaaaagtctattatctctgacttgggcaaatgcgagacctatctagagatgacaagtattagctttaactatatctgtgatttattaaattagtgaatgaataaatgaataatggaaatgtaagttgataaagcatgtgtggttggaaaaaagaaaatcaatctgaatttggctttataaaggcagtgtttaatttatatttgaattcaatttgtttaaatgaatataaaccactagacccaagaataggaaaagctgattataaatgttaa

SEQ ID NO: 40912 - DNA, 1569 bp, Bovine  19866881656982
  misc_feature (1)..(1): n is a, c, g, or t
ntggtcccatttactctgtcatggttatagacaaaactattttgagctgatatttatgtgtgcttattatgtctacgtaggaatatttttataattgggggaggagtccctcctaagcaattttgtacttatttttgccagtgtcctagaggtttcaccataccagaaataattttcctgttgagcagatgaaacttaaaacctctgtaagtgcagtgattgcatatatatattgctgttcagttgcaaagtggtatcttactcttggcgaccccatggactgcagcatgacaggcttccctgcccttcactatgtcttggagtttgttcaaacttgtgtccattgagtatatatatgtcctacagcccagacacaaaaataaaacaccatcttaacaggcatggtaagcagtttttattcttcatcatctttgtactatttctaatatattcacacagtaggatactatgtagtgatgagaataaaccacttataaatacatgacataatatggaaaatgtcacaaacaatattgataaagaggctcaatacataaaagtaaatgcatccaatttacatccaatttaaaaattaatagaaatgtagatagtggctactatgcttggaggcagcagagtctctgtgggatccgaagaggtgtgtttgggtgtgttaatgtttcttacttagtctgggtgatggctatgcagtttgtgaaaatcatcactttttctacattaactttagcatatattaatgctaataaaaagttaaaatgtaaatttaaaatgtgacccagaaatttcttttgatcaataataaggaaaattaaaacttatggaaattttaaaagattttagaaaatttaaatgatttaaaaagttactttggataaatacatcaaaaatattaacaaaggtctttttgaggtcttatttaaacattgaaacattctctctaggcctggaggcctagcctgaggctgggactgtccctagagcactgtcacaaggtcatgcatatttaattggatagttaattgaaatacacagaggaaaaatactttcccaaggttgacacaatggcaatattttcctttctaattatttgttccaatgtccctactgagactacaatattaatataggtcacacttttagccacagccacttctagttcagttcagtcgctgatactttggccacttgtagttagatgtcttcaattccctaaacccttttgtactacttctccttactaggcacactgacgtcatcggtactagtagctatgtgcttagagagtagatagatgaggatgcaatgcgaccataatccaggttttaaaagacagtcgtactggacaaggcctatacttttcctctttatctttacctaaaaaaaaggattccactgtcaaagtataaaggttttgatccgttgacctgaatacccagtttttaaagatccaagtagctagaaaggctattgatagccatgggtaaactcaccttcaataggaagaaagatactttcctaaattgtgccttcctaattccttgtagttca

SEQ ID NO: 40913 - DNA, 1619 bp, Bovine  19866880417689
  misc_feature (1)..(1): n is a, c, g, or t
ncttatcctctgtcgtccccttctcctcctgccctcaatccctcccagcatcagagtcttttccaatgagtcaactcttcgcatgaggtggccaaagtactggagtttcagcttcagcatcattccttccaaagaaatcccaggactgatctcctttaggatggactggttggatctccttgcagtccaagggactctcaagagtcttctgcaacaccacagttcaaaagcatcaattctttggcgctcagcattcttcacagcccaactctcacatccatacatgaccacaggaaaaaccatagccttgactagacggacctttgttggcaaagtaatggtctctgtttttgaatatgctatcgaggttggtcataactttccttccaaggagtaagcatcttttaatttcatggctgcagccaccatttgcacaacttaaaaagcattgaaaaatcataattcacaaggtagtatatacaaagttatattactttataatttaaatgcttttcagggatcaaaccagcattgcaggctacagtccataggatctcaaagaattagacacaactgagaaactaacaacacaaaattcacattcaaaaaatgtaaaaattgaatgtttgagttttacatacagtcatacacacaaaaatgcactttaatatatattcccatgagtcgtggacttcccttggtggtttagatggtaaagaatctgcctgcaatgtgggagactggggtttgatccctgggttgggatgatcccctggcgaaaggaatggcaatcccaatccagtatttcttgcttggaaaagtccatggacagagaagcgtgaaagctatagtccgtgggatcacaaaaagtccgacacgactgaacaactaacacaaacacagtatcaggctgtgatctcagtccttgacacactaacctgaaaatgattattcatccactagatccatataacatttatataattttgtggggaaaaaaagtaattttctgatactgtcaattgtatcccctccagtaaacatagtttacaatggcacaatgaaactctaaatatattctgcagtgggtaacaaatagtgcctgccaaagtgtaatgctagtgtctcccttcaatgaacaagtttcattaatttgctttaaatttggcagagggctggcttttgggaacaggatggcagatacttccttatgagtccagctggtactcataaatagttgaattcaacctagtatatatacaccagacatttgtccttataagactgtatgtcaagtatagacatgcaatctaatagacacatccagaggccaaataggaaatcagttctgtccatcctcttctaacccatgagtaatttaaaggatgttgccccaaagtagcaacatcttcctctgcttcttatgaaagattaaaattaggttttaattaataaattcataatgagatgtgatattcgtccaatatgattccagactcagaatggccacatctgaaatacacagtcacagctgaacacattagaagaaaagtacacagttcctataatgacacatgccagtgtttggtttgcttttatttttgtggcaaatacttaat

SEQ ID NO: 40914 - DNA, 2244 bp, Bovine  19866880717924
  misc_feature (1)..(1): n is a, c, g, or t
nggaactctgtttgaagaataaaaatggtttatggagataataaatctgggagagggggaactgaaaatgtcaaacctctggcctaatgtttttgtaaaatataaaagagaatcttaaacttgaaaaaataggcagttcaaaagaaaactaagaggctatctcattcgctgacactgtccatctcttcaggttgaatccctggctgctagagctggactctggcagaaagctgcacataattctcttgttctcattgtcttagattctcagtgaaaatgacagacaaaaataaaaaaggtattgaaaataaatacaaatttgataaatcctggcttttttcatatttcccatgctaaaacaaccgtgcactctgtgtttcatttattgtccattttcacagcatgcatcatactttaatttttttgcattaactattgagtcacttagcttctcaaatctcatgtagatgtctaagtttatttttcttttttctttttttggctttctggtttcaaaagtagagaaagtttcagcgaaggtgggtagcttagagatacatcagaatttgggggtaaatcttatctaaaagtaatttgcatgcacaaagaataatgtggacagaacacttggaatttgtcctgaaacattagatccctgtgtaggactccaaaccagacaacagttatggcaaagaaaagatatagctcattttttttttttttttactatttttatcattaaattattgagctaatcagtcaagtcaaatcttagaagggtacattcatctttttttttttttttttccttatacgaacctcttggtcagtcttttatttttctgttactattctatctatctaagtttgaatctgtttaacataaacacaaattccactttaaagagtaaacttcaaagcaatttaaaaattagtaagcaaaatcttttatattcctcaggtgaaacatacaacatatatgtggtccaatctgagattatccaatagcactgagagtagtgtacacaattgacaccaactggaaagcctgcttttccttcacttcttccatggtagaagaaaaatttggtgtgtgaacatacatattttcataagagaatttctctaagttaatcaatgcagtagaaaatcccatactgaatttagttaccatatgttattataagttcattttcttaaatgaccctgtttaacatggatttgaacagatggacagaattcttctggatggaagtcagctgaataattaagccatgacacttacttagcaaagtgtctacatggagaaatactagttcacccaaatatcatagatatcattttatactttctttaatagtttttttatagctgaaaattggaaatgattattgcaatgactaccatgaaaattatggccacttggctgtttataattagcaatttgaaaatttaatcatctcaaaccatctgtttttgtttgtttataattgtgaatataaagtttatcatctctcaaggataatggttttaaaaaaagtaagaataaaactagaattgatctttgtattaaataatttaaacttgtttggagtgttacagtacaaagtatgtaatgtagcaaaaatacacactgttaccaatcactacaatggggagaaaatatatgaggaaatattcagttgaaagtaaaacacctcaggtttggttttgtttgaacattttcagtatggtggccaagtgttgatgtaaaaggaatgcaaacctgtgactcaagaaatcttagttctcactctgacacttttgtcctggaccaaagtctgttcttccagaatgacagtgaatgggcaatttgagctccagtgtgtctagtgatggcattaggaatttcagaatacaatttcttttaagtaaaatattactgtaattgatttgttaccttttatctaagaggttagaaattgcacattttataaataattattttaacagatttgtggaatagactaagaaatggaaaaatgctgaaatgtacttttaaagacatatatatttatcctgtgttgacttggttgaaatagcagtgagacattcagatataatgatttgtatttatttatttatttttgtattaatttttttagttaacagacctattgactgtggctaaaagttagattcatgaatttcagacagaagactaatccttataaacattatccctataaacatttcctgaattca

SEQ ID NO: 40915 - DNA, 810 bp, Bovine  19866880837265
  misc_feature (1)..(1): n is a, c, g, or t
ntgatatttttaaattttagaaatgtgtaccaataagagattttttataaaaccaatcccaaagaagctaaaactgtgtcatacacaaataaattattttgaaattgatttttattttcttgttaataaagtccatgaagtcattctacacttatttacttcacttaatcataaataagaaaatactgagtttccaaatggctggaggaagccttctgtcttcataattcaggcagtcaaaactgcagattaatcaatagattcataccgctgcctaattttaccactaatcctttttcaatggtctgtatgatctcctttatttctctgccctacatattgaggggccaaatgcttctcagtctgtagattatcaatgcacacatatgcctgacactttagaaagtggaatttcagattagcttttaaatttcctaatactagccttctttacaacagttgtactaagtaaaggggggtgaaaaataagcaaagcatttgtataacaaattgcaaatgatctaaaaacacaatagcattagaaagaatcctaaagagggaagggaacaagaatagcctttcattactgaagtaaatgcaacccttgaatatccatttatacaggccagctcaggatttcagattaagcagtggagtttgtgtggatcattttatgtgcaatacttgttctgatggatgcaattacttgagcattacaacatttatttagaaaaaaatatcaaattaaagtattatgattcaaaaattgcaagttcagaggctttcctcatgcataaatgcacagtacag

SEQ ID NO: 40916 - DNA, 3871 bp, Bovine  19866880371112
  misc_feature (1)..(1): n is a, c, g, or t
ncggagagtctgccctggagggcgggggaattggattcctgtgggcagatatctgacttccgtatttgtgcagcactgtatgtttaccaggtgtcaactggatgggacaggccatccctcaagtgaatcttcacacttgtcacattatcacacttgtcacttgagatttctagcctaatcttgaccccatgttgtgggcaggtagatgccatttacagaacaattttatatccactgatataattttacagatgtacagaacaattttacatctgcttctgatcctcacaacagttctgtgatattagttgttgttgttattattattacctctgcattgcagatgagaaaatttggacttccttgctataaaacaggggtaatcaaaacttttgtaaaggggaggatagcaaatgttttaggctttgcagtctgtaaggtgtctgcctctatagcatgaaaacagagatagactctgaataaacaaacagatgtggctgtgtcccaataaaactttatttacaaaagcaggtggtgggccttggtttcctgacttctgctataaagcactgagattgtggaagggaaaagatacctttggcaaatagaaaaccttaatgaggggatttgttgtaatctcaataaacattgctgagcatccacatatgtccagcacataaatcgtaggtaagtcaaggagtatatgatatgcagagcaaagacctatatgaattcacatcactatcatgtaaggctcagagttctcaggaccattagaagaggcctacggaacacagaattcagaacatctggaaccaaaaggagctttctggaggattttatatgttaactgggctttgaggaaccactaggatgaaacacgaaaccttgtccatggggcatcattggtggagggtcagtgtgatcatgtttcccctcctcattctgctctgtccaccgaaagagaccagacatgtttgctgtcagtgttcaggcgagagcccttgtaggactggcatggtgatgaaagggaacctgagctcaggacagtgctcaaggccccatataattgaaaagaataggttcaaattgggccatgcaagagccagttggagtgagacaggtagttacaagcagcggagaaagagaagttggggtgaaaggtgtctcgtggcactgagtcacaggcagggggctgtggctgcctggaactttaggttatatgtcatgaagctgtggctacaactcctgactccttgttctgggctggggggattccccacaccaattacaataaggatgaactccttctgggctagtgcctgtgatgctttgagatcacagggcaccttcacaacaattaatcttcacaacaaatccgatgaggctactactgtcatccccattttataggtagagaagctgaggtccagaataatgcatggttgtgcccaagcagttgaagctagagatgggtgacctagtgcttttctcaccattctctactgccccatagtacatgtgcctggagttagagacagaagagtaaaaggataagaaaatataggtgcagaatcctaatcaagaaaggccactctagtggactcaaggctcaaaagagtgctatggggaaggagatagattcccacctgatcagaagctctgggttcccatgaaatgtgcgtttattcttgcatcactggctggagcgactaagtgattcagctccaggctgtctccttaacatctcagagcatatcatcacccacgtggctgccagctggtggggctggggttgcttttgggctctgccccatttgcttcttgctcttactcttagccttgtctctctggcttatagctctttccagccagcacctttgaattaattatttctttgggtggtttttcaggatatgatattcacatccagccctcaggatgtctacccagaggactgtatgcctaggtctcacattcatgtggagtcctctatgtctatttttaacctcatccctgatcgggggttatacacactgtcttagtgagacactgccaagcctgggagaagactgtcttcataaaacagaaaattgcacctctttgtgagaccagagccctgctggtgcaataaataaattgatcattcctatgattgccttggaagagtaaccaaacatacattgcattgtgcacatggtttaaaagccataattttttaaaaagcaaatatttcagaggtaccagtttatttggccgtgtttttgcatttctttctttttatttaaagcaccaaaagcctcaaacacagaaatgcctaggatatctcttgacccctgaagagccctggtgtgccacaccccagtgttctgggagcaggggtgagctggagaatcctgccacttgccttctgtctagatctcggttaacagaacatctcccagctcagtctcccaagttagaaccccctcttcagtgagtgcttcagcccacactgccactgccttcatctggtcgtcttcatctctcacttggactgttatttaaacattctggaacgtgatctttctgttaccagtttcttcccatgcactccattttccacactgctcttagagtgatctctataaaaagcaaatctaatcatggctggaaaacctcagtaccttggttttactcccagcttagttggggtggggtttctttgctgctgtcatcgcccacgatgacttctcctcacataggagctcaggctggagcttggggagaggaggtataaggcccagcgcccctccagtcccaaagaacagaggcacctaaggctgctcccttcccagggttcccctccccagcctaccccaccaagcctccaccaatcccgtcagccggacaatggacaatggtgtccttttgagagggtctttcctagatctaagaaggggcatacggtatcaaggcacagaatccagacactggttccttgttcttttatgcggcaaaggggggctcctggaccatgtctcccatctgctgatgggtccctatctctgtggcgtcccttccccacacactttcttctgcagtgtggtgtcctcactgctcacttctgcctaggagccatgccacctctctctgagctcacaagctttagtgacacttcaggtttctatgggtcctccagggagaggtgagaatggctctgttcctctaggtgacagcaggtccacaggtccagttcagatgatctctgctgagagcagtgtctgatttctgtgtgtggttacctacaaggcagatatacttcacccaggcagcagtggagttttgctctgtttttagaatgagtccaccccatttgaagtcctagagaggagaaattttcccccccgttagtgtgttttggccttgcttctttgagaagcttaggtgactattatgtctgcttttgactaataagcctggctctccctgtaaaaaagccaggctacctataagtggctgctttctctgctacccagtaaggagagcatggcccagatacacatctgatagaaaaggggtctctggggcacccagcaaaccatcctgaactcctgccacaataaacttcagtccatctgtattaggctcctagggctgctgagacgaaggatcacaaacttggtggcttaaaacaacagaagtagtctctctcatactttgagaagctcggagtgtgaagctaaagttggtgggcccatgcttcctctgcaggctctaggagagttcttccctcctctttgggcttccatggccctgcggtagctgcaccttcccaatctctgcctccatcctcatgtggcctctccttaatgtgtctttcccctctgtc

SEQ ID NO: 40917 - DNA, 1775 bp, Bovine  19866880490688
  misc_feature (1)..(1): n is a, c, g, or t
naaaatttgtactgcaattgctggttggtttgacttttgtattaggccattgatgtaggattttgatggtagtggtcagtttgtggctaaaatctgctttgtcataggaacaaggtgcttctgtgctttttagaagaattatggtgctggtgaagaaacattttgactcacatgcagttgttttctcttgtttttagaggctacagagtctctcataaaggcagtttatacattgtatcagcagagaagccttctcattccagttcggactttgttactgaagtttttcagtaaaatctatcaaaaagaagaactgagagcttacagaatccggtacattccctttgttattttgcttttctttttcttaccaggttactttgtaatctgtataataagatgatagagtgattaaatcttcggagaaattctctctctctatcctttttgctttcattaaaaaaaaatttttttttataaagaggcgtacataatggttccagtaacctttatacacataactgagaaggtacaagtctctttgagcatgtatttccacttgtctgcttaacagctaaaggacatttggaaccacctgtagctgcctcagctttttcttttgcttcccattaaaattatggaggtttaacctctggcccttagtgactattgggacatatggtataagaatgagggcagtagaagaggagaggtgtacaataggtgaaggagattaaaaggtacaaacttaaagtaaataagccatggggatataatatacagcataaagaatatgaccagtaatactacagtaacttttattaggacaggtggttactagacttgtgaccatttgcaatgtgtacagttttcagattattatgtgatatatacctgaaactaacataatactgtgtgtcaaaaatgtttcaataaatttttaaaaaatgggagtattttaaagtgaaaaagttcctggcttagttgggtgctctctggtgacatagacacacacagagtagaactaagcaatcagtttttagatacagtgagtttgaggtttatttgggatagtctggaagagatgtttgggtgaaagataagagattcgggatacctcagcatacataggtagttattaggacatattcgagtctttactgtgagtcaggtgcttttcttaatttttcagtaattctcatactttgatgtaggtatgttggtttctgccttatagaaggaagcttaggttaaataagttggtgagtgtcatgctgctgaagggcagccagactgagacttaagttcaggtctgttagactccaaaggtcatgtgtaaatcactcttgggggatggcaaaagtgattgctgtgtccgagatgagacattagagagttagcaagtatatgaaagaactgaaataacacaagtttgaagccacttaatgtggggcaccctatactgagtgcatcagtgacttaatatagtaaaataattattacaaattagtataaatagttcgcaagaagttaagtagagtctgtgtcctttaagataaaattacaatttacatagtgccccaaattacataaacttttaaaatacagtgccttagagaatgctatagctgaataaatgatgccagccatcttataggctttcaaatgtttaaataaatgtggtgtatttcccttgtctttgatggccttagataccgtagtaaagtgttatcacgttggttggctggtttaccactgcagcttgctcatctcgg

SEQ ID NO: 40918 - DNA, 1981 bp, Bovine  19866880526199
  misc_feature (1)..(1): n is a, c, g, or t
ncttatcacctcatcaattctcaaattattagaagataggtctacatttcttcctatttttcttcactagcccttacccacaaatgccttcaaggataacaatgacctcttacatgtcaaatccaacttcattctctaaagtttttgcagtatttaacactgggaatgactttgcctcctgaaaccctttcttcccttggttttctaaccctatgctatcctgtttctcctaagaatctcctggccatgcctcccctgtgttcttccttctcctgtcctatgacaccaggtattccccatggttttacctttggaccacctctttacatcctctcatcctatcctttgataatctagttctttggggcttttttgacatctgggtcacatattttcacctgacaatctcattcataacactaggaactcctcaaaggtacaaactatgttttattcactcttgaacatcaactccccaccttcactatcagtgccgggaacagaggagcgggaggaactcagtgaaagttatctaagccgaactaaacagtatttcccaccaacttctgaaactaaacagacagacacaaaaccaaacagctgtccggccttccacaacccaaaacaaccaaacctaaacttcccggtttcctttaataacattacccacttctaacctccaagccttaaaaatctcagtttcaactctgacatgttctttttccttgccccttatagccaataaattaccacgtgttatgattcttcctttgttatgtttttatacctgtctatacatttagcttctttctttcttaccttcaatccaaggccttaatttcctcccgcatatcttactgtaacagcttcccaactcagtgtctccatctctcctacatactccttccagattaatcttcagttaacacatttctaatggcactactctggatctcaaaaatagttaatatgtagcctcggccttcccctagcatccaaagctcttcataataaggccttcaaaatacctatatgcttaaaaggctagagatctactcaagttatttcaagaaaaggaaacatttcaaagaatgctcactgatcaactgagagttatcagaaaacaagaaagctctaaaactgaaccactctctctttctatcagtgcctctgcttctcttttcagtttcccttctctctattgccctacttcctctggttattcatggtttccattccatcatagactcagctagcatacagcacaacacgaccactcccatgcgtgcacatgtgctaagttgctccagtctgtccgactctttgcaaccctatggactgtagcccagagtgggttgccacgtcctcctccaggtgatcttcctgacccagggatcaaacctgcatctcttacatctcctgcattggcagatgggttctttaccactagcgccacctgggaagccatgaccactcccaataccttctaaaccttggcaactctctcaactctctgttcccactgctaactggatcagtcttttgatttcccagttccaaatcctagagaatccaaatgacctagtccatctttccaggcttttacttccttcagttcagttcagttcagttcagttcagtcgctcagtcgtgtctgactctctgcgaccccatgaactgcagcacaccaggcctccctgtccatcaccaactgctggagtctacccaaacacatatccattgagttggttatgccatccaaccatctcatactctgtcatccccttctcctcctgctctcaatctttcccagcatcagggtcttttcaaatgagtcagctcttcgcataaggtggtcaacgtattggagtttcagcttcaacatcagtccttccaatgaacatccaggactgatctcctttaggatggactagttggatctccttgcagtccaagggactctcaagagtcttctccaaca

SEQ ID NO: 40919 - DNA, 2652 bp, Bovine  19866880575200
  misc_feature (1)..(1): n is a, c, g, or t
ntgattttttttttttctcttggtcccctagtgacatctttccagcagttccttggcgcagctgcacagctgatccagttcacttatcatggcagtcaaataaatggacttggttgttctcctgtcagcttcttaatgtgtcacatcagcacagctgaagataaggagcctctgtctctgacccagacgctttggacctggttgcttccattgtatgccagggagagtacaaccctgatggccagaaaaaaccctcccccgcttggctttttgttacattctacagcaacatgaggctccttgtttctgggcctgactccatgaggtcattccaccctggagagggtgggaggatggattaaagggaagagagatgaggcaacacagcctaggagtctgggggctgagggccaggctggatctcctatgggcgagttttgggaccatgtgcaatgcacttcccctttctgggatggtcaccctcccctgtgtgatgaaggatgggacttgatgacctccaaagtaatttccagctctggccttccgtgaattgtgcatgatacatggtacatgaattaccattccactttctgtcaatggctctagatctttccttcacccccattcttcatgtacttgacttgtccccaagagttactcacttcaggtttagacttgattcttccttctgtctctgagaccatctcttccctcctccctcttcattttgattcctctctagtccaattttctgctatctagaagagctggctttagaaacatctgctttcctaatgcatgctgaaagattaatggtagattatggattcagttctcatttcacttgaggaataatacttcaacctcaaaggaagggccctctcacaatagagtccagacgcagagtggagagataggctccaaaagaaaacagggggccagatcatgtaggcttccaaagagaagagaagtttggacttcatccaatggcaacagggagccactgagggcttttcagctgtagctgagctatgtcttcaagtgatcattcaggcatctttttgaaaactggattgaagtgggaagaaagcagaggcagacaagagagtgaattctggatcctggtgagaaagacaaagtgtggtagtagacctgagaggttttagaagaaacactcgtacttgggctccagtgaatttggggatgagagaaagtgagtttagaatgacattgtaaactggcttgcaagtttgttacccagttttgtctgtgactaatatagaaaaaatgctttgcctttctctcccagctcactatgctactgctatggccaaatctgctcccaccttatggcttttgcacttgtgggtttctgtccccaattttagccaaatgtcctctcttttgaggggctcctttgatggccagtctaaggtagtctctctgccctgctcatctcctacctcagtccttattctccccactttttgttcttagctaagacgagttccgtcatctatttgcgtagttccactagaatttaagttccagggctctcatgtgtctccttcatgagtgtgtccctggtacccagaagaggaccaagcacctgcttggctcatagcaggtgcttagtaattgtaagtttaatgaacaggaaggaagcaaaaaaggaagatggctggaatcagatttggcaaattatttccgaagatgactgcaacattgcccatcttgcctgctttttgcaatgacagttgctgcttctttcatcagttggagcctgtttcctttcttttggatctgggctggccccatgacttcctttgacctgtagaatgcagctgcagtgacactgtatggcttcagagtctaggctttcagaggtcgtgcagcttccattttcatcctcttgccatgcttcttcttcttgtgtcttgagacacatcagaaaggccaaagccctgtggggggaaacggagccctccagtcaacagcacctgctgagcccagcccgctgcaggtctgccagctgagtgtggccacaccaataatcccaggcaagaagagttgtgacaggccagacagacaggccagacaggccacggatttgtgagaaacagtacattgttttaaccactaactttcattctccactttgggctttgagtttgaggaactggtgggcatccagatggaggtatactgcaggaatttagtatcagaaattataatatacagttgtatatattgtaattatttatttgtatgcatatgtatattggagaaggcaatggcaacccactccagtactcttgcctggaaaatcccatggatggagaagcctggtaggctgcagtccatggggtcactaagagtcgggcaagactgagcgactttgctttcacttttcactttcatgcattggagaaggaaatggcaacccactccagtgttcttgcctggagaatcctatggacggaggagcctggtgggctgccgtctatgtggttgcacagagtcggacatgactgaagcgacttagcagcagcagcagcatatgtatatatttatgtatgtatctgtgtatatggagaaggaaatggcaacccactccagtgttcttgccggagaatcccagggacggaggag

SEQ ID NO: 40920 - DNA, 1680 bp, Bovine  19866880618130
  misc_feature (1)..(1): n is a, c, g, or t
nttgcatttgagtgacagtccatttatttattttgattttcaatggtaagctaaatgtataactgtgtcctctgtttctacatttattacacccccctttaaaatattttgtgtaatgatcattatgtaactttagtgtctactcacatagtgcttccttctgcaatctttaccaaaatcaaccccctctctcccaaatagtaggtatttggtgaacatccgctatcctagttcaaggctctgtactgatcaacatgggtctctgtgccaaagagtaaacaatataatgttcatttattgggagtagctctatccaaatagcatattgagaaaagttcaagtgtacatagtacatgaacctttgaactctgaaaaatgtggtttagaatcccaacaaatctggtttttggaatggacattccaatttccagtcagaatgaagatattataagaaaaccctggaaggagaggatgagatttgtctatcttagatgaatatcaacaaatggaagaaaatgccagaaatcattggctaaaaagtagtatgtcaagcatttggattgtacaagcaagtctttgtagacaatttaaatttcaaaaaagtttgttcaaaattatgcttaaaacataataaatccccaaaataccaccttaaaaatagtcatatacattaggatggtgcccacaggcctaggactaaagtaaaacctattggccaatatttgctgatgcaccaaactgctgaacagccttagcatataagtacataagaaccagaacaactagcttaagtatctcccactcaacacagttttcctaattctttcttcacagcatcataggctaatgaattcataatcactgaaaatacttaccacaagcccactatatgctaagctttgtgctagggaatttagggcacctctctgccctacacattggacaaaaatatcaaaattctaaataaagacaggattagtattgcttcccaggcagcactagtggtaaagaatccacctgccaatgcaggtgacgcaggttcaatccctggatcaggaagatcccctggaagagggcatggcaatccactctagtattcttgcctaggaaattccatggacaaaggagcctggcaagctacagtgcactgggttgcaaagagtcagacatgactgaatgacttacagtacaatattgtctcaggctctggttatcaataactggagatggcatagctctgttatcaattctacttttgttgaaattttgactttttgttcatcatggatttttcacattaatattttaaatattgtattaaaatgtaatttaatcttgattactgacttttttgatgcttttgaactggtgttggagaagactcttgagaatcccttggactgcaaggagatccaaccagtcaatcctaaaggaaatcagtcctgaatattcattggaaggactgatgttgaagctgaaactccaatactttggccacctgatgcgaagagctgactcactggaaaagaccctgatgctagggaagattgaaggcaggaggagaaggggatgacagaggatgagatggttggatagcatcactggctcaatggacatgagtttgagtaagctctgggagttggcgatggacagggaggcctggcgtgctgtggtccatgg

SEQ ID NO: 40921 - DNA, 833 bp, Bovine  19866880619223
  misc_feature (1)..(1): n is a, c, g, or t
naatgtcataaagatttttggtaatacaagtaggtgaaaaaatatgtatctgttattttctctcctaaaacaaagccttcaattagtgtatgcaaaaatcatcaaggtgattcagcaggcttagggtgaaatgttaagaagaagcggactggtctggatgctaatataggaagtgaggtctcaggggtgtcatctcggagcacaccatctcgaatcctaacttccatttcctgggtgtgggggagacagtgctggtttaagccctttgcgtttcattcctggaacttgagacttcacatcttctgttagtgatgacttgtagtgctgtattagttccactactccccatttgccagagaaaccaagacaaaagatcaaatgacttgtccaaagtacaaaggcgatcacctgaaacttgaaattttcagatgatatgaaaatatggaaattttccctatgaaagatacagatagaatttcacagtttattactttatatatgtctacattagtgctctagtgctacataacaaattactcccaaaagttagttgttaaaaaaaaaaaaaaaaaacattttttatctcacagtgtctgtgggtcagaaactcagaaaaacttagccgggtggttctggtggggtgtttctcgggggggcgtgctattgagacattagctagaccttctgttatcataaggcatgacttgccctggaagatctgctctcaggatggcttgcttgtttggatgacaaattggtgctgactataggcacaaggactcagttccttgccacaatggacctctccataagactgcttgagtatctcacag

SEQ ID NO: 40922 - DNA, 1475 bp, Bovine  19866880626435
  misc_feature (1)..(1): n is a, c, g, or t
ncagagaaactttgttagttatgccattcagtatctataagaataaaaaagattaactgctttgaagtagtactaattaaaccaataatttttttcaggtttctttatacatacattgtttaatgtaatcaacaattatcaattacatccttagaggagctataatgacaggttttactggctcttccttacagtatcacttcataaaaattaatggtgtgacccccaatgcagatttttatgggagatagatctgacatgccctctgaaaactagaatgcctcagaaagaagcatgcctggctaggctgcccctgtacctggagatgagggagaagtactctgcaaatcaggatgacattctccttaggaaatattttaaaacttatttttaatatgtgaacaagtaggtacttgaagcctttatgtttcacactatacagcatagcctctattttttttaatcctataaaatgttctggagaaaagaatggcaacccactccagtattcttgtctggagaattccatgggtagaggagactgatgggctacagtctacagggtcacaaagagtcagacacgactgagcaactaatacacatgaaatgtttaggatacgcatttccagtcacactcagggtccaagaattcagcatactgaactaggaggtatccctggaaatttatatataatttgcaaatctacaatatcagtacaaggaagtgaactcaattaactgcattaaaatactacgatcaagaataagacttagtacattaccgccaacagtcatggatctggtcaaagaaggctgtaaaaaagtttcttcatcattaaattgtttcttaagttcttctacagattccagatggagttggagaaattctgctgttgccgctgatgcttcttctttaacaggatctatcattctcttcagaagtcctaggtcatcctttcgcactttcaagcaaagcttctccatttctcggatattggagcggagttgctgtaaaagaaaaaaaaatcgttaaagctaccatctcttaatataaaatatctttacattcagagccaatctgtgataatggctttgaatggaaatgattacaagtattctttagagcagacagtattaattagtacttttctattttttatatctctggccaaatccagcttctttagaactcacatcctcatattctgaatttagcatttatccttcattaaatgtaattattacaaaggtaacaaatattcttcataaaaaatgaaacactgcagaaacacatcaagaaaaacaatgatttcctcacttcatcaagcctaccacttcttttaacccagtctttctgcatacttcaatctgctcatagaaatattagcatatatagaccttttcacaaaaaatgaattgtagattatgcagaataatctataactgacaaactttcactccccaacttaacaata

SEQ ID NO: 40923 - DNA, 1321 bp, Bovine  19866880687678
  misc_feature (1)..(1): n is a, c, g, or t
ntatgatcttatatagccttgttcgtgccttcctccaaaataagatacctgatgcctcaacaatatttcttaattagagaaattgaattagtggaaaatagggcaaagagaagtcctgctggctcaacttgccttgctgctattggaggggaaaacttggattacccctatttagctgtgttgatttcagtggggatcacccgtattttccaggtaggatcacttcgtcagaaatggtctatatgctaaatgaaaatgcacctctgtttttataacaaccatgtttagttttctgaaagtgatttaaaagaatctttgatccatatttcttaataagctatgctatgttttaaaatattcaccattaatcttacctattcaagatactggctttttattcttgattttgtccccaaatgaatgctttattttttcctttgtacctacagagttgcatgaggtgcagaaaggatctagtatctcaacaaaaagaaaccccttctgcaaataaaggacatacaaaaaggcattttattaaacaaacaaaaatgccattgcagagttatgattctccctgggaaacttgtatttgttaggtgcactctcttgagaatggcattaaagaagattcacacataagccctactagttcaagtggggtttagttcttggcatgattagcaaagtgggttttccagcacatttattttggtcactttccagccccccacttccctccccctgggtgagtctttaatttggttgccagacctttcagtaattttattgttctgtgttttttctcattgaggatgttatttggataaaacttataggcacattactcagtctggcaagaatgggggataatgatcatttcctgacattcactttttaaggagatttgcttgtttccctatttgatcgagtgcactgaccttcctatgtgttgttacatagtgtaacatctaagaaagactttattctaaagcctgatatttcatccaaacactctcttggtatagctatgtcccctgccatggtaccactcttgaaataaaagcaaacctcctacccttgtcctccttcaccatttaaagcagcccccacccctttttggtagaaacttcctctaaagctaaatttaaaatccttatgtatttttcttctgaatccaggttcatgtgactgactatagatgaaaaaggctcgtgagttagtgtagaacctataccaagtatgaataaagactatttcctccctatagggtagatcctctgaatatatcacctttcaagtggcttaaccttcccctcaaact

SEQ ID NO: 40924 - DNA, 1926 bp, Bovine  19866880692367
  misc_feature (1)..(1): n is a, c, g, or t
naaggaaggaaggaatggtaggcagaatgatgcccccacagccaaagatgttcatgtcctcatccccagaacctgtaaatatattaggatacatgatagaggaggaatgatggttgcagatagcattcaggttgctagtcagctgactctaaaataggaagattatcctggattgttcaggtgggcccaaagcaaccacagaggtccataagagtggaaaagtggggtagaagagagagacccagagagatgctagtgtaatgatttggtcaaacatcaaaacaagaggatttggcctttcaaaatcaaagaaggaggccataagccaaagaatgaggacaacctctagaagcaaggaagggatatggatccttcttggaacccttagaaagaccccttgagtttacccagtgagaaacaatgtggacttctgactcccagaactgtaagatcttaaatttgtattttttaagccactaaattgtggtaatttgttacagcggcaatacagagtggcaaaggaatatcataagtcaagacgcatgacttttgcatggatcaaaacctgacagtatttgtattcttcatctagcactttgcctccaaacacctgtcctatgaaaacaaccagaattctcatgaaggtttatatcaggatgttcattcgcagcattatttatgccagtaaaaagttcagtaagaagggattgatagctatccacacaacacagtattacgtggccataaaaatatcagttccttgaaaaatattcagtgacatgggaaaagctgatgatcgagtttttaaaagcaggatacaaaacaatatatgataccagttttgtgaaagttgaagcaaatgttaatgatggattttaaaaagtgttctaatgttaatgataataatctttgtggaataagattaggggaaatttttggttttctacttatacattttgaatcttccagttgttctataataagcatgattaacttttataattagaaaaacaagcaattttcttatataaagcaagcccctcaggtaacaagaatcacaaaattaatcatgcttttgactgagtattctcattcatgaaaatgtatcccaaggaaacagttcaaaagaagaaaaaaatcttataagtaaaaaggctttcatggcactgttacctataacagtttaaaattgaaagccacctgaatacccagcaagtcaattatgataaagcaaattataatatatttgcttgatagaatattgggagatcatagaaataactaacacaaagactatcttggaatacagaagcgtcagaataatgcaaaccaaacagtttgagggaaaaaaaaagtttacatttataataactccatatacatgtggataaagacaggaaaagaggagttataagtagtttctatgctaaagcaaagaggatttgagcgtaatttgtaaaaagttgttttgatagtaaatacaactatttgataaagacatacaacatcatgtcaatcaagaaacctgaggaataaagactggttaagagaattgaaataataatgataccagaaatagaagccatatctgtgagaaaggacatgtgagaccacccacacagagaccacccacagactttcattcatctacccagtaaatacttattgagcatttcctcacatattaataaaaccataatgaataatgagggaagagaaacacaaaatttagagtttgagctacttttggggaactaggtaagttctgttgaggaggggaacccagatagtttcataaggattgatcattttttaagctatttcttaaactgggtacatggattttttaaaaattattattctgatgtttcacaagtgcttactacaccgtctggcacatattggctcatacaagaaattattgca

SEQ ID NO: 40925 - DNA, 1766 bp, Bovine  19866880694229
  misc_feature (1)..(1): n is a, c, g, or t
nttttactagtagaattgcttgggctcaccaaatttggtttaacgtgtcatcagaggaattgggtgattattagaaaaaggcagcttacccggtttgctggcaattaactttctctgtaggtagctgactggtatttaaaaaaaaaaaaaaagtgatgggaaaatttgaggaagcatgtatatggagaaagtgaagaagattggggcagagctagagggtgagggagaagaaatagcaggtgaaatttgttttccaactctgttgattctcaaacttctcatttcatggagcaccagattagctaaagaactaatcacttgccactgagagaaactatgaaattaaatctctgcgtctagtgcagatttgattgaaacagtcactccatttatgagatcagatacctgaatctcataatctaaaacatctaaaaaaactcataatctaaaacactgtatatagtttcaaattctgaacagtcttctggtcagattgtgctttgactttgtatccattgccaacattaagcagttaaaattaactgtctcactcagtgcctgagtatttcaccaaacatgaagtttctactaggttgtgttaaatccataaatattaacaagtaattgagagggtgggaaaggagaataatgaaaaggaaataactgatttacataagacgttaatagtggggaaagaactgggtttgctctatgtgtggtcttctagctatagactcttttctgtcatcctacatgtttttatcctgtgctctctgggtttttttttttttttcccctgttttcctatttttgcttctggtattcataacagtagtgacagcttatacagaaaaaaaaagaaaagtgatttgcacagaaatttaagtgccttaaaatgctttttcctttaaaaattcaatctgattataaataaattggttggaaacatgagagcagaaattcaggagcaatgccacatttccatgactgagatcaaaatacaaaaatagtttttcatttacagatagaaataagtagaatagaatgttttatgttctctggagaatgaaagaagcctattacgtttagggggaagctgtgatgattttgctctatcttttgtccagattctgagagtttctaaagcacatcttctctgccaatcttgcttgatctgagaaactcccttctgtctcagttgtgtatctagtttcatttttagcatattgcttcccaccaagagaagtgatgagcctccaaatttgatttgtatttagcaaggtgtatcaagtcatatagagcaaatcagtgcttctctctgtctttgtctttcttacttcccatccagctcacacacttcaccagtgcaataggaacagaatcttacaacattttaaacaactattcacaaaagaagagtccaacattaaaactgctgggaacttcagaccagcatgttgaatttgatgaaatactagattttatcacaggtatatgtatactgttattgaacacattgtgaatcatggtagatgtttttatatattacttagaaggtgtcttttgaattgactttaattttcttaaaaatgctcctttggagctaagttaagccatgtctccaaagtcactttatcttgataggtaggtttatatagatgatcagtaaagtaatttcagtatgataaagctgtaggaacatgaaagaattcaggaaatgcttttgaattaacttagatttaaaatggaacttttcctaatgtaaa

SEQ ID NO: 40926 - DNA, 1552 bp, Bovine  19866880724294
  misc_feature (1)..(1): n is a, c, g, or t
ncttctttgagtcctcttcccaaccacatgcctcccaaccaaacatttccagatccagatcctgtttctttactactttctgtagtagtgaggccctatatgtcagatcctacatctggacactgtatttccctcccttctatctcttctgccctctcttgaatgcaacatttctaagcattcccatgctcaataacttttagtagttctccattgcttacaaggtcagttctcaactcattaaaatggcatgcaaaaaccatttgcaatttgtccctttgctcttgttctttcctttcaaaagtttatccattcttcaggatcccttatttctacatagactgaaatttagttgtttacatgttcgcctccacattaggtagtagctctttgaggataggaactgagtctaactcatacttgtattctcaaaatggctaggacagcacaaagaaacacttcatgagggtagtatgtttcattcaccagacactcacacagtgtctggctctgacaaacatgtgtctaattatgaatgaataaaaatcagtgttttaaggaagggataatccatcctgcttccagttccccttcaaagaagaggtgctgttgctgctgctaagtcgcttcagtcgtgtccgactctgtgcgaccccatagacggcagcccaccaggcccccccatccctgggattctccaggcaagaacactggagtgggttgccatttcctcctctaatgcatgaaagtgaaaaatcagagtgaagtcgctcagtcgtgtccgactcttggcgaccccatggactgcagcccaccaggctcctccgtccatggggttttccaggcaagagtactggagtggggtgccattgccttctccaaaagaagaggtgatatgtagtcaaatagttgatttaaatgttgactcttctgtagtcttctattgactttggtcttaccactattctctggatcttagtttttgttgctttcataagaagttaagtaatatctaatgggctgtgtgtgtgagagagagaaagagagagaaagagagagaatgtcagggggagggaattccatcagtatttccttggggagagaaataatcttcctcacaattaggcttcatttatataaattaccacagggtgataccaaggccaagagacgttgaagtttagagttcaaagaggttcttttatctcctaaaactggaagaagaattgatttatgtttgcagccttgacttggctccacaatcttgagacctaataatgataaatcacatcaacaactaaactcatcctctatagtttacaaagtacctttgtttgccaacttctttctttctgtttttctttcttgtttcgctacacatattttccaagccctttaaaatctcgaattatttctttggagcttcataaacaccttaagaagtagcttgggaagatatggcaatgatcattttaaattgcatttttggttttataactagtcttttaatttttaaaaacctttttattataaaatattctaaccaggcttg

SEQ ID NO: 40927 - DNA, 1817 bp, Bovine  19866880732581
  misc_feature (1)..(1): n is a, c, g, or t
ntattgatttaaggatttctaatgtgtttttacaacatgtaattttgagagcaaattgtacacagcagaaaacatttggtatcataataattaatctgatttctttacaaacataaagcacaagtccactgggaaacatttaaacaacttagagtaaacacattctagatgtcatacaatttattattaaggaccccagagccataactatttaattaaaacaaatctggactatcccttgcttgtattacctaactattacattaaggtattaatagtagttaatgacttcacacgtatttcagtatcaaaaggcaccaaaaagattacatatagcttaaaatacattacatgaaccaccaaaaggaataaaaaccaaaggagaaaagggcctccattcatttactcaacaaatatataataaagacctactatgtattaagtgcagtattcctgagaatattcctggattagtccatctacctgagttaatattaaaaataattccagattggacccctgtccttcaacttatgacagtcttgtgctttagacaaacaccagtttctctattcttcagccttctttaatctgaaaaatgagaataatactgcccttatccagcatccaaatagctggcattctatcgcttactggtctccagaatatatttgacaattagtcacatactgacttatgatacttcttttcctaaagctttaaattattatttaatataattggacataagatctatatatgaaaattaactatatttctatatataccaccaaaagttagaaaacataatttaaaagaaggacaatgtttcacacctccctcaaacacaaagacacaccctaaaacaataaagtatttaagaacaaattaatgaagtagattgaaatagacaaaattaagtgtaagtcctgtattccggtcacctgttgctgcataacaaattcctcctaaaaccaccacttaattttgctaatgattttgcagaccagacattgaagaaatcagctgaagagttcttccctggggtcactcatctaactgagtaaggcattggctgaagttgtattcatttgaaggctcaactgcactgatgtccaagatggctcactcatgtggctagcacttgaggctgcaaattcctaagagctcagttgtggctgtggatatctcctgcatggaggtcttcagatatttggatgtttcacatatggctaatttcctccagtgcaagcatcctcagagaaccactgggagctatttggctttttctaatctagcctcagaagtctagtggcattacttctacctcaggtcagattcaaagggaggggaatgagactccacctgttggtgaggagtaacaaggtcatactgtagaagaccatgtaggatgataaaaaccttggtagatatcttgatagactgtacaatctacaacaatcttatgcataaaactatgaagatacatatataataaagaagttgtaaacaagtacaagaatatcatatatttataggtaggaaaactggacattttaaatatgtcaattttctctaagtagatgaacaaatctaatgtgattcccatatttccaacaagattgtgtataaactttgaaaagcagattgcaaattttatatggattaccaaatggccaagtatagccaaaccactcctgggaaggaaaaataaggtaaccgtattgtcctactagatttgatataacaaggctgtcttaacatagtgtggaccttgaggagaaatagacaaagagaagagaaagaccagagagaga

SEQ ID NO: 40928 - DNA, 1190 bp, Bovine  19866880764556
  misc_feature (1)..(1): n is a, c, g, or t
nagtcggacacgactgaagcgacttagcatcgagacaccatatggctggcaaagcctaaactatttactgtccaatcctttgcagaaaaagtttgctgatctctattcagttgaatggaagactcttggattgcttttctaattttctattctcttttctgagagatttcttcagctttattttcaattctttctactaaattctttgtttctactattatgatatttatttcccaagaactttttcttattattttttatagcgttttacctttggacataacaattctttctgcttttctgagacactaaagagctgattgcttgtctcctggtggacttcacttaaatattctttgataggctggcattttccttggagcaacctccaagtatcagtgtcttggaggttgttgtggtttagttttctgaagaagaatcctgttttcctcctagggtaagtaggcacttatttcctaattacagaagcagtgtaggtgaattctgctgtacttccattgttcagtcatgtcagccctgtcccctctctatttgagccctatgccaaatgtttctgaatttgaagtctcaccaaaaaaggcatctttagtcctcttacatttcaaaaaaggttactatggctgcagtatagtcagtagattgggatagaatataatcagtgccagagattatttaggagtggttacagaaatggtgaaggtatagaaaaaaagattaatttgagacttaagtggaaatttgacttgcctttcatatatatgtattttatcagtatttcttgctgcctagattatagccctaatatcagtgactatatctccactaattgtgtatctcagagtgccagctgctcagcaagattcagagtttatggaatggtactgtgcatgttaatgtcaatgagattattatgacttttgtttcttaccatcttcactgtttaacatgttattaaaaatcacttatgactttcttgagacagtggtagggtcaaagtgtttgtttactgattttttaaagtatatatatatatatttacattattgatctccatctgcattagaagttttatgtgtaccattaaaataatgagatttaaactgtttttagatgtaagtattggcttagttttattcatatatgccttgcattttttgtataagctcgtt

SEQ ID NO: 40929 - DNA, 1579 bp, Bovine  19866880765289
  misc_feature (1)..(1): n is a, c, g, or t
ntttttacgtaagagaaaccacacaaaaatctgagactgttttatttgaaatgactacaaatggtatttttgcatgattctaaaactaacagaaatcgttttctttcctaagcctatatatcaattttatttattgattttggtacttgctttggtagaaaacccaatgatttactacctgcatgcttgccctactataatgaaaaaaaagtttttttttaatccttcacacaggcaaaatggaaagtagtgttgtaagtatccatacataaggattaaatattaatattttaaccaaagtcaagagcatttttgtctttttctctacttaaaacagagcattaaaaaaaagtgtgtatgtgtgtgtgtgtaggagaggtggggacaggacagcttcttccagacttcctatgaggtacttacagtgctgatcacaatcaactctggcaaagactacttgatttgcatttgggtattcttccttaatgacattggaagcttcctcaaaaattgggtgcaacatctggctgaaacgacacctacgcacagaaaaggataccaattaaaactgaagagtagaagcaataaaattttatttttgttgttatctgtttatatttagtatttattatatgtacaataaacagaattaacaatcacactgttaattcaggattcctgatgtcattcattggagatgaaaacaatttgaaattcaaagactattccatttcagacaaataatttaaagatgatctctcacaaaggcaatgaaacaagtgtgagataagtcctctaaaatgtatctacttggatctgtaattactaagtctcaggcatttataaaggaaattagcttctctgaataatgaacatatttttagactacaaagtctttaaaatgataaatttattgcaaatattagactgattcacctgacaagttcaatcaaatctcacaggcaagttaatatgaaaatggcatatggtacagaccgaactgtttcctctcaaaatttacctctcgttcaaataggcttttgtatgtataagctattaaacatactaagttcaggagcaaaatttttttattctcaaaggagacttcctgtccatgttttctgtctgtagttttttgctctgcctttacttttaaaaggggccacaaaccccacaatattgtagaaacatgagacttctaattctgactgccccttgatcaagccaactacttcacaaatgtatcctctgagtcattaaaggcacctgatgagaaagagaagaatcagaatcagcacacaagcaggtgggctagaatggttattttcatatgaaaaaggtattgagtgtttattaacaacaacaagaagaacacaactataattcctactattgcttccagagcccttttccatcaagaaaggtacctaaatgaagcctgtgaactctaatccacatgtaattagatcaaagaaagaaagttttagtcactcagtcgtgtctgcctctttgcaaccccatggactgtagcccaccaggctcctctgtccatggaattctccaggcaagaatactggag

SEQ ID NO: 40930 - DNA, 1317 bp, Bovine  19866880782977
  misc_feature (1)..(1): n is a, c, g, or t
natgcatctatactaataatgataatacaattagccaacattcataaagttatgttatataagcaccgtcttaaatggtttgtaacatgtgaactcatttaataacaaaacaccacgaagagtttggggttctcttacttccctcattttataggtcaggatacggagatgtggagagattaagtaacttgtctaataaagaacagaactgagattgaagcctgcaagactgattgtaaagtccacgcttttaaatactaaactatagggcctccatgtgtaggtatatatatctacctatacacgcacattcttgtgtataagtacgtagagaaagacaaacataagaggaagacaagaaagttgctgagttctaaaccttgactcatgaaattcttggttatctagtttggacttttctgaacatttttgtgccatgagctcttttggcaatctggtgaactttgtgaacccccttctcagaaacatgtattttaagaccttaaatattacttaataagaatccaaagaaaatcagctgtatcaaaatacatttatcaaagtattttaaaattatgatgtagcaatatacttacattcattttttaaccaaataaatagcaagatctagtggcagatgtagcaactatgataatttgaaaatagcgatgagtgtaaacaatattttaagatagctcaacaatgataatgagataatatgtaaaaatattttgtaaaatctcaggtgccctcaaaatatatgtccctcccatgttgttattctcattttatatcaggacactcagcagttaagcagtttagttgcatagctaataactacacagttgaaactcaaaccaagtcattggattatggatcctatcttctttccattgttcccatgtggcttctataaaaataagcagatagtttttaaatcaccacaaatgtcttcccaagattgtgacaatctgaaagatatgaagtaaaaagcaggtgaaaggagataaatgcatctttgatgccacacaaaggtgacattttagagcaaacaaataagatatctatagggaatgctgaattcacttgtgtgggacggtatgacaccatagctattgtgtagagtggcacaacttcactgcatgtaacaggcattgcctctaaacgctggagttggagctctggcttctgcacgtaccagtctgtacagagactctcctgtttcagctaaccttaaaataaccgactgcagcagagcagtgggtttccagtcatggttccagctcagcttcctgaactgtgtatagactgagcaca

SEQ ID NO: 40931 - DNA, 1536 bp, Bovine  19866880814299
  misc_feature (1)..(1): n is a, c, g, or t
naactagatcccacatgctgcgatgagaattgggcaactgaaagaccccacatgcctcaacaaagagcaaagtcctgcagctgcaactaagacccggtacagccaaataaatagattacttaatttaaaaaaaaagacaaggccagaattaaaatctcaggtttatctgtctctaaaatctgtatcctttttactatattacactatacagtattacaatgaatcaactaaaatatattacccacaatacctctggtattcaattaaattatttgagcttaatgttaacagaaaaatctacacatctataaatgatagtcatagcatgaaaggattttactatgtatgtttgtttctagggcccagtactgagtcctgattcatctgaatctaggacgtaataagctatgttaaaacattaatccactgtattaggttaaacactaagaattgcaactaaaatgatgtctcattcaggaaaagcctcttcattcctcctccaggacaatgggcagcacagaaagtgttcgatttaattagctgtgtatgtagaaagagatgctcatctgtttccatggagtcaaacacatcacgacacacttctccatggaaacagagaagggaaaacggaaaatgctaaagtgaatgaattcatcgagcagttggtgagcaaagattgaaggaaaaaaataattcatctgtagtactatgttactagtttacaaaagaaaaacagcatgtaattaagagatcatcattcatgctacataaaagaacatataagatacactgaaatttaagatgtatcttaatactaaaaaataacatattatttggtgggaatatacaaatgttaggaaataccacagagcaaaggtattactgtctttgaatagaagacaaaaatggcagaattcttaaaaggtgaacaatattacagctcaaagtgagtaatgagtaagggattccttagacaacacaataaaatacatagaactaacttataaatacatttatcagttctgtatttgtttcatatcatgactgcttctttgtttttaaggaattttttcctttggagatataaaattatagaaatatttcaagttttattaggtaacacattaatttgtatgattgagcctatttaagtatttttaatttacaacatactgcacgctttgttcccctcgataattatatttcatgttaaaataatgaaagagttacaaaatatgttttcttgaggagttctgacttaaaaacttttttccaatgaaatttagccctaacttgtctcttaattcaatttaactcaattcagatttaatctcagccctctaaatgattatagacttattgggaagaaagatacttaaaacaatgataattttcattcacttcttcagcaagcatttctcatgtgcctactatgtgccaagcactgtgctggattttgtatgtataactatgactttaacagacctagtctatactcatggaggctattaaattagagaggagagagacattaaa

SEQ ID NO: 40932 - DNA, 2431 bp, Bovine  19866880815359
  misc_feature (1)..(1): n is a, c, g, or t
nctggatattttatcattttttataatagatttttaatgaggtataacacatatatagtactgcatatgtctcaagtatacagagacatctgtatatgagtgtaagataaggaaaccaaaagctgttggtgttgtttcccagaaaagtttcagaggtattctactcttctcctttactttttaaatcattaacatgcaaacatatttttaaaactgaaaaataatatttaattttcacagatgaattgagaattctctttatgaataaaaaaggaacactcaagcacaacctgagtcttctttaatttgtgtatttaacatgatataatttttcaaagtgggtgggtaatcttcatcttcttgaagccaaattaataacctcgtggaagattaaaaatgcataattattgacatttagtgagattgctaaagtttttttttatccttatcaacaaataaatgtatctgttgaaatcagagaaacagtagcttccctgaaccaaaacatttctaacagttagatatcttttgcgagaaacccaggaaaggtatgattgatttctttcttggattaaactgagtgtgctaaatgaaaaacaaactaggtacagacgtagactatattgagattaattttattctcatgtgtatcatttccttagctgcttggactaatagtaatttgtttccagagaagtatgtgtcagaataactaagtcaatcgacacagttcaataaacttttaccatatatgtattttgaaattggataaatgtttctaataaacaaaatggctagcatttgtattaataatgactttctatataagtaacataaaatgtattcattcattcaaccaagacaaatcagacactgtgctagattctgggacattcaaaaataaagaaaacaagtctctcatctggaactccaatctggtgggaaagacacaagtaagtaataattatcatacatatgagacagtggggctccaatagaggtatgaacaaaatgctatgcaaacatgggtttttcctattaatcaacctaagataccacaacatagctcattatcacaaaaaaacccaaaaccataataaataatacatgaaaatggttaatctttgggtcagtaatagtagcaatgactacttacatgttacagctattgagatttacaaaacatttagggtaaattaatatcacatgtaagtatatgtactttacagtagataggccaattttgttacttaataccttttttgttatttaatatctttatccatggtgtttgtgagcactttaagagcaggaatcatgtctttcatcttcgcattccaaggcctagcacagtgcctgtcacacagtaagtttttaacatgtgttgaacgtatgcatgcatgcacatatatatgaatatcaatgttacataagtagcacttttgagttcacagataacagaattaagacagacaatacttgaaaagaatatttggtatccaaaatatcagagaacttcactaaacaaaggcatgtgaagtttaagagggctcagtattgacagtacttatttatagcagacatattattcattttttaatattctctctagatgatgctgttaaagtgctacacttaatatgccagcaaatttggaaaactcagcagtggccacaggactggaaaaggtcagttttcattccaatcccaaagaaaggcaatgccaaagaatgttaaaactacgatacaattgccatcattttacatgctagtacagtagtgctcaaaattctccaaggtaggcttcaaacaatacgtgaactgagagctcccagatgttcaagacagacttagaaaaggcaaaggaaccagagatcaaattgccaacacttgctggatcatagaaaaagtaagaaaattccagaaaaatatctacttctgcttcactgactatgctaaagcctttgactgtgtggaatacaacaaactgtggaacattcttaaaaagatggggataccagaccacctgacctgcctcctgagaaatctatatgcaggtcaagaagcaacagttagaaccagacatggaacaagggactggttccaaattgggaaaggagtacatcaaggctgtatattggtcaccctgcttatttaacttctatgcatagtacatcatgcgaaatgctgggctggaggaagcacaagctggaatcaagactgccgggagaaatatcaataacctcagatatgtaaatgacaccatcctaatgtcacaaagcaaagaggaaatgaagagtctcttgatgaaagtgaaagaggagagtgaaaaaactggcttaaaactcaacattcaaaaaactaagatcatggcaactggtcccatgacttcatggcaaatagatggggaaacaatggaaacaatgaccaa

SEQ ID NO: 40933 - DNA, 855 bp, Bovine  19866880820018
  misc_feature (1)..(1): n is a, c, g, or t
nttattctgtgttcagttagtgaaaggttgtaagatggataggaacagcaaaactcaatgattatttaacaagtaataaaggggccacagtcaaacgcgcttgtcattggaagcgttattctgttatctcaagcgaacatggcagagctcctttatttaattagaaactgtttttactggactccttccaggaggacagtgggtatattctatggcgtgttcggggctcttcaggtttcagagttctcacagataggaattaaataaaaggggacagttaaaataaaaccctgtgacctgttactttctccaagagtaagagcagtgttgactgcttccttccccttcagctgtttgcggatggagacctttcctttatcctcagaaccaggcagataaaaattacatacaaatgtactgagttcttttggtgtttttcccagatttagaagacacacatcttgccatttcttgattaattactacatggaagttgctgagaggcaagcttggctcaacataatgaaggactcacatatgattgtggaaactctgccaggctgaatgaggagggtttgggttctaatcttaagagcagcagtaaattctttgtgagatcttgggcaagttgtttcccttcttgaggctgcagtctcctcacctgggggataagaagtggagccgagctcggccggagcgggagcaggtgagggcggctggccgggcagagctccatcgcgggggacgttcttggccgggaaaggtgcaattgtgtgcagctattcctggcagtaacagagaagaatttcgagacaaaggattttcgagcctctctagagaatggtgttctgttgt

SEQ ID NO: 40934 - DNA, 1581 bp, Bovine  19866880835996
  misc_feature (1)..(1): n is a, c, g, or t
ncagctttaaacagatggcagaatgggaataaatgtgttagctcctttctcttacttgggttttcattgtttatatcattaaaaataaggagagtttaaaataacatatatcgtcatgtagcgactcacagagacacgcaaaactagttggaagggaaagactgaatttggtcatactcctggttgttttgaaaataactgggtgaattcaagtaagtaactagctggctatttacaacagaggtttaaacctttaaagacacactgaactggtcaccaaaaactctggataattcagagactggtttaagaacatttctcctgtgttgagaaagtgggtgttgtggattatggagacttatactcccaaagttcaatagacttaatcaattatctagttaaggaataacaaagaaatgcatgagtgtcaacactttctgtttccagacctcaacagatagcacgaacctgttctagaatcattcctgctactagaggtttagtctcagaattcttctctggacagtggatgctgcttgttcatgacaagagtgggtatgtgggagccttttccccatcactgctctcatccaactcattcatttttttcagatgaagagatgggacccaaagatgataaagtgcccagaaatattgatcatggccagaactatactgctttgctctataaatgcttactagtgaagtcaaagtctctcagtcatgtctgactctttgcaacctgtggactatagcctgccaggctcctctgtccctggaattctccaggcaagaacattggagtgggaagctattcccttctccaggggatcttcccaacccagtggtttacaaatacttatttcctatgtgcctggcactgtgctaagcaccctacacaaatcaccccatttgagttcacaacaatcttatagaagcaatttttgtttctatttaaaaaatgaggaatcagagttaggtcaaatactgctcttcttgtcaggatcttagagtaagctcacatgaagtccctttctcttctttgaattcataggaaagttaataaaatacttgaaatgcttaaagcacataagaaataaagggaataatctgtggatcaggaataaaaaatctatttatctatttagtaatatttaggagtcaaagtggggccgtggaaataggaactgcatatgagctccccccaaattttggggggctctgaagtatgtctgagcttgcactgtaagctacatacacccacctctatcaaaaagtttcttatgaaatcaggaacgtgttacggaggggagtgaatttgtgctgcaccgagaccattttgtgaggtgtggacagacaacctgcctcagaggacttgggttcacatgtccattcttgcctctttgggaatgtagctttcattctctagggataaaaaagttcctcatcttccaaacagagtattaatgcttctactgtatactcgtagcttcttaaatttcagttaggtaggcagcctccaagatgtctccctgaggatcagtgatgagtcatcatgctctgtaacagtccccttgcaca

SEQ ID NO: 40935 - DNA, 1279 bp, Bovine  19866880851158
  misc_feature (1)..(1): n is a, c, g, or t
ncctgtgaaggcccgtaaccccttgaatatgaatgctctgaatacatccagttttttgtcagcataattgtccgagtaaacaaacaaacaaacaaaaaatgacccagctatatgttttctgcaagaaacctgctttaaatacaaagaaacagaaaggttaaaagcaagggaatggagaaagatacgccacactaatgctaacaaagagtagctatattaatctcagacaaagcagaccttaggacaaggaaaattatcaggagtaaaaaggggcactttacctaatgataaggggttaattctcctttacagtccttaacgtgtatgcgcctaacaatggagcaccaaaatacatgagacaaaacctgacagaaaggcagggaaaaatacaaatgccttgtaagtagcacatgagagcaacagtgcaaaaattaagttcgtgaaagttgccgtttctttcagggcagcatgattgtcacagaagaactaagagaatataacaatagggcaaaaggatttccaagacaccaaatatttctagattcctgttggagaagctgctggggctctcttttacaggattatagaacctgtcctcaatcctttgacaactgacactctcaccagtaaaccttttaatcctccaactagtgaaatacatttaagggataggaaatccacaaaattcacaaagaggccacccttcctcttctcagcagggcaaatgcccaaatctcattgtcacaccgtttacgggatttttgccttctgtgggcctcagtggattacaggagttttttgaatggtatttatatttcctctagccaaagacacattaactgtagtatttctttggcagattactactaaagaaagaaatgttgcttgctccacggaaataaattgataggttcaggaactgtcactttgcttatataagtgaatgcctcaaaagataaatgtttcaagcctgagcaaatggttttaaatacagaaaaaatatcctgaatccatatacttaaacattacaagacataattggtaagtttgaatctttttaacatctggtaagtgctttcccattcattcaatcagttagtcagcacagccaatatgccagccactgtactgagtcctgctgactgaaagtttaaaaagatctcatttctgtcttctgggggctcacagtccacggggaaagacagacatgtcaataaatacaatacaattaacaagcgctattattagctatccctacacaaggctacagaaagaagca

SEQ ID NO: 40936 - DNA, 1005 bp, Bovine  19866880859736
  misc_feature (1)..(1): n is a, c, g, or t
nataagaatactggagtgggttgccatttccttctccaggggatcttccctaacccagggattgaacccagggtctcccgcattgcaggcagactctttaccctttgagctaccagggaatctgggaggaatagttaagtatttaagtgaagcaggcatggtagatacaacatgtaacagttatgtgtctttgtttttagcatcaagcattgcacaattctctcgaataatgtagatcatcttttactgaatttaacgctgtctgatatcatggtctccctggcaaatgcctcaactttgcagaaggattccagttggatagaaaggataaggaaatttgtaacagaaacccttgaagatggctctaggctaaatagtaagcagctgaacagattgcttggagtctcctggaggttaatgcagatacagccaaacagaggtaggtgttaatgctttgtccagaggaactcttaatgcatgctgttaatatttagagtctaactttgagttcataactgtcaaacatttcacatagtcatttacgttcaagccataaaaggtagctagcataatcatgaaggaatatctccttgaaccctgatggctgagaagacccctttttaagtgggtaggtccactcttaagctgatggataggttttctactggattacatacttggagtgaaaggaggcaagttttattaagaggaagtgacattgagcctaaggatgaagaaatactcttttctgatctaatttgactagaaattgatacttatctctttacctttcttgtaacttgaagttatgttgcattaagtcaatttttagtgtgacttactaattcttttcattcataacagaactttcctggttggttcctggcttatctacctttctagtattctgttttttgttgtcctttcctaggtttgttgtctcttaggaaaatttgtactgcaattgcggtggttgactttgtattaggccattatgtaggattt

SEQ ID NO: 40937 - DNA, 1253 bp, Bovine  19866880872235
  misc_feature (1)..(1): n is a, c, g, or t
nttgtttggaggtgactcttctagtctttctacctgtctggttacttagactgtttcttcaaggatgtctgcacaggaagtggccttggaatctagagacagtatctcccttcaggcaggaggatgaatctgcttgctgcccaaggacaacaaagataacgtcttgtttgagggaaaagtttgggcaggtatgctcacattcctgaggtaagatttctaagctcaagttttctcaaatgtgacacagtcccactccctgtgcagcatctgcctggacttgcttctgcatcagcgtagtacttggggacaagaagaatcaatgacgcctgctgtatcataaataacaaactatctaaataaatgtgatcttatgggctcttcatctgctgaatctatgtggcaagacaacctaatagctgcaatagcttgactgcttgactgtattgtcttttgagggtgtgctcatcaattatttgacaaatgagttaatgaatgaacgaaactggctgcagcatggagaatggttcgagaaggaagaattgaatccagagtgctgacaggctactttagttctttagacattaaattacgatggataggattagaatgatggaataacaggaatggaaaaaagagccaaagtggggagacctcagatatgcacacagattcatctaaaatccttggctggcccctgaactgcaaatgcatggagaaactccaagaagtctgcagaaactaataaactgaaggttgaaaaagttgatcagagatttcagctactacccagcacagaggagacagaatgtggagttttgagtctcacctagttagagggcttgatatacttcttggggtttccactgaaatctccaaagagccatgccttaaaagcataggttatgtaccagggctatggatcaggtctgaaagattcaacaaaagactatgggaaaaaagtaaaacatttaagttcagtgtgattaaccagttttaactacctgataaaacaaacaaaaaaatcaacactctctagaggaagacaacagaatgaggagtccctataacataccacctaaaattgtgaggacatgataaaaaattactacacatgcaaagaaacaaaaaaatttgggacaaaatagaaaaaaacaattaatacagacctcaagatgactctttggccacctgatatgaaaaactaactcattggaaatgaccctgatgctgggaatgactgaaggcaggaggag

SEQ ID NO: 40938 - DNA, 1018 bp, Bovine  19866880901769
  misc_feature (1)..(1): n is a, c, g, or t
ngtgatgcctccgcctctatcctctgtcgtcctttctcctcctgccccccatcactcccagcatcagagtcttttccaatgagtcagctcttcgcatgaggtggccaaagtattggagtttcagctttagcatcagtccttccaaagaacacccaggactgatctcctttagaatggactggttggatctccttgcagtccaagggactcacaagagtcctctccaacaccacagttccaagaccctgttaatggatctatttgctttggttgtgtcacttttgtaaatgtaactttatattggaattgaagttttattttatcttcccctttcaccttttggtattataactgatcttgttttaaacatgaatctgtgtataagtgcttattgagcaacaaactggacagtccagaaaggagcccttaatatctctcttttcttgcccttaagtcaggattctttactaagccatatcctaatttcttcaagaaatcatcatgcaatccttaccccttgcctccctggccctctagaaccctatctttagcaaactgtgggaacccagaaacctgtgaccctagcttgtccagttcctccatcctaccaatttattcatttaacagaaatctactgaaatgcttattagaatatgtagtctcagaataagacacggtccctgatgtctgcagaccctacccacctatcccagatgggagagatttaagaatgctagaagaggaaagagccacttgaaagcgagagactgaagatacagattgtgtctccttggtattttctaggacatctccttaggaagtcaggtgagtgggctagaagagttacatacaaagagaaatagggaggaagtataaagtttgtatcctgtcatagactttatatttttcttaaattataattaatatgtatgacctaattgcacttcgctggctcagacagtaaagaatctgcttgcaatgcaggagatgtaggttcgatccctgggttgagaagatc

SEQ ID NO: 40939 - DNA, 3794 bp, Bovine  19866880903158
  misc_feature (1)..(1): n is a, c, g, or t
ngaaacagtccataaagaaatctgctggcttttctggctttaggaagtagagatctgctaaccagttcatcagcaaagcatggtgccatccctgctgccctttccataactgcactctggatgccagttccactactgtggtactatgagaaaaaaagtgaagttctcaaaagttcctgagcatccattgaaacattgcttatctttaccttatacagcatttctaaactctgtagcaggtatcctttggattaaaagcactacatcttccttggtttatgtaattactggatattttttttgatactgcaaacctcaaatgagcaaaagtcagtctaagtggtctcagaggagaataaattttggtcaaatactatggctagaatttaatcacttagcagccaggaaagagttagaagatggcaaccgttctttgagcagagtcccctttgtggaacataatccttttaagtttaccaagaataagtcaaagcaaatctcacctacttttctgatacagaagaggaccgtagatataaaatatttctatctcaatcaacattatatcataccaagtgcttcataattacttatatatcagaagaagaaatatagattgaaagataacaatcatatggttgcccaatgagttgtatttactgtaccaaggtcaaccaggagagaacactccattggtgtaaaaggttgcttaactagcttcatctcctaatagctttctcagaccctaaaaatgcagtaccaacctagacaggtagtcttccaaagttactatattagttacacattttctgtgcattcctatgaaaatatttgagtacttgacctgtcattttcccctgagaacttctgtactgtctcccactggtttcttctaggtcccacctaccagaatctaagttgctcttacatttagcattttaatttttctctacaatattcaatcaaatccctcatggtaggtaaaactctcacacaaaaaaacccactgttttttccacatcttaataagagatactttgtaatattagtttgaaccacttttgaaaatcaaaagaaatggtagtggcggattcattttgatatttggcaaaactaatccaatttgtaaagtttaaaaataaaataaaatttaaaaaaatatatcagcaatttcatatcgttctacatagaaaaccaaatccaaatgtcttctgctaaaaattccattggaaatcatcacaatgggggtgggagactgtaatttatagaagtctgtgaagatgataaaggcaagcatttgaagaagcagatattaccgctaatatcagctcagaaaaacacattaattggataaagttcaatgagcttcaagcacgtttttctccttctctttacaactctgttcctgaagatgaaccctttctctttctgcttgatcccatgaaggtcactacttccagcaaacttgagaatttaccatgctgtattctaatgttgataattttctctgtgcttgatttttgagtcttcctataaacaagggaaaacaaagaaatactctcttccttcaacagctggaattcaacagctggaaattccatttcattctgttttaaattcttaataaaaaacattttacacaaaatttatcaagtaaaattacaaataaaattatgcataaaatgttttgtatttttaaacaaaagtaatctagaaagagtatttatctagtacattttgtaaaatataactgcttttctcaaagtgaagtgtttttgtaattaaagatgtatatttatcttatgtttagattcaaggtggtttccctgatggctcagcagtaaagaatccattgtcaatgtcggagacacaggagacttgggttcaatccctgggtggggaagatccccctggaggaggaaatggcaacccactgcagtattcttgtctggaaaaccccatggacagatgagcctagtgggctacagtccatggggtcacaaagagttggacacaatggagcaactgagcatacacgcacactagattcaaggtattacaaaaatttcacctcaccagtctgaattatagttcataataatccttcaatgaggtccccaaaagacagagctgaaatattatagaatgtgccttgccattaactatttcaaatataattttccttcaattttttattaaagaaaatttatggccagatggaataaaacgcaagtatctaaaatgctaacctatttataatatatgaccaattaaaaaaatgggaaaggggaactgagaatatgttgcccaaaagaaaaatgactaaaagggagatttttataatttttactgtttcttaatttgatcatttttgttgtttcttaacatcaaaaatatgaaagcataatttaatgaatctgtagaatatttaggagtgaagagatgggaggaaggtaaatggatatctactttattcttaaagtgtcctattttcatggtttttaagatagcaaaatattttatgactagattattaacgccaagaaattaaaaaaatttgaaatccaggtaacaaagaggatttctccaagcctgaattattttctactgtcttttctcatctttagatctacgaatccatgacctgagcagggcagcttattgtgaaacaaaaaatgaatgtgaaaatagttgaaattatgggtgttaacctacaatgatttatattttaggcagatattatttcatcctgcctagttctgtaaaattctttcataaaagtccccgactctcacaaaaacagtcagaacatgatggaagaactccttttttgagtttgtgactcatatagttaaaacttcacttgaagtatcagagtttcagtttaagttccttttatttttccctctgaggatgtagaaagtcataagctatccagatatttcaggtagaagaaacagacatggaataaaataatcagcatatgctatgggtagagatagaaattaccatgcaaattatttatctgcctggttgaatctgtctgcacttagcaagccaattttaggcaagacacaatgctagataattctgagactttaaaaagggggcatttttcctatttgtctgttgtattttttcctcaatataaatagataaagatgcttccaataaaactgaaaaatatgaattgaaaataaacaaaaggacaaagtaaaatataaataacagctatagaccaggggaaaacaagctcagataggcaatctcaaagccttcccatattatggactataaactttactctaaccttctggaatgcctcgtcaaagggaagtattattcttataattcaagatgctaaaatgtagctctgtatataagttaaataagctgggtgacaatatacagccttgacgtccttccttttcctatttggaaccagtctgttgtttcatgtccagttctaactgttgcttcctgacctgcatacagatttctcaagaggctggtcaggtagtctggtattcccatctctttcagaattttccagtttattgtgatccacacagtcaaaggcttcagcatagtcaataaagcagaaatagatgtttttctggaactctcttgctttttcaatgatacagcagatgttggcaatttgatgtctggttcctctgctttttctaaacccagcttgaacatccggaagttcacagttcacgtactgctgaagccggcttagagaattttgagcattactttactagcctggagataagtgcaattgtggg

SEQ ID NO: 40940 - DNA, 595 bp, Bovine  19866880909830
  misc_feature (1)..(1): n is a, c, g, or t
ngtttagttggtgcctccctcctatatcttaactttgtgaaaagttaccatatctatctttttttcacatgaatcaccaagcactttgcatgacagttggcagataagtacatagtaaatatttactggatcaacaatatatagtatctgtatttaaagaactttagtagaatgttgaagatacacagagaaaataccatttataaaatgtacaacagaagatagcagtttccgaagtaaattaggattgtccagatgtaacattcagagaagaggatggcaccccattccagtactcttacctggaaaatcccataggtggaggaccctggtaggctgcagtccatggggtcaataagagtcggacacgactgagcgacttcactttcacttttcactttcatgcattggagaaggaaatggcaacccactccagtattcttgcctggagaatcccagggacggcggagcccggtgggctgccatctatggggttgcacagagttggacacaactgaagcgacttagcagcggcagcagcagcagatgtaacattaaccacagaatgtggtagaaaattattgaattcagtcca

SEQ ID NO: 40941 - DNA, 764 bp, Bovine  19866880938859
  misc_feature (1)..(1): n is a, c, g, or t
naggacatatagcccagcaaaaaatatgtactaaaagcataaaatgtactgtgctaggtgtaaataatttccccagttagtccaagtggtgaataaccccagcttttgttctatttggagcacctgtgtgtaatccacgtcataaatattttcaggactattgcttagtagtcaatgagtttctttgttggcacagaatttaagatatttccctaataaggacacccagtgttaaagcaatgaatttctatagctatgcagttcagagagttacctaggagatgaaaagctaatctgtctggaatttctgcccttgagaccaaagatactataaatttgctcgggaggaaaataatcatggtaagcatcttaatttcttccatctcgtttccaagcagatgtcgctgtgttttagcctggaattcatcatctctctgatacatcaacattgacatattacatcttcatctcttattatagaaaatggaaatgaaactagaatgtgaatatgttgaatgaatcggactccccagagatttgggggagaagaaaacctcccactcgcctttgacttttggatttcttatttccctcatgtttggattgcactttaagaagtccatctggaagttcactcttttatattttacaaatgcaagtagagcttattatcaaaatacaaacccctaaaagaagaaaaacctgtgagcagggattgggtaggggggcacaggtcagagaatcacctcagaaatccagtgatg

SEQ ID NO: 40942 - DNA, 1893 bp, Bovine  19866880945559
  misc_feature (1)..(1): n is a, c, g, or t
nttctgaatgttgagctttaagccactttttactctcactttcactttatcaggaggcttttgagttcctcttcactttctgccataagggtggtgtcatctgcatatctgaggttattgatatttctcccggaaatcttgattccagcttgtgcttcttccagcccagcgtttctcatgatgtactctgcatagaagttaaataaacagggtgacaatatacagccttgacgaactccttttcctatttggaaccaggctgttgatccctgtctcctgtaccatgttgaagcattatgggaaatccaaacaagttccaaggactggctctgcttcatgcccttttagccaaggctgctcactcacacctgcatggcgactgggtacgggtcctcactggtccagctcaggttcagatcccatactttgacttcttatctctgatgctttccagatttccatcatcctctaatctccattattctgaaaccaataataaaaggagagaaagggtcagccttctattgtggggattccttaattcccgagctccagccctagaagcacctccatatttcctgttcctcctttgtcccattagaagcaaaattactagactttactcaaaaagtggaaaatagaaatcatagaggacaacagtatgaaagttaatatcttgttatgctctcatctgggaactgattgagtttctaaaagcccttgaggtgctcctgctgacagctgggactgagggttcaaagcagagaaacagagcatgtggggaaatgcttttactttgtgattttcttctcaaacctggccatgggatgtaatatgcaaggggggagtggaataggaatataaatattgcaataatgatgataatgctttcatacctggcatggggatgagatttcattaggatgaggcagggagaataatgaaaaggattctgagatgctgatgaaacccagagtggtgtggttctgcgtgaagagtgtgttaagaaacctgagaaatttctgcctgttttagtctaccatcaaggaaactatcttatccttttcccccacattttctgttatgtgtggcatgactggagattaggatagaaaagatgttcctggagctttctctgaaaacagtggccccaccccactgacatggaaaggattgatgctcagaattaccaacttgtaaatgaaaattaatactgtaattagccaaggaaaatccatctctttgttaatagagatacttatagattgtgatattccccttgggatcaccaggttatttaaaagggataaatcaggaaccacattcaagcccatgaagaatgccagaaatattcagagcagacatacgcctaaaacagataatattttcactaaagttgtaaaatagtagataaagtggttttttaaaagatacacatttgtggtttttaacacttcttagatggaaaatgttttcagattgacttttgaatatcaacattgtcacctggacaactttttttctagcaaacaaactgaagacactggataaaaagattagtctcacagaaaaaaaaaaaaaaaaaacgatgagatgaatacagcatttcacatgaaagcaagggtcaccaaggatgaaatataaacatttgatagacctgtagctctgataaaaatctatatgatggtacatttctatagtggtcaaaatatggagcctgctttcatatccattaactcatttgattctcaggagtatgtaggaagaggtaaacgagagagatggtaaaaaaaaaaaaatcctcattttatagataaggaactggagccagaaagattcaaacccacattgcctcccaggtattaacagactgtgtgtatttaatgtttgatg

SEQ ID NO: 40943 - DNA, 1486 bp, Bovine  19866881045227
  misc_feature (1)..(1): n is a, c, g, or t
nttaactaacttaattcagattgctttaccctctcgcagacagttaagaagtaaagaagcaaactggggggaaaaaggaaaaagaaaaacaaagctgtctaaactgccagacctaatagggcccaaatgcaagtgactcatttagccctaccttagtatatattattgctcctgggcctttgttcactatattcttcctttgtagaatatcctttccccattttcatacttccaaactctatgcatttcttccagaccaagctcaaacaacacctccatcagctcttcaaagttttttaaagttttgggatgctcagagttgggaagatatccagttcccctgtgaggcatgagcaaaacggtgcccttgggaaggaaagtaatatttactgagcagctactgcaaatcagtctggcatttcatgtaattctcacaaagctgaacaacctgctcaaattcaaatagctggagagcaaacagagacagaatttgaactcagactttgctgaattcagacccaggtcagggctaattgccaccaagacttgggcattcatgtcaccagaatatcacttatatccccagtctgctgaggcctgagaacactggtgctctaagacgtcctcaaggacataaaaacctcacgcttcaaagaatgctacacaacttgggtgatcactggcaatataaaataagttgaaaatgtccaatttttaaagtaaggaaaaggtcatctttacaatgtaaaaaagtcaatggatggattcattgtcagtgtagttgaccatgaaacaacgctggctttcagccattcgctgcgcccccctcagtcaaggcacttgaacaggcaaaatgaaggacccaggaaacagacattcctatctgcattgccaagaggaggtccagctcctcatggtaacttcccctctgcgctggaagagttgaggctgggccagaatagcttccccatgacagcaaagagcaagcaaaagcggctgggatgcgggaggggcaagggctcagctcctgatgacgctggctgcccttcctcctgcgctgggactcagggcagagaccaagcacacaggctgggagagacgctctatgctcctaggaaccatcgacacgtgtgtgtgtgtgtgtgtgtgtgtgtgtgtgtgtgtgcgcgcgcgcgtagcaagtgggggctggggagcgggttcgtcgtcagaaccgccagctaggaaaacccttagggattatctagtccaaccccctcatttcccagggcaagttactgggggcccagagagggaaaggaatttgttcactgtcacggggaattcagtgacgcaggctccccgtgctgggttcagtgtaggacagtgaaccctgacaagggaccctgggtttccattgtatgcatcagaaaaatcaaaataatcacagagctcagtattttccagccactggaaaagtctaacttagttaaatccttgaagcaca

SEQ ID NO: 40944 - DNA, 3166 bp, Bovine  19866881256195
  misc_feature (1)..(1): n is a, c, g, or t
naggacatctttgaggccgttgacgacagagcctgagtgtaagttttaaatcagtggaaattgggaagttggctgggggcaggaaagagctgtgaagcgttcaatgattgaagtccactctgaggacagagaacatttgtatttagagggggaaagcacaggaaaggaactccaacagtggagcagagcttccgtattacaaggctctgcagtctaaggctaatgagggacagagttcctggagacaaaatggtggataccttgagtcaaggaggctgaagaattagtaggacaggtgataagtttgacagaaagagaaaatgaggttgtgacagagtataggctagtagctctgtgcttgggtagagtttcttaccacttgctgatgagcaaggaactcagggtaaatgatctctgtgctcagagagggggcaggcatctaaagactaagtttcaggaaggctgccagaggttttgtagccatatagacatgcattcaaatctcacgggatgtcaggcaaggtactcaacctctcctagctcccttcaccattttcagacaggggataatgacacctcagaagcagtgagcattaagtgatgtcatggatgagtatttctatcaggatagctggcacacataacagatgcctaataagcgttgagtctcctcttctcctcaaatcaaatacccttagaaccccagcctggaggatgaccagcatcacggcaggtgatcaggttaaggggctagtgatccctgggctgactgttagagccatgaaataggctgagatttaaaaaaaaataaaacaaaaatgccagtgtgcttgcaaaactaactgaatagaacacacaaaagtattgtttatagtaacgtcacaatgcagttcaggatgacactgaagaataattttctgaagtatcttttgaaggattttgttcatggtgaggggtgtcagatagtagatggtacaagaaccaccctctttgaagcctgatgagattttcaacctactgggcaaagtacagactttttcaaatatttggacaagatgatagactatttaatactctcagatttttgtattctctgttttttgactttgttcttttccatttttctcctagtcttagaacaaaagtttataagtagcttggtcacgaagctacctgatagaaaaaaaatgggggagagtgtgaaatcagtgcctaaggcaaaaaaatcacatataatcaagattatctttgaaaataatttgcattatgctttttataagctcaaaagtcaatgtttagtcaaaagaattgaaagcaaagtgttgaaaagatatatttgtacatgcatgttcacatcagtataaaaggaggaaacaaatcaaatgtccattgacacgtgacaaagtgtgatatattatttgttatggaatattatttagccttaagaaggaaggaaactctgacatgtgctatagcatgctgaatcttgagaacattatgctaggtaaaataagccagacacaagaggactaactccactcatatgaggtacctaggtagtcagattcatagaaacaggaagaagaatattggttaccagggctgtgggagggaggaatagagagttattgtttaatgggaacagagcttcagttctgtaagaagagttccagagattgtttaaacaataatatgtggtcttaacatcactgtacatttaaaaatggttaaaatggtatgttttctgtgtgttttaccatattttttaaaaagtcaatcaaaattgtgcacaaaaataattcttgtgttatctttgtccatttaacctatggaaattcatccataggcatatgccccttatctaaaactaatctttcttgccgccttccccactcaaaccagacttttgtccctagagtccccagagaaagagcttctccactccccttctcttttatccctttggtccagacattgacatttgaatttgtatgcaagatggtgcttactatatctctcattctattcttacaatattttatagttgaggaatgaaggtactgtcaagaagcagagagaagtgtttggctcctagaccacacacagcacctagatgtcacagaaaatactttatgtatgaaccaataaagaaaatcatgagaactcccacatttctgtttttgagctatccgtgcattaaaaaaacccatatttggaactgtgagattaggtttgacataaatacacttccatgtgtaaaatagatagctaatgggaacctcctgtaaagggagcacagggagctcagcttgatgctctgtgatgacctagaggggtgggatgggggtggggagggaaagccaagagggaagggatatacgtatacatatagctgattcatttctttgtatagcagaaacacaacattgtaaagcaattatatgccaattaaaaaatatttgtactcacttggaatatatatttgggatatgctaagtcatttcagtcatgtccgactctttgcaaccctgtagactgccaggctcctctgtccatcagattctccaggcaaggatatggagtgggttgccatgccctcctccaggggatcttccccactcagggatcaaatccgtgtctcttaagtctcctgcattggcagtcaggttcttaaccactagcgccacctgggaagcctgtatgtttcggccagtgttgaataaaagttgtatttgcattgcccaccggggcgtttctaagcaaaaggccgagtaccaatcaatctttgagaactctaacccggattcttataaattctggttcacaaataactgatatcccattaatttgaaacagaaagaaatcctttacatgcctaaatgatacttttaggcaacaaattgttaactccactatatacagttgaaagcaaaagcttcatacactgcatgtttgtatctcctcaaagcgcccaattgtgctttgcttgcaggaagtaatcaatagatagttattgaatttagaatgtccctcttcccaatcagtgaagtttaatatatttctgattcagaatgcctattaatttttcagcactagtaagcctttaaaaaatccatttgagatatgtttaagagttcacatgggggttgcaaagagtcggacatga

SEQ ID NO: 40945 - DNA, 1183 bp, Bovine  19866881277376
  misc_feature (1)..(1): n is a, c, g, or t
nataaaatgtttctttgtctcttaaccaaattcagtctccttctgttggcttgagcaacaccaggcaggaagacttttattggagctcagctggaaagggctggtaacaatagtggattctgtagccaaatagaatgaaacaaaataaattgcagttttccctacagtgaaagtgtaatgtctattacactgaaaaccatccaggagtatgtcaagccccttatcagtgtcatggggcatgaaaaatggaagagtgagtagtttcccctggggaagtccacagagggcagtccaggtctcagcagatgagggaggtggatggtgagcggtccatcgtgaagttgggacccagggcacagaggagagaagtgggactcaatagcgaaagatgggatcattcaagaaataagcaggatacctacaggagaaaaggagggtcagggatagcctttcattctgtgatagagaactgtagagatgagaagcttgttagaagatattcccccaccctacatccgatcaaatattctaactgtggcccagactgggccagcgtctcaggtaatatccacttggtctcaaagagaccatgagggctactgaaggtttacaaacagatttccagagccttcctcttgtctcctaatacaaaaaaataaagtattcttatcccacattaattttttatccagaataaattttgcaattaaaaaaatcaactctcaatctttttaaatatgttaagttaaaatgtgcaaaacaactattttctccttcctttaaagagaaacagagaaacctttaaatttgctttttcatatttcataggagaaaaaaaatggagcaaatgatgtgattgaagccaaggttgtctataaagtgtgaaagcacgtcctttccttcttagaagccagggctaactctaggagggagaggaaattagcatgaaagttttacttaagttacaagatgggtgagggccttgcctgaagatggtatctccctgtctcctgtgacagacaatgaatggctttcaaaaccaaggtcattctctttattatgtaaatagtttctgagaaactcacagtctgttctattggagtaagtgtgatggtgctgaaagcaggctgacccctgggagtttagagggtccgctgggtctgtcctcaatctgctacctatg

SEQ ID NO: 40946 - DNA, 934 bp, Bovine  19866881374342
  misc_feature (1)..(1): n is a, c, g, or t
ncaattaataaggaaaagaaccaaggcaatgtaagatttttcagattatgttttcagtgtctgtctacacaatgatttcctgagctgctcttgatcatgaaggaagaggagtggccaggaagggatgttagcagagaggggaaagaatggcagtgaagctatgcttaaacactcaaaactcaagttcactcatgtgcttgtccctcagagataccctctggcttctaatatgaggaaaagaccagtccctaaatctctgagtaccaacacaagtggacgtttgcacaagtagaaacaaaggcctggagtcctactttaaatgcattttacatttaatgtagttaacacacaatacattaaaagtttcacattaaacttcttccagtgagcctagtttcaagtgtgaggtggcaaaaaataacagctcctgaaaccattttctctttttttcaaggtgtcctttagggaagttggagttacaacaaaggaagtaaaacagaacctttgctttggtcttctttccagctttcctgtcagcctcaggctcactctcagtgccagctatagccccacctcctttcctctgacaagtcttggctgcagcctcaccctggctgtctccagagtcaagggacctcttcaaccttccccctgaaagcactaggaacctctcctcctcagcatatcacatgcttgtccttcttccattaaatttgggtaattattggttacgtgtctgtcttcctgaagactctgagcttcctgaagacagtggctgtgcctgcttgttcactcctaagcccatggagccaagggcagtgcccggcacaaggcggtaggtgttggccgagccacaccctcattagtttccccttcctccccagggtctgagtcacttaccaccaagagctatttgcagagcacacacgacgtg

SEQ ID NO: 40947 - DNA, 1510 bp, Bovine  19866881428208
  misc_feature (1)..(1): n is a, c, g, or t
natcacggtgacacgaaaggaaaagtctgaatatttttttggtgaacaagtgggcatgaactgccctgccctccaagttttggacaataatggttcctccccttcttccttgtctccccaagaaacagccagagaacattctaaaggccgatctgcctgtgtccacttcagtcctagcgaaggcagtgatgggaacaggcgtccaggagtctgccctgctgagaagcccagaggtgagacagctggtgagcagcactgtgacaaggggaaaggctcctccaagcagccctcccatgtcaagggggctgggcccgatgcggaaggcgaggagcccagctgggcagccacaagccttccacagcaagacagccattggaaagccagccggcggcaggacgcagcacccaaggccatgcgtgcctcccagaagaggcgcagccaggagctcagaggagggaggcgctccccggccgggtccagccggcctggcagtgccaagggggaagtggtccaccctgggcagagtcctctccaccaccggacaccaaggaacacagtgacacaggacaagctcgcaggagggacctcctcagatttgccaccaagcacagaggtgttgagatcaggagtcaggaagctggggacatcggcccggtctgaagacactcggctacccaaggagactgatccggctcctggtcccctccctgggcagactgtgaacattgaccttctccccgtagagctgcggctgcagatcatccagagagaaagaagcaggaaggagctgttccgcaggaagaacaaggctgcggcgatcatccagcgggcctggaggaggtatgaaggcagggcgccaccacagctctggctctgtggctgtcctccacctgacgcgacactccctctgctctgggacactttctttatatgcagttttatttatttatggcttctttgggtcttcatggctgcatgggcttttttctggttgaggtgagcggaggctactctttagttgtggtgggcaggctcctcactgcagtggcttctcttgttgcagagcatgtgctctagagcacagactgagtggtggtggcacacaggcttagttgctctgaggcatatgggatcttcccagaccagggattgaacctgtgtctcctgcattggcaggtggatttttttttttaccatggagccaccaggaaagccctctgtgatactttctagtggattgcatgtgctggcctgacaaggccaactttactgagcctacctatgagattcccacatgtttagatcttaataatttatattaagctatttggaaggtgtttttacccagaatgataggaaaggacccaagatagtggggtgtaaatgaaaaaccaggaagcctgagtttcaggtgaagctctaacacattatccgatgttgagcaatggcctccctgacccttcggtttcctcctctgtaaaagggtgtttaacaattgctgcaacctgtc

SEQ ID NO: 40948 - DNA, 743 bp, Bovine  19866881428810
  misc_feature (1)..(1): n is a, c, g, or t
ntagtgagctgaaggcagttgctgtgggccaggctcctccccatctcacttaggttcttcagactggagtcaacaaagccaggcttgcaccagctggcagggagaaatcccaacccagcagatcttcagtgctcacttttcttagttctgcgtagagttattataaagtcttcttttccagtcctactgaagtggaggcagatgggcagttctgcacaggtatggactaccctggtcctttcagtgcagctgaagaatttacaaaacagtgctatgtgagagcagaaggaaaacatttcttttcagttgttaccacatttttaggctaataaggctttgggatattaaagttgcgtaaagtgtaaaagctaatcagagaacttgaagtctgcactagctatccgagccccccgggcacagtcttcctccttaggcagtcgaagctttagtttgtttcttgatgggttagctgattgcaggttgtaagaaaaattctgtgatttcccactgttcttaaggaggtgaatacactgcaagttgctcactgttaaataacagatactcaaattattaatgctgaagggcagggtggggaggaaaaggggtttaggtttggactacccatgggacccaataaggtgatggctggtttatggtagagacaggatgacatcagcccctccttttccatcctctcaaagatacttgacatctttttaaggaagaacctgactgtgaggggg

SEQ ID NO: 40949 - DNA, 985 bp, Bovine  19866881578376
  misc_feature (1)..(1): n is a, c, g, or t
ngaataagacagatcaaatccctcacttgtttctttacctgaatttgatcaaatagattttctagttctgacattttatattcaatttcaatatgatttccgttttcttctggtgcaaatggaaacataataggaaatcaagagtcaagacaaaccacagtagtagagaaccttggctcaagatatatgaggagtaagaaagagctctcgaaatagtctgcatgacttcaactctctagataaattctattccataatgcacaagaaaaacagacactgtttatcatcctctgagccattttgagacatcatagaaatgagaagaggtgcttaaacactaaaaataagcgtatgttctgactttttgaaaaaggaaattatttgatcctgcaaaggcaggaaaagtaagtttaatgcaaacctctggaaaaattcaggcagattattgagtgtagaaaagaatgcagggatgaccaggaagcaacatgagtttactacaaatgcatcagccattcaacaatttcatcatttacattgtaggctgcattattagcagacacatttatttattggtttatcagatttaagataaacctaaatttaaataataaaatcaactggatggtatttaactttctttctatgtcccaagtcagtttatgtaccagcaattatttgttcctcagaagtctgggtaaaactcagcagtgagtccatcctgaccaagtgcccactctagctcctgcagttaccctgaaggcaatgttttcattctaataatattgccttcatatggaacatctctaattccactttcagaattttcttctgaagtttactttctgtctctacaagtagaaagttattgccctaaggagaattgatttttaactttttcataaatagtcaagtctgtgctgtgctgtgctgtgctaattccttgggttgtctctgactctttgcgaccctatggactgtagcccta

SEQ ID NO: 40950 - DNA, 1211 bp, Bovine  19866881656524
  misc_feature (1)..(1): n is a, c, g, or t
ncttgaggatgagactaggagttgaactccctgtggtaattcctcagttaggttcccttttcagtgagctttactgtggtatttatagatgatgatactactgcaagggactcttgagatcttgtttgggtgtgataaaaaccatcaggaagcagttttggtaccactcacattattcttattttctttgcagacactgaagagcggaggtgtgcaggagcagtggctcacagacttacattattgcttcaacgtgtacatcactgggcatccccagggccccaacgcattgagtacagtgtattgaaaaggcactgcagcacgtctgttggaaactgtttattcacatctaattttgaagagagactgatgtcataaatgtttgtcattaaagctgaacttttaaagaagctgtttatgaaccttcctttgcactgaaacaggaaaatgcttgggagttgccactgatacacaggctggcttcttggactagcatgtgatgtgtggttaagtatatacatcccatagctaagtatgtataaaatacagagcaataatatggtacctcctgttatattctaagaaaccagctgaatcttttcagccccatctaggcaaacctcattctgtgtgttctcagtcccagttcattcagacagcaacagactagtttttggtttcgtttgggagtggttgcttttcgccttggagttgtgttgtttacagaggatttctagcaggatttcaagaccgtactcccattgttgtgaattttcctatacctaagtggtagttggtctgagctgcaaaactcttaaaaaatcatttttctactagtgattattatttttgttataatcattttcacaataatgatgtaattagccaactgtaaaaaaaaaaatccaagtatttaacactttattgtttccagtctcttacagtcaggacaggggtggcagtaattttaaaacagaagcagtcctagaaatacctgtgagcctaatatgtctacattcttagtagctttgcccttaaaagatatgaagaaccctgtaatcactgattttatttaaaccaaatgttcttcaagagctggaatgcatagttcgcacagtgccagaggaaaggcaatttgacaagacggctcacctctgcaggtcaggcagaaaataaaagtaggttaaggcctgagctggcgccatgcgtga

SEQ ID NO: 40951 - DNA, 2645 bp, Bovine  19866881690164
  misc_feature (1)..(1): n is a, c, g, or t
nggaacctggggattgcagaccttaagcctccctcagtatcggccacagatgaagagttaaagaaagacagaatagaacaacacagataaggtggatgtgacactaggtctcagcatggctttccctggggagcctagccaagctgagttctttgataaggagaacgaaggaacagactgtttaacaaggttgtacaaggatcagatttgctcatgttttcagccagttttgggtggggagtagaatgcagacactctaggaagaagagacagaagaatttgcatgggataccacttggattcaaacatctttttagcagcaaacaaatgtgattaacctggccagcacagcagtaagctggaaagtcccaaggagacacttccaggcaagttttctatagtgtgtgtttctgttggtgaatcctacattcctactgattgcattttaaaaaaaaatcagatatggattattttgaaataggaacaaatagtccaatgaaatatatctgttgatcatattatacccacatattatgagctagagttattatacctaaatgcctgttggcttaccagaatcaaaaacacctacatccaaaaaaaaacaaaaaacacctacatccaacgctgtgacactaaattatagaccctgccaaatccactcccctggctatgcttcctgtttctgaaataaagagcaccaccattctcccagtcacaccggtgtgaaacataggagccatccttaactttctctagccagttctatcccaattaacatccctccttctccatccccattaccactgccctggataggacttcatcaggtctcattagattaaatggtctcacgagattaaactgatagcttccaactggttcttctgcttcctgatatttcccattaatctccctttatatacttcttccagatccatcttcaaaaagcacatctgtcattgtgtcacaacacatgcctcaaaaccttcaaaatctcttcattgtcttaacaaaatttaagctttgtaacctggaattcaagaatggcataatttgggcccaatatatcttttaaatattttgttattcccctgtattttcattttccttaaaatatatttaactttaattaaaataatatctactatttattgactaaagccctggtttcccccacccgcttcaatcactctatgagatgagatgccttatgatgatccccacgggacacacgaggaaaatgaaactggaacagataaaataacctgctaaatgctgtctgagtggtaggtggcagagccaggtcactacctccaaagcccatgtttgaggctctgcctgtccctcatagaaatttcccttttctgggagcacctgcactgccccctcttcctcatgaaggtgaaacgtttatattcctcttgcttgaagctgttaattcctgaaagttttttgttgcacaacctggaactaggagtttttttaactccaattttctataaaagatttgacttgtgagaacagagcactcctagtgattgttttgtcatttatttctaattttgttttatctgtattgggagttgttcttgcagggtggaactgttttcccttctcttttgctaagcaataaaggaagaattggataaataacatgtattcacttaaggtaaagcaggttggtatatgaaatctcatctgaatcaccccttctccaaggcctggtttttgcacagaattgagaagcatgtgaagagctggaagagttgggtagaaagcacagtctgaaggcacagaggtaagaagatgtaatgctgtaagttctgaagattctcagaagattcatgacctgctaatggtaaagctaaattagtgctcttgacaaaactattaagtaatatattagctgattattttcataagtccaattctagcacctccaggcacactggccatatttttaaaacaaatagataattctctaacttttctttgcagactaccacactgacataaaaatgcttatgtagatttttgaatgaatacgagtctcattaaaatttgcacaggatccacaatgttgtattagattctttttttctgtatgtatttcttcaaattttataaagtaaaacattttcatagtactttgcagtttacaaagaacattgacattatcttatttgatctttggtttttctttgaaaggtaaatagaataattgtaggtaaggaagtgtaactcagacaggggaggtgacttattatgtaacagggataatgcatggaaaagaaaggattttaaccttggtacttaattccaaattccaagctctttccaagcaccttctaggcatctggcacttgacgggtcaagaggaacaaaatgttgaatgagagcatgagaaacttagagtatagtggaaggatggacagcgaagccagtataaagcaatctgaggagatacacatatggtgtatggaagctctgaggaaaggttcatgtatcggtcaaggggtttgtgaaggactggtgagctgagtcttaaagaatgagtgggattcagccaaataaaggaccagcaaaaaatgatgagaaattccatgtaagggaagaacacgagcaaaggcactaggcctgta

SEQ ID NO: 40952 - DNA, 1008 bp, Bovine  19866881916416
  misc_feature (1)..(1): n is a, c, g, or t
ntagtctggaaaattaagtatcagaaccaataaagataaagtcccccaaatagtgcataacgcaccagtaggcatgcaataaataccagatattattacaaatgctatggaaagaccttcagagatcattcaattcaacccttctcattttaaagatgaaaaccctggggaccagttaagagaaagaattcttagtattcattttattatataatagcctttcactgtttaaatttctattctctgaaattgcctatactaagacttccaaaaatcaatgctgctgttcaagccatcacttatgacaagaactgggatatgttcagataagcctggaggtgccttgctcatcaatgttagatggcagactatatctctttatgacaatctgtagaacatcaaatctaagacttgagactccacaggtctgagtcactatgtatcgaaggcaatttatctaggtttcctggggagtaaatcactccttactggttttcaagagttttctctaaaatgaggcttcaaagcttccaccctagcaagacctcagtgacctaccagtcacctatggtgcctcgtggctctcagttattcactgaccgccccctacagagtgtgaccagagggaagtacacagaccatttctggggcccattaaaaatgaacattccaagacttgaaggtacaatcttgtagcctccatttcccagactcccaggtgactcttaagcatcataaagttgagaatcattgtcattccaaaaaacatctggcagttcgttcattccaatgatcaatatcttactgagcaggtactccatgcaggccctgattttggcactaagtcagagaagacattgttcttatcctcaaggaactcagaatctgctagaggatagacaaactgcaggtgacacaggacagtgtgatcatttactcatttcatcgttcactaaataattaccaagagcccactgtattctaggcatagattcacatgtagaaagg

SEQ ID NO: 40953 - DNA, 810 bp, Bovine  19866882036446
  misc_feature (1)..(1): n is a, c, g, or t
nttacataagccttacaaaaaattatgcctcatttttagtaaatcagagttttgaaacagtatggaacagatatttgaaaaagaagactgaaaacattcacttggtttgaggtcatctgaagaagtgcatatgattagggccctaagtttaagcaaggggtggtgtcccagtttgtaagaaagcctagtctctgcttccaagactttccatttgagtgcaaaaatgttgccacttatcagcgaccactggaacctctccaacagtcagttcggcttcctacccagaggagcactgagacagctgattggttcagagcaatcagacaacaggcctcagcctcaaagcggtcaaggaacaaagattggtgaccagatattcaggggaaaaaagcatggaaaaggcaggagagggggaaggggacgaggagagaacataattaaccaacgtaagcgtccagaaagtcacatccactcaacatgtcaaagagaaaaatgcgttacctggagacattctgctaggggtggattttttttttttttaatttaagataaataagaatatcgaaactgtcacggaggaaatccaagtcatatgaacaaacttaactaacaagttttacatattaacatttacaaaacgtagtttactcaacaaattcactgaaagatgtcctatttcctaaaaactgtacctaacagttgtccttttgagtgattccagtcctgcacgcgatttcaaattgaagggggaataggtggggtgcagaatacagaaatttttacagcaggaaataaaaagtatttttaaac

SEQ ID NO: 40954 - DNA, 675 bp, Bovine  19866882102928
  misc_feature (1)..(1): n is a, c, g, or t
nttttctactcatatgagttgtttgtcctctgctgagatcctggtagagatctggcctctactgagatcaattaaaattcattatatgttaaaatagaaacctgtttctccccccctccccccaatccattgcatgaattaaaatgcaggtctacaaacattttatttccgtcagtagaactgattttttaaatgactgttttggtagcatacctggcttgtgttaatattaccagtttttctttttatcctctccggaggtcctgcaagtgctgtttcttctcttcagtaactcccactgagattgacagccagtaacttcactgtacacccattctggctcccactagctccaatgcaagaggccagcaggtgccagacgcacagtttacaaatacaaatggctgtcaggtggctgtattgacagaatgcctctgaaagggcctctggtacagaagaaattgcacatgtaccagacaaacactgagaggatatcaatttaatctgacatcatctattgtcacccacagcaaagtgctcaaatatattcaaagaactgcaaatctataatgtttaagataaagcccttgctagtttgttatttaaaaatgctcaaagacggtcacaccaatccaatgtgaattgcttctgcagtcaagaaatattacaattaat

SEQ ID NO: 40955 - DNA, 740 bp, Bovine  19866882159918
  misc_feature (1)..(1): n is a, c, g, or t
ntgtgtgctactgtttaagctgaagataaatttaaaaaatgttattattgctgtaaaatgtttcatgctagctaaaaaggcaaactaaaaagtgaatattttgctgatgttttaaatagttttagacgattgctctctgtctctagtctataacaatgtcaaatgttggtcccttgaaattggttagagtgctctgggttttgaaaaaacagttcaagtctgtttaaagccatctgaaaggggaattttctgaagctttttctattcccatgatcctcacagaattctccaattctttctagtatataaaataatggatcttcccttaaagaagtgctaatcccagagtgatcatgtatgacagattttcccacctctgatcaggtttttttttttttttttttgctatatatatatatatatatatgtatggggttttatcctcaaggtgtttattttttcatgaaaatagtgtactgtatataagaaacactcttggaatttttgtttttcaggactctattttggtatgacatttttttgatcattaccatacttagctaagtcagatttcactatcatcaaagaatatatctgagaattaaaatctcaaattgcacttgaccttcctggtttgcagtcagtttaaattagatagtatctcccgtcatcttaaaacaggtgacgtcttagaacgctaccatttgggagaaagcaactataacaataggaaaaagatg

SEQ ID NO: 40956 - DNA, 924 bp, Bovine  19866880344571
  misc_feature (1)..(1): n is a, c, g, or t
nagagttggcctcctgtcgctatataatctgagccatcagtgtcccatatcccccttctctccccccacctcacccccaagcctttatctcctccttgggtccttgctccatcactgtaagtaaccaatgggatccttgacctccagctcctccctctgagtggcccctgctgggagctgatgtgaagaaggcttactttcctacaccccctctaatgaaagactcctgatttttttaaatgaaagacataactagagggaattacaaacagaagtggaatgatgtgaaatggaggctgaatgtgactgttctagtacacagaagcttggattggaaaccccatctttggcaaactggagaaggtgcctccattattatggccaccatgcaccatattagtgattcctactcctggcttggaaaagattttagaggtgccctaacggaaccttcttactctgcactgaggcatgagatccagatgggtactctggcttatctagggtgccttcctcatcctttgctattaagttcaagactctggttctctcccagaaactactgagttttgtaaaaatctcatggtagagaaatcttacagtctgtctgggtttaggctccaattttctgaagaactgaaggaaacaaagtgacctttttggtttctgaacatgaggataaggaaagactacagagaaggcccagacttttatcagagcttctctgcattttcaggaacctcccagtgagctccaaaaaatctttctatggttgccacacaaccaacatagcaaccaggaaaggaaaaaaggaagctaagggtgaggtctgaacaaaggttttcctttccttctcgagttcctcttttagtatgtgatgctatagagataaggtccagtggcatcagcatctttggtgaaaag

SEQ ID NO: 40957 - DNA, 972 bp, Bovine  19866880535003
  misc_feature (1)..(1): n is a, c, g, or t
ntttaaaaaaattatttgtcatatcttattatgttgtatatttcttccttgatcacctttcacagcattaaaataattttatgctgaactaaaggtgatttttattgcattaagaaaaacccatgctttctaatgttggaacagctgtaataattcaaagtaaaaaaaaaaaaactcagagtacattttacaaacctcattctatacattgcctaatacactgctaattttggctagattttaaataaaacaggcttcaatgaaatgatatgaaaagcaatggatttgacacagtttcaaggattaacacttttagtactgtttcttacaaaatcatgcaggattattacagaaattggtatcatgattattttaactctggccttatcagctgtaagaaatgcttacaccgctgtcactgctggctctcaaaacacactgccacaagtgtcattatttccattgcccatggaaggcaaattaagactggagatttaaagtgcccgtctgaacacacacaatatatccctgaggtccagatggctcttcattctcaccctcatcacagcctcactgcttctcttcttcccgttccggactaactgttcaggtaagctttgattatttgcatctgtcttttcagaattaatgacagaatactgacagaaagggaggtgctggagtcaatggcaaacgtttcttattgttcttactcatgaaagcttggaagacccatcatccccaaggtctgtggctggcttgccactgccagagcctattatttaaaactgtctgtgttgtcctctcagacaacaaagcctgcttcccttctgtgtttgctcacctcgtcaccatttttccctgggagatggaagggtgtatcaaagcaagagaaagcgtcagtggctatttcttccccttctctctctaggttgagtagtgtttcggcaccttgtttatacctatgtaaat

SEQ ID NO: 40958 - DNA, 1348 bp, Bovine  19866880576763
  misc_feature (1)..(1): n is a, c, g, or t
ngagaggcacagtgaggacttccttagcactgagtcaggagggaaaagctccagcctggagatgggaatgcaggcttccacttctggctaaaccccagtttctctgcttacaaaatagattgaaattaaatattccaactctaggatttgtcattttactcaggttcttacaagtgtttaagtcaaaccctacctatcactatgattttcttcctgcaggttaaatggcaatgtgtatgtgctgtgtatgtaatgtgtatgtgctgtgtatgtaatgtgtatgtgctgtgtatgtaatgtgtatgtgctgtgtatgtagtataggtgtagtgtatatgtacatcatgtatgtgttgtgtgtatgcagcacatgtgtgcagtgtgtatgtgttgtgtgtgtagtctgtgtgtttggcacgtcatgcactatttactcctgctttccagagcgaccacccacatggccccatcagtgctgaatttccggatccttcagaaaccctgtctcccacacccagccaaataagcaagaacacatgtgaaaagccttattccagtgcctcttgggatgcagccaaacagctggaattatatgctttgtagagaaccggggacgtggcacggcagtaaaaaaaaagttgtttgtatttggaaatcaaattcctttccccaaacctgagagggcaagggagggctgggctgcgctctctaagggtgtgtatgtgtgtgtgtgtgtgtgtgtgtgtgtgtgtagggggcatctttcattaaaatctctgtcttttctagtgttcccccatttacacgtgcatttgcatttcaggctccaatttaaaagtcagcctcttcttccctttgcatctctttctccagttctattgttcttcattcatttctctagtcccagcccccagcgccccctcaaccccctgcttcctgttttgcctgggaacagcgtgtcaagctccctgtaacagcagctcagtattcttaatctgctgtgtggagggggccccacattcaagcaggaaagattagaatgctgtatgattgctaggctgctggatgtcagaatttttagcacttataccttcctggccacaggagagtttcctcttgattccagggttgttcagagctgccagggcccatcttgccattccacatctgttccagtcctgtattgttccttaacaagtcaccccaaactcagtggcttcaaacgagcatcagttttgttcctcaatctgtgatttcagcatggcacttgctagggtggctcaaaggtgaggggtgactccacggctggggggtggagtcatccgaaactcattcactcacaagtctg

SEQ ID NO: 40959 - DNA, 718 bp, Bovine  19866880683559
  misc_feature (1)..(1): n is a, c, g, or t
ngttagaagaagccctggtgccttctatttaatggctctcagaccaggaaaaaggcacgttcagtacacccttgctcccttacagctggaaagagttaacatgcaaacagcactttacaaatactaagcagagactgaaataccaggaaaggaaagtgctctgcatgctgctgtgtcctttagcgcggtgatgaggccatggctggtgtgggtatcccactggccccgggccacgggtttcagagggggctcctgccactccttctcctgttgtgccctcccacctccaccgacccgggtgcccagctcacctggccagctccagccccttggcaaacacagcacaccccacagagctggaccttggcccactgcttctcagttgccaaccagccaggagaacacctgcttttcattctcttcgggggagtgtgaggtttccccttggggggaaaaaaactgtgcttgggctctaacacttcccctggttttctttatcaacgtcttctagcctcacttcagaaggtgttccagtgagtcctgacctctgctcttcccagcccaggatcactgctgagtctctacagtcagtgacagaagttccgtggtccatgacttgcctctacgggtttttgttttcctttgtctacatttggttggcataaacacttctgaaaaatgggctgcagctgatgccttttcgtttggttccctttat

SEQ ID NO: 40960 - DNA, 1106 bp, Bovine  19866880722813
  misc_feature (1)..(1): n is a, c, g, or t
ntctggtactttcaaaaattctttgctaagtttctcatatttttgcttggaaattgctgccatctattataaagttttacaaattattcttcttgatgccaatagctagagtcaaagaaaatgtgatgtagataacagattggaaacctatcatattggaaaactgcctgttaaaggtccttgagcaataatgctaatgtagccttgttctccaaccaaccaatggacacaaaagggccaggctgcataagcaacatgagaaccatgaagaagtgggatctggggcccattggaggattattttttctgaacttccgtaaccacaggtgctacatacgtaagttggaggaccaggatccacacaaaatctagcttcaaatccaagtcacagaaggatgtaggaaccaacagacttacacatgggacatttataatcttttccatcatgtttttctgtttctcccattatggtaacaacacacatggctacagtttagaaatacccatggctgttttcattgatgtctttcctcttcatactaggaaatgctagtgttttgaatccgatagggttctgaggtaacactgaattgattttctgtcttaaaactgaatttttcactacaggaggcagaataggccttctggagtatgccacaacgatgttatactgcagagttgaattaacaagacagcttatagcttactgatttcaatttccaccatttttcctctctgctgagctaatttggtattatacaaagctgagtgcatttcaacactttgataattccctccatatttcagtgctagaatcttctgtgaacccattatgtggatgcataacaaaacagccattagtggtcaagccattcatctgcccatctgacaccttcaaaatgccactcttcttccccagaaagatgttttttgatgagtcaaatcctgaaacatatatctgtgatgtaaagggaaattatattcacatataattctaaaagcaaatcttgatatagtgctttgtactgactgtgtgtcggaattatcaatacttttactcctggaactatatcagttattacaaaattaatgagactttcagtcaa

SEQ ID NO: 40961 - DNA, 2196 bp, Bovine  19866880765084
  misc_feature (1)..(1): n is a, c, g, or t
ngcactgaaaatatgatgagcaccttcattgggcttatattgtctcatggaatagatgaaaaccaatcaaacaatcacacagctggtgggaattaggagaatgcgatggttgtaagattatcccatgtggctgatttctgtgaggaaatccaggcttttcaacctctttaaagtcttctgatttctctcaagggagtgacctctgacctgggatctgaaaactgcttggccctttgaaagggatagattttatcagttgacactacagagatcaagcaggggttggtagaaacaaatttagataattatcagactgaccattcatgtaaacaaaatcactgttgctctttagaaagaagaagaatatcaggagcctggtggcttagaattattaaaactgtcaaaaccaaaagtagaacagttgatcttggggtatccagggagtttccaagtcattctgtcttatagtatataaaggcacagaccctcttaagtgcttcattctcttttattgaaataagttgtagaatacacacacacaagcacacctgggtataattaaagaagtaagatgttagataaattacttttccttaaagaaatattttgatgttcttggaaacctatacctctactggaatactagctaagtttctgatatagacaaactatgtctcacgaaacagcactgatctcttccatataaatgtttcctagtgccctagaatggtcatctgtgaaggttcaggaaataaaatgatccaaaggagcacaaacagtcatcagaatctagtttgcatgttagaattccaatctccttggaagttctagctggtaatctaaattaaccatgaaatgatatatgataatttgaaaataattatgtactcttaaatgagacgccactaaagaacagcagcacaacattaaagtagcatgtgacactctctaattttacctgctgtcattttaatttggggttcagagtcagggtggcaatgcctcttcaaaacattctgaccttggtaaaaaaaaaaaaatccaggcagaatatctaagagaaaaatagtctatcatcctccaaagagggcatcaaacactttcccctgtgcggtgtttcacgaatctggttttgtggaatgctgccagatgactgaactctattcccacagcacctccctccagcccccttcccccacttttcctggtatccctgacagcatctgaattaggctagcaccatgcttagagcaaaattacactgtgcttagctaacggaaatcacttcagaacacacctatggaccattctggggtgtgtgctggttagaaccactaggaactctagggtccatgtagcaccaaatgcttttctctcacctacaaatgttgacctgtaagccaacaggtaagatctccatgagtgatgggaaaatgctccaaaattcatgtccacggataccctgaagcctctgaacttgactgtgcagagttcaattttctatcaaacccacactgattgttttcatcaagatacacactcacgccctctccagaggtaggcgttgctactaggggatccctacgttgttattaccctacatccagtctttctagtctgcagtttcacgtgaaacaattcttgtggagggggcttctgtgtgtggaggggcttctgtctatggaggggaggcaggaaagagtggtggtttggggaggagaattctattcatttcactgtgtgtgtgtgtgtgtgtgtgtgtgtgttccatcgctcagttatgtctgactctttgcaggcccatggactgtaggctcctctgcccatggaattttccaggcaagaatattggagtggggtgccatttcctaatccaaaggattttcccaacccagggattgaacccatatctcttatgtctccttctctttttttgagaagagttgattctttatcaccgtgccaccttccctagtggtcactattgcctctctgtccaatcactctttcaggcctaaaccattatataatacatttttgtagccttttgcatgtaggttacaacataagcaaatgatctcctggaatactttaactttctataatagaaaacttcaaactttttataatagaagattttaaatgtatccaacagtgaggcacacttgtacaataaagctccatatactcccatca

SEQ ID NO: 40962 - DNA, 1030 bp, Bovine  19866880770515
  misc_feature (1)..(1): n is a, c, g, or t
ntcctgaatcagacagctactattcacttatgcaaaacattaagacaaagtcattaaagcccccattcctggtaattgtctcagaaattgcgttccctggccgagcaattagttttatacaaagcaagaagatattcgggttagtaatcttgagtttttatgactcaatcaatattttgcttgctgcaggctgctttgctagtacaaattttgagtacagggcatgtggggtatataaatatttagccagccattgaagcagcagttaatgaaattacttcttctattctttactttggaagataccgttggtaggatactagtatgagtgtttatttcagctcctatcatggacgggaaactgaaccgctattgtgctgtatggtttatcattccgtccctttccatatccatactgcaaacctctcttttagatgcatctccttcaaacagatcttgaataacctagtcacttgcctcagatggttttgacctgattttaactcggcagccatgcttctctgttttaagatttgcagtgttttgtgtgtgtgttgtcactccagtactcctgtctggaaaatcccatgggcggaggagcctggtaggctgcagtccatggggttgcgaagagtcgggcacgactgagcaacttcactttcacttttcagtttcatgcattggagaaggaaatggcaacccactccagtgttcttgcctggaaaatcccaggggcgggggagcctggtgggctgccgtctgtggggtcacacagagtcggacacgactgaagcgacttagcagcagcagcagcttgtgtgttgtatgtgtgtgtgttaatatcacctatgtaactaggagtcacaaccaggactaattactaaaccctcccttttagaatagaatgattttattaaaaaaaaattttttttatattggagtatagtcaattaacaatcttgtgatagtttcaggtggaggcaaagggactcaaccataaatatacatgtatctattctcccccaaactc

SEQ ID NO: 40963 - DNA, 834 bp, Bovine  19866880774853
  misc_feature (1)..(1): n is a, c, g, or t
ntggatgatgccaaactaaattagtcctttattccacatttcactgctatccagtggtgaatgcccctccccctcaccgggagctacattttgttttctgggttctaatgccctttctgttcccaagtccttggtgatcacagtcttttcaaattctctgtcagattctttctgtaagaattcaagcctggttcttgggtcattagtggagaatagacatacatgaccctcaactatggcccaggctcaaacttaatttctggacttgatgataatatagagtgataagaattacactagatgcacatacagagacctagcaaaagagatgagaaaatgaagacagcaggaaactagagggagggggatagctgatgtccccttccctctgatggtggtggattaaacttctgcctcatagttttgccttttacttgccctgaagattgtgtcttcataacctgattgtaactttcttctccttgttttagaattttctctttccaagtatgcaataggtgcttattaaatatttgctgactgggtgacaaagagaattaagaccttagtatagtcccattgcttgtcccctaatacttgcttttctatattgattgctctgcggtcacactagtctatgagaccctggataatgagaactcaataaaccttcatttgttcaaatcaaaatctgcttagggactacacacaatgtgtcaagcattgtggtagaatggaaatccacaaagattaataagatgtgtctctaaagaagcacacagtgtagcagcaggaataatgcatgtcaggtaactataacgtaaggtagaaaga

SEQ ID NO: 40964 - DNA, 1416 bp, Bovine  19866880807837
  misc_feature (1)..(1): n is a, c, g, or t
ncatggcccaggttcaatccctggtctgggaactaagatcccacaggctgtgcaatgaggccaaaaaacttaacaagatttaaaaaaattaaaattctaaaatatttaatagctccataaaacatgatttgagggtactaggtgatgcgaaaagatgctggaactagtgggatattttggacaatttttttgtttcttgttgttttttttgttttcactccaggggcccatctataaaaatttaggccaatgatactaagtgcacacaacccctccttgttccaccttacctaactctatagcagtaatttatatgctataaacatataacacccaaagtttcctatttttagcaaagcatcaagcttaccgtccggaaagctgcaaccacaagatttgaaggaaacaggtttctgttggaaaagaaagcactttgtcagtatccttaaaatttgtcattcaacatgttcactttaagatgcccacacctgacagcctaccacacagggttccctctctccccacatcctgcagttattgccatcttctccttgatccaagtactcaactgtgccttggctgaagggtcacaacagagactctgaagcactgatctctatcctcatctccctcgtggtacccttgatatttagctgtgtcccagcgaaccagaataactgcatcactttcctttcccctggtggctaggccctagggcagtggttttcagtgggaactggcgctgccaacttgtgaaatccaagggaatgctgtgttgttacaataactggggggcattcctggaactgggggagtatgtttgggcagaagtgccagatcccagctatttgttctgctaagagtggcaaagtcctgtgtaataaatagtttcaaggccctcatacttcccaatgtcctgtatgacacaaaactgtagaggaaaatcttattcataacttatttgagcttagagactaactttaaagcaaggtatttttgtgcagtttgaatatacactgaattttctaggactgaaactcctgtgtaaaatgtgggatgatttgttttgctttgttcagaatattttcaagtatcattcactttctgggaaatcacatcactaatgaaaaattgtaggatctgggcccttaatcacacatgctagtaactgagtatcagtctgaatttaaagctctctcattaatggtgactctcaactcagaagcaagcacttaatcattttgttttagagcattcacatcttgaaatacattatttttactatgaattattctccttcagtattgaacttttaaaaactttacagtatacttttttatttctattttttaaaatatgtaataatctcttctacctatttatcccaccctccaccatcatctcggcaaccaccaa

SEQ ID NO: 40965 - DNA, 1006 bp, Bovine  19866880840639
  misc_feature (1)..(1): n is a, c, g, or t
ngagggagcctgacatgctggaagaatagtgggtagaccagtgcagctgcagcccatgagggaagcagacagtgcagatggggtcagagggaaacaagagggagctaagttgtgtgcagtcttgtaagccatggtgaggtcttgggttttcattgtaagagaagatgggaaatccttggagggtcctgagccaaggacttaggttttggaacggttactctggctgctgtgtggagaatagactgtaggcgggcaggagtgtgaagcaagggcacaggttaggaggctgttgcctttaaggcaagacgatggtggtttggaccaagctctagctgtggagatggttggattctggacgtatcttgaaagcagaacagtctgctgatggattggactgagcatgagagacaaaaaatagttaaggagctctcaagggttttggtctgaacaattggaagaattgtgttgccattaatggagatggaaaagctgggggaggaacagatttggagtcggagggagatgcggaatttagtgataataatcttatctgccctgcctccctcatgggattaaatgtgatgtttcgtgtgtaatttaccctcccaatattccttacagttcctagtattcaaagactctatcccttcccattcagatgccgtctgtccggtggagagttgcctctcgtttgctctcagctggttgcaggtggtagtgggtgaagggttcctagcacgtggactcttggatctgacaggtattatctgagctatatttaggtggatattttaggatgggttttcacaatcatgactcaagtatgacttaacagttgataccttcatttctccccagcagaatgttgtttctaatttttcttttatatagcaactgatgttgccatgcagatcttttggttgctatgagatggtaacattactctgccccacgattggccgggtcctcctaagcaatgtagttctcacttgggtgactggcactg

SEQ ID NO: 40966 - DNA, 1011 bp, Bovine  19866880851403
  misc_feature (1)..(1): n is a, c, g, or t
ntaattaaattatatcgaggtatgactaggcaaaagtgacaggtgacagctaactaataaaataagcaatagcttatggggttgtaatacatagaaatggctggatggaggagaagaggagaaggcaaggaaaaataccaacaagtggctcaaattaagaactgctccatttccagaaaacataccaggcagttagtcaaattactttcctaacacctagcactggaaaagaatgccgactgaggcagaagtgagaacgtgctgtaattctgcaatctgcacagacatggcaggcctgtgagaatagctgatagccagagggcaatatatagccaatgaaaggaagagcgctaaggacagattcagcctactgagacatcttgcccaaggctccttgcctgttgcccaatcagtaaggccaggcattttatgcattaggtctccatgcccatgaattcagtgacagtaataaactggtttcagagggacgttgaagctaagctcaagtataaaccacagtggtacacagcagtaatattacatgtttcttgaaacacacctgaaaaggcaggaccctgctttacaaaatcatttgccaaagtatgttcttcaaaacactagttctacaggtgttataagctcttcttccttgatccctacagaaaagggttctatggccaagtaaatttgagaaatgaaataaaattaaatagcgttattcactgcaggatttttcagagtccttaatatacgtgttaggaacctccaagtcttgtttagggtttgatatgaaatatttcctgatctcacttcactatggaacccttctttagtgaatcaattctggggattagtgttcagtggaacacatcttgggaaagggtgtccaaacatgcatttttgtgttagacataattagtgatgatatttaaggttaagaaatgacaaacacagcaagaatatattttagaaatggcaatattcattaagtaatattaatattttaaaaaa

SEQ ID NO: 40967 - DNA, 1099 bp, Bovine  19866880881504
  misc_feature (1)..(1): n is a, c, g, or t
naatatctataaaactactgaaaggaacacagcggaaaattccctcaaaggcacaaaccaataaggtgaaatcatcaagcctctgaaatttctaaagcccaaacttattatacttaactctgggggtatctatacccttgaaaaccaatctctcagatttcctctgatgtagtaatcacttagagcatagaattaagtaggaacttgctacccagaatataggaaaccctcagagaatgaagagtttaggatggctgaaatttctaagtgggtgcagattttaattttaaccccttgggacagaaatatgtctaccacatattactctagtttccttaacagaacataatgaacataaaaataaatattctatgatgactccaggacattacacttatgaatactgtttatattaagctgaagtgcagtgacgtctttgggtgctataaaggtgtagaagaacactgatccctatgttaaaaccttacaaagccgtgctttgaggtcttatgtctacttcacagattttctcctgtcttttctgtcaggctgtcaactttcattgcttgctgatgggtatacttgtttctgcagcatactcctccttgaaccagctactctgaattctgctttgggttgagaaatcagataattgaacttcaaagaacagtatttcaaaaggttcttggtgatggcctaagggattctctagggagttagagaaaaggaatttcagtacatggactctgtggcatttattttatatgcctaaatgtcttttctgttttcttcctggttcttggccatagtttaaagacaagtttccttgaacagagttctgctggatgaggtgtcagtgaagtaaaaacatcttcaaatgtactagctagtaaattaattaatttcattttgaaagatgaaagttgaaaaaatgaaattggtggaaaagacgtcaaaggtgacaattatcacagggtattaaacatttagaaatcagttcattaatgtatttgttataaagtagtatcataggacttccctggtgggtcagtggttaagaagccgcctaccaatgcaggggacaggtctgacccttggt

SEQ ID NO: 40968 - DNA, 1400 bp, Bovine  19866880888033
  misc_feature (1)..(1): n is a, c, g, or t
nttgatagcaacaaatggatggaagcatcctctgagacattcttaactttttaattttccctacccatatcatttcaattcaagacatcattgatgtcttacagtttcctcagttttgttcactgacaatttctggaatatccattctcactgctactgttactagtcagttcaagtattcttctctctcggttcaccgtcacagtgccctgcttcacttccttcggcttcttcctcatctaatacattcacctgttgccagaatgatatctttacaaagcaaatctgattatatcactctcggaataaaaattttcaatacctttccattgccttcagcaaggagtccaaactccttagcacaacacgtcatgttctacgtttaaacctcagcatttatgactttccttagacttttgtagaaatgaatcttcatttctacaggcatgacaaacccccctgaatgcactcttcccaggctgctatgtctttgtacctgcccttcccctggacaacaactgctgtccttcaagactcagctccagggtcacctccagaaaaccttccctggaggttgttgtagggatgaaatagtgtgccacttggattcctccgcctcctcaggacaaaagcactcacccttctaactgctgagagtgttagtagcagttcagatccctgctatatttcattctggagattaccttgagttgaagagctacttactaaaggtcatgccttccttccttggggcagcccatttgcaatgactagtcacagaagtagacagaggcataaaggcctggtcccactgcccccattgggacagtgctatgggccatttcagccccatagtcctctcttggaaagactgaggactttgtcacaaatgtatcacagctcaatttattctttcccccagttcaccttctttcacttcttcctacaggtgtccatcatgacagcaagtcttctgcatataaatctccatcgttgactctgcttcacaggaaactgcatggtagcactgggttacagctctcaacaccacttgcttattcctagtgtgactcttatcccatcattgtttacttgtggggctatgcctaaatatagtcagcagcttgagaacaggattttcaatcttgtcttttcatcctcacttcctttttctcctcactcattaaatctttttgaataagtgaatgcataaatgaacacatgaggtcatcatcttgaaaagccttgggggctttcctaaaatcaattcaatccttcccgtgtcttattttcttctaggaatagccccagaaaatctggaacatttctcctagaatgtattttaagtttgctgctgcttctgtttcatgaaattgtgaaagcatagatttggaaatctg

SEQ ID NO: 40969 - DNA, 1308 bp, Bovine  19866880924701
  misc_feature (1)..(1): n is a, c, g, or t
nccggttttttgtgtagttatcttggttttgaaaaatagagccatagtactttttttttggtgataatggttttggagggctgagggaggttgatttgggttttgttttgttgttttttttcaatctcccactttccctgtttgacagctaaagtggccagtattttacaaacccaactaaattttcactagcactttcctgttgccagtcagattgcagttgtttattctgcattatgcattcaccatctacctgaattttgtggttacttggaatagaacctttcacagtagaggaaggaggtgctttgggttcatctggtcctgctttacaagcatctgtaaatttttgcattttagctgcatatttatgcttattatagaaatacaaagaaaggggcttttaaagtatattttgaaactgtaccttaatgaactattaagaacgtgggagagtcaacattttctatagccttcctcccttgttggacatggtgactgtgaaagccgcttttgctggtgtaattgctgtaaacatctgagatctgtgtttatatctgctagtcagctacaaagctggttcatagaaagcagttcctgattttcttcttaaccttgaaataccctaaaaggagaaaacttgtgagcatcaatatatgactctattatatataattttatctgctgatcttctttttaaagaaataataagtagagattgatgaaactataagacatttgtacttaaaatctgcttttctattcaaaactactgaatttgctgaaatcaaagaaagagtataattaaaaaatttttgtctgattgtctttattttcgtaagcttagcatgagttgaaaatacttgttacttgtttttttgtagtcatcatattttatataaattaatattcaaggaagttttaaaatatgtatgtgtattttaaggaagtcagacgggaaggattttactagacttttacaataaacctaatcctaatgaactcagcttcattttgaatttttccaagaagatatttgaactgttagccactagattcagctgtgaaactttaggagtataattaacccttgagatgattttcattttgttcaaaagtagctgttttattcactttttctgaaaacattttacctcccctcttcttacctaaagaagaacattgtgatatataacttttctttagtaataatttaattctttggataatatttcatgtcctcagatagtcagaatgtatttaaattaaccaaatcatttagtgtatgtgagactttacattaacttc

SEQ ID NO: 40970 - DNA, 2323 bp, Bovine  19866881018250
  misc_feature (1)..(1): n is a, c, g, or t
natttccagggttagatcccaggaatcttttagaaaaaactctttctgaagaaaaaaaaaagaaaattctttctggatgactctgatggaagtcaagcttgggaatcactgagttctatttggaaggttaattatcttttcagctgtccgtggctgttttcccaaacagacttcagtgaaatcttgttccaggagtaataaactgttgggagaactatacctcattattattgatatccatctcttctctttcctaaccattgcccctctcctcaaatcccacctgtttctcacctcttaacattatactcacaacttgagtggcaggttttgaaagcctagccctagactttaccttagacttctctttaattccaaattctgttaattcattgcccttataagtactttttaatcaaataatctagcatgggaacagaggggtgtggaaggggaggattggcttgttgcaaggcagattcctaggtcctcccctggacacaggagtatgcattttaatcagctccctagatagtccatactctcttttttgcgcttcactgtatgggccgtttagagtgatttactcttggtaagcaactttgtaaacctctgcttgtgtcgctgaattaaacctccattctcagaactcttgtccacaaaacacagacaccaaatgaatttaccttcccatcttttaactcatctctttcaatgctcctattttaccagttctctcagaagaaattgtccattcacagagtcttagcttttctctaaaaccatagaaacaggcatcttatttctgctctccctgccttttactcccactctgaccaaattcccttttagtgttgactcaaattgtttatctgcgtctgtgcctgaccttttggttctagggacatatttatggcccccttcccctcacccccccttttttttcctttttggtgagtagagatgatgtagaagggagcccagaggaatgattacaggttgagaagtgacccacactttgattccagtatgccactttgaactaagttgttcatcacgggagaaaaagaacttatttattattttgttttttcaacttgcttgctctgtttgcagggtaatctgatctattcgaaaagcaaatattctatttttgaaaatcacattagattttccgcaaagctgtattttgctaccatagaaagaactgcacagaaatttaaccttttcaatatggttgttaaaatacctggtgtcccttagtaaatgaaaaggagccctctagaacccaaagttgcctgtgatgaaggatacaactttcctttatcattccattcagtagaaaataattcctgccggatgatgtgattctagtgatgccactagcaattttagtgaaacaatgtggaaaatacgatgctgttatcagatacaacattaatatttctatttatcaatttctatcaatttataataagtgttaatttattttaaaaaatatttattattagttattcttatttggctgtgtcaggtcttagctgaccaatctttatcatgcaatatggggtctttagttgcggcatgtgaactcttagttgcagcatatggaatctagttccctgaccagggattgaacccaggccctctgcattgggagctcagagtcttagtcactggaccaccagtgtgcgtgtatgctgtcacttcagtcgtgtccgactctttgtgaccccatggactgtagcctgccaaggctcctctgtccatggggattctccaggcaagaatactggagtgggttgctgtgcacttctctaggggatcttcctgaaacagggatcgaatccacctctcttatgtctcctgcattggcaggtgggttctttaccactaggacttcctggaagtccctgggccaccaggaaagcccctaaattaacaattaactgaagtttcagagcctgcagggacaaccacacctggccagtaagccctgacctcctgctccctctacagctgcccctgcccccccaggcttcaggaaccccctagcttcttgactgttcctgcctcctgtctccccgccaatccccaggggagaggaaccttcatgaggctcccaaaggcaccgctgctcttgcagctcagaggccccctcccgtcttctccctaggactccagggagcccgtcgctctgggcaaccatgagctcctccttaccgtctctggccacgtcagtgccatgtagcctccccgcctcagggggactcccttctctgcgcagaagccccctatctcctttccgagattccaggagtct

SEQ ID NO: 40971 - DNA, 874 bp, Bovine  19866881037843
  misc_feature (1)..(1): n is a, c, g, or t
naagggagccgaggacttccaaacccggaccccaggccatttcattccaggccccaccccctgtctggcggggaccagccatccgtagtgcccctgaggagttgggttgtgcatttattttctgtcgagggatctgagctgaggttgccattaagtacccgcttaatttcattgcactgagagtacactctcacgtgggtcggtggcatactgggatcccgagggctgtgatcacaaagttcttacggacaagagcagggagtggcagttataaagtcatttccagttttctaagagtttatgagcactctacccacagaggcaggtgaatttcattttctgattgcagataaagtgactgacccgccagggtctcactggagctgctggcactgatgtctctttgaaacagtgatgagccttgctgtttactattattttcagttatgttcccttttgtgtaggaggccaaacagaacacttgcctaaggacagcttttggctactgagtttctgtttggctcatgctatctaggcaaagggtcgtcccagctggttcagttcagttcagtcgctcggtcgtgatccagctggtgttagtggttaaaaagaacctcctgcctaccaatgcaggagacataagagagaagggttttatccctgggtcaggaagatcccctggaggagggcatggcaacccacttcaatattcttgcctggagaatcccaatggacagaggaacctggcaggctacagtccataggcttgcaaagagtgagacatgactgaagtgacttagcacacacggatctaggcaaaggagagctgaatgtggagagccaacgaagtggggtaaacctagcagaccctcga

SEQ ID NO: 40972 - DNA, 817 bp, Bovine  19866881088362
  misc_feature (1)..(1): n is a, c, g, or t
ngtattattgacatatgccaactaaaaacattgctaaaaagaacttctcagttttgttttcggcgttttctatgcatatgagttgatgataatatcagaggggggaaaacctgcacagaggaagtggaaacagcttgtgtaaaagaaacacagaaagacacagaagaatgattatatgcagcaaagaggctaaatgaaaaaaaaactttcataattagaactttggtattatgaaattttacttggtttcaattggtagctaacctgtaatataaagtcttcatagatttaagataattaagactgtgaaattttcaaatatacaaaaagaatatacaaacacctgggtactaagtacccaacttttatcgttcttactaataccatttctgcttctgatattttaaaagaaattaaactgcagatataatgaaggctgcttatatgtccttccctactcctgtctctgtagaggaactgaacctcaagagtacagtttaggtcactcccatgcactttaacaggctttacgacacactgatgcattcataaacatgacaaaaatggctttaaagatttaaaaacctataattactttatctcaacaataagcagctgacttttcaatgaaataattttttagtactttggccattaattcttaatggctaaagggatttaaaaacacaggttttgtgtactttgagattataagctgtttttttttttaactatgagatctactctgattgagaatacagagctgtgtcaagttaaattctcacggatggaagtcagggtttaagcactcatccca

SEQ ID NO: 40973 - DNA, 1211 bp, Bovine  19866881088617
  misc_feature (1)..(1): n is a, c, g, or t
naccataagtatcacttcacagtttcattactttatctctacaactaaataccaacattgcatagtacacctgactccagggcttcttgccacagttcagttctttgaataaaatcaatcaaaaatataattaccacctgcattcattcagtgtgaataatatagaaattacactaacaaacttgttagaattaacacactcaagtgaacattgtttctttagaaaagtcatcatgagaacctatacttataccaaaattgggagcacgtgtttggaatgtgagcccccagtattcttgcctggagaatccccatggacagaggagcctggctggctacagtccatagggtcacaaagaatcggacatgactgaagcaacttagcacgcacacacagtggggaggagagagggagagagagagaaattgattgcgaggtagggggaatacaagcaactgcctgtctttggatgttgattcttgcctataatttccatacctggacattggataattactatggttccctggtgggggccacaagttctctaacttcccattccaaatcctaatatgaattcaactttggaaggaattgctttgggaaactaacatgttaccaagatctacagcagacaattcctcccatgacccagagcccatccctgccttaggagttcctaccagctaaataggtctctgatggcctttctgtggaaatgtcttctcatacatctagcccactttaactcctttttctccacctgaagatctgccctcatgaaacaagattcagacaactttatgaacacttgagatttggggttcaggttgatattgttattcagttacacagtagactaagaaaaattctgaattgacaataaagtgacatcacaatcactacttcaaataacttattttccaaaggtcagctgaccaaggagcccactgcaaatgaaggatatctgaatgtgttgcattcctgcagagatgcagtattcaaaacaactatgctaacctcagaacacacagaaaagtgaagtaagtgccttatcactgagtgagcactcttgttggtcgaatgattcatgtagagactaaagggctggaagtgaaactactaaacaattgctttgattttcttttcttttctgtcatttccaaactaggtagcctttttttttttttttcccaatttatttatttta

SEQ ID NO: 40974 - DNA, 878 bp, Bovine  19866881170424
  misc_feature (1)..(1): n is a, c, g, or t
ntgtgtgttctaaatatttttcctaatctacttttcctagtctttttagtgaataaaagttcatcaacggttgtcaaatttatcagtcttttccttgatggtcagcattttttgtatcttgtttatgaaaccgctctgtacgtctaattttatattctccaatatattcttctaaatgttgtatgggtgcgcacctcacagtgagattcatagcaccacatgctaatcagctgttacataggatctccatgggcttctgcaggaaggaactctacaccactcttctcggcattttcaaatgtctcgttaaggagtgacttcttctctactgctgttaagtttccatctgaatttctcaattcagcttaaaagatcaaaggctagggaatcaaatgtttcagtagaaaataagaaaaataagaggccttagtttctgaactgacttctggataagtaagatttcatccattcttttacagtattaccatgatcaataaagatgcctctcagactgtcacaacaaagtttttaagaaagcagtgttgatgttttaagaaagaactgaaagtacttcgggaaattttctaggtccataggatttcagtatctctcagcaaaaggtaagtccaaaacagcggagtgcaactgacagcacatggcactcaccttgcttattttacaaaggcctaggaagtggctccagaattctcctcagtaggaaaactaccatcatatcatccaccacgaatctggataaggcatttacatcacatatctgtcaccctatgagacccagcatctttacagaatgtaagttatttcttcaacaagactgaacaaatatccttgcccaaggaccgctatttttaaacatctag

SEQ ID NO: 40975 - DNA, 1178 bp, Bovine  19866881178479
  misc_feature (1)..(1): n is a, c, g, or t
nataatgctaatgaaaaacctgtgtgattggcaggagaattgtagttatttcgattttagaaataagctaactcaggtccagagaattcaaaagttagtcaggggtagaatgactgaaatgtaggccttctaaacactgttttgtctctctttttactatattaaatcacttctttaataattgttaattgttctgttctgttacttcctctcccatccaaaatgtgtgggaagataatttatgagttttttttttttttttccccagtcaagacatctgtgcattaaaatcagatacagtcttgttgcatttgggaactcccagacattacattaacccactcccttgcctcagacagagcctttcgaaaaatctagcataagtctacactcaccagcctaattgggaagatttattaacaaggtgatcctgttcttcatttggcctctgaaagctacataaaatcataattcttctgtgttgttaacaggaagagacaaagctgacatgaagtggctgttctattagttagaaatcaggattttattgggaaggaggagagagttgagctgctggttaaaatataatgtgcttgttatataaaatagttggtctttctcatgtgcccacttctagtttattttcagacagttacaaaaagtgaaaaagaacaatgacccttcctgatttatagttgcatatgtggtttgggaacacttgaggctgtagataactcttggttttctctttttgactccgagtaggtttttcaatgtgacattgaagagtaggcagaagggtgtttagatgtgagtggactatccacggtaaattagtgggaccttaacttctctactgaatgccccaacttgagccagctcccctcattttgacgtgtgtgtttagggaatgaaaattaatgttgattttagcttacccctgacagaaaatgcatttaaatcctatgtattaaaaaagaaaatataattaaaaaaaaaactgctttctaaaactgcattttggtacatagtgggcactcaaaaaggaattttaaatgaaactgtgataatcagaaattaactgtattagcaacctcaataagtctagcatctatatatagtagttgactaaactatatccaagaaacaaagtgcatttggggtgaaagaaatatatt

SEQ ID NO: 40976 - DNA, 1317 bp, Bovine  19866881207786
  misc_feature (1)..(1): n is a, c, g, or t
nctacagccaagctttacacagagaaggaatataaaggtctagattagatggactaaactgattgcctatttcacgcactgtcttttcagtttccactaagtcttgctctttaaaaaaaacaaacaaaaaagccctgggtataaatacaactgtggcttttatgtataatgtgagatagaagacaagagaaaaatgaaaagtgtcgtggctttcagtgcctgccacggaaggtgtggggtggcttttgtaccccctgccacccttaatcacaggacagctgaccatctctgcctgtctgaaagcttgataagtcaaagctgagagagaccagaactctttaaaggcaggttcaaagcagaggcctctgggcctaatgagcccctttttaacagttcaaaagccttgtgtccttagaagggtgaggaagggtgtcatataacagagtccactaaacgttagtgcacacagctgcagggagacacctgtgtgtgtcaggcagaagtgtgtgaagtcaaccacagaaccagagttggaaagatagttcccctctgatgagtgggtgtcccagaagactcagccaaaaaacaccatcttgcccccatcctttgttttgaggagtggagggctgaaggcatattagatgctgaaaagcagtcaagctcaagtaagttttggaacagagtggagcataaataaatgaatgaaaataaaagggcacatcaaaaaaatgaactttagtattatggaatgaataccaagtttctccaaataatatgaattctcagccgtttacgatatcagcttgaaattgtacagaccttctccaagccagggtctggggaccgaggaaattctctccattcccttgggttcctaaataatcagcggtctcctagagtgcatgttgccctgatcttaagtgactttggtacagtcctcagaggcccttgtccggccaagcaagtgaggaatgccagcagacctggagagaagagcaacgaagtagcaagaggcccagcagtcctctggattcctcttgggaaaggtcttcagctgtgaactgacggggttttctttctctcactcacagtatgcaactgactacagagaagtgacctacaacacgagcgctggaaaggtgaccattgaaaaagtaaggatttttgtgagatcacttacgacaaatcctatgacacaaataatgcttctgaactcaaggagcatgcatgatgcttatttttttctcagcaggactgaagactggggtttgaatcacacagtttaggtttgttctttgggccgtttaccatctttag

SEQ ID NO: 40977 - DNA, 2403 bp, Bovine  19866881217038
  misc_feature (1)..(1): n is a, c, g, or t
ncctgagaaacaatcgatgtcattgctggagacggtgtgcttgcagaggaagaggcattttctgccctcacattttatctgtctctaacacaaaagatcaggtgcctctgaagagaagcattctggggagagtttcatcttcaccactgtcctaattagggagcccttcagcctaggaattgcaaaagccaaggaagtactgctcactagaggtggggactttgctgcaggtttcattgtaaacacacggctgaagtgtgtcacacatgggcaggcatgctggtgtgtccaaaatcagccactagccagaggacatggcctttcagcaagaccaaatgaaacagcagctgatttttttcaaataggcttcattagacccacagaggactaacccctcaccctgactttggattccacctttcttgccaggaattatagtaaatgattctatctggaactgaaggccttgatagactttgatgtggctttggagtcttttgagagtcagctgtcaggactcagccattcagaccactcacaggtccccagggcacctatgacataggcaagcccatgacatctggcaagactattaactttaggcaggaaggtaggtgtcagcttgtcagagaagatctgagcaagcattccaagcaaacccttccacatagggagctcagtccctaagaaagagtcaagataagggcgaccatctagcctctaagagagcagagcagggcaaaggccacacccaccgtgtgctgagctcagggaagaagaggctcaactgggtcctgctcagtcccttgagggactttcaatgagaaacaggtaagaacaccatccctgccctgcgctctgggatggtggctgtgagccctcaagattctacagagctgaaaggtagcctacatattgcttgttgttcagttgcgatttcgtgtctgactctctgcgaccccacagactgcagcacaggcttccttgtcctacacccagagtttgctcaaactcatgtccatccaaccatctcattctctatgttgcttggctggatgataatggattcaggcccaggtttaattgcatcactcacacagaaggctctgatcaaagagttattttcagatgacatagatccccatgaggcacttgcctcctgcctgtgacactttcaagagtgactcttgccacatgactgtagtgacaaatagagcttttctccagtgatgtcactgagaattccaaacttctccgaaaggaagaggggtgactacaaatacagacttcccagtgtatctcacttcttaaactcctgtatttgtaggcataaaaagaaagcttagaatgatgagtacagggaacttgaaaacaaagatgcttttcaagttatgaaatctggttgttgttgttactagttcagaatatatcgtgtagcttgagtttctaaaacaggaggcgaccagattcaaaattcaaagtatttaagtggtggtttgggagcaggtattttaaggaagtttagaggaaagaattggcaccataggttgttggtcactttaatgaaacctgtttgaagtgcactcagcagtgctgagcattcagctgtgctcagcagtgctctgaggtcctgggtttcatataagataatcacaatttctccttttaaggaaaattgagtcttatttcttaatcctatccatccttcaagacccagctcaaatgccacctccctccataagccttccatgattgagcccaggtgaaatttccttttctcgccactctcacagtactttatcctcacctctctgataactactttccattttctataaagcaagttacatacttgtttatattcacacatttcaaaagaatgaaatcttacagactatgttctttgaccacaatggaatgaaattaaactgaataaaatacctagataattataaatatttgaatattaaataatatttaatacttctaaataaatatggattaaataagctactttaagagaaattagaaaatatttaagcagaatgataaaaagtcaatattacatttccatttataaaatttatagggtacagcacttagagagaaatcaatagcaccaacctgatcatattagaaaagaagaaaggtttaaaattaattatccaaatttccactttaaaaagaaaaataaggaaattaaacccaaggaaagaaaaaacaataaacataaaatagaaatcagtatatcagaaaacaaactgtagggatttttaacaaacttgaaaactggttgtttgaagtttcataaaatttataaacccatagtaagactgatcagttaaaaaaagagaaaattcaagttaccaatatatgggaggaagaaggaccactcctacaggc

SEQ ID NO: 40978 - DNA, 823 bp, Bovine  19866881237527
  misc_feature (1)..(1): n is a, c, g, or t
nttaaagaagttgttaataaaaagcacgatgatttgactgaataggacaccagacaacagcaaaaggtgcatccaggctttccttcagcactgttattcaattggatgctttccagataccctaggatcccctactctaaggcagagctgataagagaaacaggtgtttcagaccatggctcaaacaacttatgaagtataaggactaagaataattgtactttagagtccgattaaaacttgtgatatcaacacacaggaaacctaggattttgtgttattaaaagaccccaccttattagaataagttaatccttcctcaggattttcttttaaagctataggaaaaaccaattatttctggaactacctactagtattttgagctaagttttagaaaaggagcatgaaaatcattcatttttcatttgcatacaagtgctctataaaatattattaagtctgaaaactactttgagtcaataaatatggatctatttgcacattgtttttggttaaataattgtgctttgtgctttaaagcagcctctagacacaagacttggcatccaagaaaattccataaactaaaactacagaaaaaaatttcaaataaattggtctacctaaaatgttatttaaactacctagatatttgtgagaaataaagaagcttttctttgacttaagataaaaagaaattaaaattttatctggttactactacttatatatggacattaataatgttaataatagtaacggctggtttcttgagcaatcactattcagaaagaaagcctgaatttccaaagcataagaa

SEQ ID NO: 40979 - DNA, 889 bp, Bovine  19866881240422
  misc_feature (1)..(1): n is a, c, g, or t
ncccagccatcccattgtgtgtggtgatcagtagctgctggatgagtccgtttctgtgtccaaatgaatctaagcagagctgctcttctctgggtttataagggagggacagtgtatctggggatagcagctaggctggctcaggctggctgacctggctcctgcatccccactcactggttgggaagttattcagaaaagctggatatgctttagggtgtctctgaccttcaaggaatggaagggggcttctctgacatagggctaccctgcagatgaactctctacactttctatttctgtcattaaacagctacttgagtagacatcactgcatttttttctttcttcattagatatttttaaatgtctaattgtgagaactcattctaagaagcttgaattttcatgctgaggcatgaaattagtgtccagtaactcaaagcctgtctgcttcactacttaatttagagatatgctggttggcacaaggcttctggtgccaaaaaaaatatttcatttctgaagcctcctagccaagttcaatgaaaaatataaccataaatactcattccaatgactccctaggccatagtcacaaagcttttacattgcatttactcagggctccccagccaaaatcatctcactcattcttctccagggtccttggaaatgtctgtatcctcccaccacctgccttactgtgtatatcctttctggcagctcatgtatctagatgccaggctgaagctgtgggccctgatttcctgcagtcataacgccctggctccctggcttaccatgaggtgatactctggccagaggccctgggggctgaagctttggatttttggctttgactgtagaagtcccttatccctggggt

SEQ ID NO: 40980 - DNA, 1125 bp, Bovine  19866881279207
  misc_feature (1)..(1): n is a, c, g, or t
ngcaaaaggagaaagggatggcagaggatgagatagttacataacatcattgagcaaactcaggggatagtagaggacagaggagcccggtgtgctacagtctatggagtcgcaaagaatcagacataacttagcaactgaacaacaaagcaagtggaaaaagcttgaggtcattttgggaaccaatctattgtcttccccgtagttataatgccaggggggaaaaggatgagtaattgctatccaagcctaaagctggttttcatggtaagaaatcctctctcttcaagaatgatcaaatgtgaagtttggaaaatagccttgataattacagactatactattaaatgcatggtaaattaatcatttgacttcatggcatgggggtatcccataatgacaggttaatggatgccatgcttaataaaaatgataccattagacctctagtgaagtcaatactgtagctctttgctggccacatccttgttaaaccagcctcaaaagcaaatgtacagagaaactttgaggttctgaactggtttaacgggtttcacagaagggtttcaaaggtagatagatgccttgtcaatttagaattaggcaatggaggcttcagtagagctcatatgttgaccccagattgctctggaaatgaggcagctagaaacttgactccctgttccctgcatctctcggctgattctacttcctgtctccaaccgtgctcatcagtgtttaaatctgtccaagtcggttctgaagaggaaattccagtctcttcttctcccacatgtttgtgtgtagaacctgacaggagttcagggggcagtgagcaggcaggataacagggcaggatggggcagaagtcatgctcctgggcaggcactgagaataaagtcacccacaaccaggggaagaaaaactgcaggccggctctgcagctgggattattcaaaggtgtcctattgtggaaagtaagacggaggtgtccattcaccagtgccaggtagagcagcattgttctggaatatctgattcaaaataggtggaaagatgggtcaggattcaagacctaaacaatgagggtgaaggaccgtaggctccacagaactccccagagca

SEQ ID NO: 40981 - DNA, 2479 bp, Bovine  19866881316452
  misc_feature (1)..(1): n is a, c, g, or t
nagaactgctcctggggaagatgtggacatagaacatgggaccgtgaccaagactgacctgatcctacacctgaaaacaactgaagctgcttgtccctgtgctgctccttcccgcccagggagccgggccccagactcctgccagccactcaccaggggctgggagcccaggcctgtaccccacggcttcactcttccacatgctaacacctgtaccacctgctccacagtacaaacaaagtccacatgacaccacagggcaggctaaagccctccttgagagctagaaaacttccgcggcgtcgctcctggggacacagccctcggctggctgccctgctgcctgtggacacatctgggcgctcaggcgggaggcaggccctgggctctcccagggtgtggacagctgcgcgcctgaacatcctcatgtgagggactgtgcaaggtccgggacatgaattatttcatttaacccacacaacgaccaaggaggcaaagctccacattcctaccaacaagcaaactaaagagatggagccagaacacacaactacctggcgcggacaaccctgttccatgcagtagcagctccacctcctttctcacacggtccacacgagtccagcaagtctaggcaacagtgtgcctgacaccctccaatctgcagctacagcactttatcaaattaaaagctctgggcagtctttttggccaagaaaacacttttattgagcctgtacttcctgaaggcatctgagcacaggtccctcttgtgcagagggcctcttgatcctcaaggtcaagcagcctggggagtggttagcagcacaggctctactctcactgacagtgaaggcgcaggttacctaacatctcgctgccttttcctccagcgttgacaagagaatgccagtcctcatcaggactggacagaaggtgcagtacggcgcctggcacctaagtgctcaacgtcaccaagcttcctacaaggtcagtggacgggggaagaaggcaacagtgccgagacgctgagtttacctgcacgcactgcacgagtgactctttcccctgctcgccgcccttcctgggaggctgcccttcagcatctggatccaacactgccgaccaggaggcgcgcgttctcactggtccggaggagactcccagggcctggctgctcaccagactgccctctctggcagagcgccttgcatggacgaaggagtgtcgcaaacagtgcttctggtcctcagcactccaggaccctctgagggtagccccggagggaagctggctttggctggagtctgacgggagggaagctggcccatcactgtctgacacgtccagggagctctgcccttcggcagcatccgtggacaggggcaccaaggtgggaatggagcccaaatacgaaatcacgctagaaacctgtgtcagccgagtgggtagggccagatactcgtcgtcactttccacctcctcttggggtttccatccagactcctcgcaggtgaggcgcctgaggccctggctggcccccttctccctctccagcccaggtgaggaccaccctttgtcccttgtcctcaggcgtggagaacccagctcaaggtgccggcccacaggtggccagtccctcaggttcctccgggctggctctctgctcacccaaggagtggccctaccgcttggggctctgggagtagaggcaaagaggctgcaagatgctaaccccaaaccaccctgcttctggggtactccagagggcccccgcttaaggcttggctctctgggcccagagaatgacagggcagcggcctcggctggtgggcaactatgggagacgttagtgggtgacttaagggtgctcgccggggagacagagaagctatccaggtctatgcccgagtcctgcaggacgggctcagccagcacgtggctatcgagctgcttcgggagccggggcccgggcctgaggggataggtgtagtccagcagatcttcgtactctttgttcgggttccagagtggggagcggcggtctggggagggaggcagggaatcgggcagcacacaggcccagtactcggcctggaaggagagacgtctcctgcccagcccggaggcatcacccgctgaggacacaggctggggcaaccactggagccgaggcccagggctgaccactgagggcgctgacggcgggacagccagctccaaggaggaggagaccttggcgaggcagccactccgaggctccgccttttcctggtgaccctggagactgctgcctggggaagatgcggacatgctgcaactggaagatggtggcgcgggcgtccctgggctcacggccgacctccacctcgatgggcacgggaagcccgagatgggatactgtgggcagaggtctggcacctgcggcgattccacaggatacgggtcatctttcggtgtcagcatcgtgtcccaagca

SEQ ID NO: 40982 - DNA, 984 bp, Bovine  19866881564843
  misc_feature (1)..(1): n is a, c, g, or t
nacttgaaactgtaaagaaagtgcttatcacagcatctaatacactgtaagaaccccaccaaatgttaattgtcatttcttctttgttttcaatcctttttctcttatgtttcatgcttctacctaagcactatgaccaaatttctttgtcattaacattccaccatcagtgtttaggataatcagtaaatgatgtggcaagtgtaacaacaaaatagatactatttattgagtacttactacgtgacctttttatgcatcaacaggcatgatgctaataacaaccctacaatccagctgccatcatcatttgatgaggaaatgatgaggacattgaagtagagagattattacttgccccaaatagcacatgatttagacacagtaccagttgagagccgagtcatggaagcccattttaaatactctgttttcgttaagggtgagagtaccatcttcaggaagaggtactttctaaaggtgtttagaaatacagcaacttcaaaactaacaattggcctcagaactcctttcttgttgttattgtttcacacaaaatttggacagattttaaatctgctctccatggtttggactataaagctagtggtcagaaagaacttggtatttggccatgttaggcaaagcagcctgaatcaagccaacaagtgttgaggtgtttggggaggaaactggaggaaagctggagaaaggttaaagttagtttataattagatataattttgcaacctaaaactcgaaaaacttgctccaaaaggactgccttgccttcttaaagcatggccttgtgacttttactggaatgcaaagtttgtcaagttattccagccagtaactctctccccaacctgccccaaacccaatctgccccctaaagcagaaactctaaatttgcaaccccatggattatactcagtgggcttctggagttgattaaaatttttttttcaaaaattcaaatat

SEQ ID NO: 40983 - DNA, 1809 bp, Bovine  19866881852073
  misc_feature (1)..(1): n is a, c, g, or t
ntattggctggactcaaagacctagagtcctgggagttaacttttcagataaactaagtggatcatttcctaggttggatcctatcttatcatactatctcagcagagcccacgcagtaggaagcatcttctactctgaagctccaaagtcattgcttagggatgggtgagggtcacataataaaagtcatacaaagagctaacagcttaagttgatataaattctttccaagtaagttctttgggcccatttgcttctgctttccattgcattcccaaatcattttcatactatacctttaaaaatgtatattaacagtccattttaaaaactgtcaatgcaattacctgttactgtgttttcaattagattaataacaactccatgagctattatgtagatctagggaaaagtatttagtcttaaggaagccatactgtgctaattcacagtaaagataaaaagcaatagaattttacataatcatcaaaaactttgaaaagcagtcttactgaactgttgcaaagttttcccaaaagcacttaacagcaatttatatcaagagatcctaagtttaggggtaagaggataagactcgactctttaaggtagaaaatcacctttcttatgacggtaataggtaatttccctacccagacctaagataagtgtacattcaaaagttcataactaactgtttctgagacattaatcattctctaacacatacacttagtagaaataactacaagaaagcttaaaaaaatctgagttaacattatgctgtgcaaaaaggaaaaaaaaaaaaaaaaccttgaacaacctacattctatgctaaataccccgactaaaatgttggttgtgctacacaattccacttgagtgcagaaatgcggtgattcctatgtgccatctttgttaagtctttggtacttttgttctaaatatcaccttgctttgaaaagatgaataacttgttaccaaatcacaaatccatttcagttaagtctgaataaaatccagcataaatgtattactttgttctgggaatgatggctccgtgtcttagttctgacagcttcctaagggcaaaccaccactgaagtcatttgggtttaaactgcacagatagaagaaacagtgaagtctgcctttttgttttctttttaagtcttcagaccttgctaggacacttctttcagaccaacagtcagacagttgtggcacctgatgctctgaaacagatgtggtttaaacaacatcagccaagcttagtgatctggaggtctccattgatctttatggtgtccattgcagataacgtttgaatgcggtggtaaaaatcaaaaagtgtttgtccatccacaaacactctgaaacccggatgctaacaaaggatttccatcctgaatggctggtctgggatgaatgggaagtaagggatcgctgactgttcttcacctctttccccaaatatacaagaatttctgagtcgctgccgatctgtgaacaccgctttgagttcaattgccacctctgcgggaggatcttccaaatcaccacaggtcaatctgatggcaaagctctctgggttgaggtttacaatgcccatcactaacactttcttgcctggtctcatgccacctctaatgtgcccacaaaatagcactctcagtcatggcaagtatatgtcggcttgaactggagagcccaaggagttgtttaaatgcgcatcatctagttcaccactgcatcgctgtcggccacagaccccaccgtcttcttgcacagcacgatggggtggcaa

SEQ ID NO: 40984 - DNA, 777 bp, Bovine  19866881905271
  misc_feature (1)..(1): n is a, c, g, or t
nttaccctctatggtgtccaaatattttgaaacaaaaatcaaagtgaatggcttagcatagtttcaaaagggaatgttaacactgtcttggagctgtcttggaaattttacagaaagtaattgtagctacacatcttccttccaccatgtgaaagctcaggaagaaaatgtttttctttctcttgtactttaaactaaatccatttctttgatctttttggaaaatcccccacaattagcaagagggcttgaacaaaacataacccttatttgtgattatgtttttgaagtgcacttttgagcacacaaatatataggtcgaaattaagtaattatctcccacacattgttttcttgcaacacagttaaatgttaaagctactcagtaacaagtagtatttttgtttgtttgagtgttgtctatgatcattagccaattgaaaaattcttcatagctatttttaaattattaaatttttttcataaaaaaatacatcaaacacctaagcaggacataggactttaaaagagcattcagagggaggagggaggagggttcaggatggggaacacatgtatacctgtggtggattcattttgatatttgtcaaaactaatacaattatgtaaagtttaaaaataaaataaaattaaaaaaaaaaaaaaataaaagagcattcaggtcaatacaactaatatgccatggaaaaattataattttttatatttctagaactactttctataattttttttcaaatgctcccttgaataggc

SEQ ID NO: 40985 - DNA, 2226 bp, Bovine  19866880137321
  misc_feature (1)..(1): n is a, c, g, or t
ntgctgctgctgctgctgctaagtcgcttcagtcgtgtccgactctgtgtgaccccatagatggcggcccaccaggctcccctgtccctgggattctccaagcaagaatactggagtgggttgccatttccttctccaatgcatgaaagtgaaaagtgaaagtgaagtcactcagttgtgtccaaccctcagcgaccccatggactacagccttccaggctcctccgtccatgggattttccaggcaagagtaccggagtggggtgccactgccttcttcactgtccatgtctaaatagtccaaaagcacagaatgaaaaaaactcaggaattatccaaaatgagtcaaatactcttcctggatcttttgggttctctccccaaagaatttctctgtcaggaaacttccaatactgtttttatttaatagacaacacttctaacaactgcaaattgaccagcaagcagagaacacatggtaggcctgagttgttttaaggatatcaaatcaatttgattttttggttactgcagaactatttattcaaggatattgtttgtgaatgaaagcctaagctttgtgtacaggtaaattatcaagttcccaggtgccagtattaactgagcatgcaaatgtaattgcatagtagaaacttcagactaggaactccatggggtgaaaaaacatttaatttgtagcaaaaggtaaaaataatgacatttgtaccttgtttctgctatatctaatggctggcaatatttaactgcaaaaataagttttcaaatgtttaccttgggcctttagatatgtaaagtcttgaatacacaggacatcatgttataatcagggactcagaggatttgaggctttgcattcatatgtttttcagtaagtcaaagtataataacatttaaaacccaaacaaaaaactccccatagctatgagattaaactgaatcagaaccctaggtactgcaagggaaatttagactttatatttaatgatttgttaaatttaaaatttttatttctgggagacaaaattcagacaatagttaataggtatgcattacaatatgataattccctataattatcatatgataattcattcaatatgattatgaccattcaaagtatatcttctaaattgataacaaggtcatgttttattttttaaaagatagaataaattaagagagatggaatgactgctttaaatttactccctaatctaacattgttattatttttttaaacttctttaaagttgcttagtcgtgtccaactctttgtagccccatggagtgtagcccaccaggtttctctgtccatggaattctccaggcaagaatactggagtgggttcccatttccttctcccaagggatcttcccaacccaggaactgaacctgggactcctgcactgcaggcaaattctttactgtctgagccaccagggaagccctcggttagaatgaagtgacgtaaaagtcgatcagtcgtgtctgactctttgcaaccccatggactatacagtccatggaattctccaggccagaatactggagtgggtagcctttcccttctccaggagatcttcccaacccagggattgaacccagatctcccgcattgtaggcggattctttaccagctgagccacaaggaaagccaaagaatactggagtgggtagcctatcccttctccagtggatcttcccaacccaggaattgagctggggtctcctgcattgcaggcagattcttaccaatggagctatcagggaagcccttggttagaatggccatgataaaaaaaatatctacaaacaataaatgctggagaggatgtggagaaaagggaaccctcttgcactgttggtgggaatgtaaattcatacagctactatgaagaaaagtatgaagattccttaaaaaactaggaataaattgacaacatgacccagcaatccctggacatataccctgagaaaacaacaattcaaaaatatgcatgtacctcaatgttcactgcagcattatttacaataatgctggacacagaagcaacctagatgtccgtcagtagctgaatgggtaaagaagatgtgttacatatatacaatggaatattactcagtcatgaaaaggaatgaatttgagtcagttacagtgaggtggatgaacacagagtttgttatacagagtgaagtaagtcaaa

SEQ ID NO: 40986 - DNA, 1620 bp, Bovine  19866880368991
  misc_feature (1)..(1): n is a, c, g, or t
ngagaagagggcggaaaaggatgaaatggttagacagcgtcaccagcgcaatggacatgaagttgagcaaagtccaggagatagtgaaggacagggaagcctgctgtgctgaagtccatggtgtcacaaagaactggacatgacttagcaactatagagaagtccctagaaaaacaaagattcacttaagatcattcagtgtggtatgaaattttatgcctaaaggtataaaaagtccttaataaaaaagttcattccatgaatgccattagataaatgtcttttttaggaataaaaaataccaagatatcttcagggaattattaacaaatattgtttacatatttccctttatactcatgtgacccaattcagtaaataggggtgtgagtttgctttattcttcctgaatgataaacacttatcttagtagtttccaaaagagtgataatatcctatcctgtacaatattccatcccttactattcaagacttgactcttgtaatccaattttagtatgctgctgctgctgctaagtcgcttcagtcgtgtccgactttgtgtgaccccatggacggcagcccaccaggctcccccgtccctgggattctccaggcaagaacactggagtgggttgccatttccttctccaatgcatgaaagtgaaaagtgaaagggaagtctcagtcgtgcccaactcttcgcaaccccatggactgcagcccaccaggctcctccatccatgggaccttctaggcaagagtactggagtgggttgccattgccttctccaaattttactataaggacaatgtaaatacataaacaagtatataccaacacatatacatacatacataaggagataaatatttgacagctagcttcttgccatgcactagtaattcaagcactatttaaaactcttaaaaactttctaaatcccagtggtttgcacagtctaatattgctaaaatagtgcattgactctttaagtatctgtaggctaccaaagtaaaactaattcgcagtgttaaatatttgaaataactttaagttgcctttgatttctttattcagattatatttcctatctttaatttgtttttcagaaaggtacttttctatagtttagaaaataattcttttttcctgaagacaatctcctaagctcacgtactctcagagtgtgaagttattaaataattatctttactccaagatttcaacttagctatctaattaaatctatatttattctgtatatgcaaaaatgaatgactgattatcaagaagcttaaaataatcatactttggtcatcatctctagtcttggcagggcagttggtatagaacacaaacagaccttgttcaaacttttatttgttcttgaaagaaaaagaatgtcttaatttctatacaattcacaaatccttacagtgtccttgactgtaaaatgcaatgtaatatcacacaaggtaacttttatttctctgtgggtattgcctgtaaagcaaggcagaattctttgagaagcaaaggaaagctttgaatggcgtttttaaagttaaaagaactccatcactaatacttcccatcgaacatatctccaaagagag

SEQ ID NO: 40987 - DNA, 2039 bp, Bovine  19866880433798
  misc_feature (1)..(1): n is a, c, g, or t
naatgtttgctgctgttaaaatttgctttttacaagaatgtaataaaatatgattcctctctacaaggactctaaagtatgaaaacacagtaaaaactttcatggattaagaatattaaaagaattttggctttcttaaatcgtctcatttctagatgaacactattcattagagatataatgtgagacacaagtacatataatttaaatttttaaatataaaaaaatttaaaagcagatgaatatttatgtaccctgaaatatctaaaatagcactttcaacatgtaatcagtataaataattattaaatatgatattgatatcatacttttttcataatagtcttaaaaatctggtgtactatatattttacacttatatcacatctcaattcagagtagccacatttcaagtgcttaacagaatcacctgactggtgattgccattttggacaatgaagttctatgtcatttttgagagaaaacattgataaaattagggcagagaggaaatgtttactgagaaccttattgtcaggcagactgtacaaggtaattttacattgatttaaaatgtaatccccacaaaaatatgtgaagtagctcttaaaatcctcatacttcagatgaaaaagaccgctactcaaaggtttaacaagcttctcaagaagtcatctagctaataaacctatctcggccaagatatcctctttccacgcctcttttcttgttcaaagcaagtgtctttactgaattttcattattaataaatgcttaagcttgcgagtctcttggacagaagggagatccaaccagtccatcctaaaggaaatcagtcctgaatattcattggaaggactaatgctgaagctcctatattttggccatctaatgcgaagaactgactcattgaaaagaccctgatgctgggaaagattgaaggtgggagaaggggacaacagaggatgagatggttggatggcatcacagactcaatggacatgagtttgagtaaactccgggagttggtgatggacagtgaggcctggcgtgctgccgtccgtggggtcacaaagagtcagacatgactgagcaattgaactgacctgaatatttattaatagaagaaacatgttttagaattactgagaatgccaaaaacacaaatagtatttaatcagaaaatgttttagaaaacatagttccaaagtgattatgtagatagagcatatatatttattttattaaattagtttatataacttttatctgaatataaaactgcactttctatatgcttacctttccaaagtctccttttttcccaaagtaaaatctaaagaaaaataaaatattaagatatagtgaataatacagggtgctttaattctgtttctctttttctatgataataaataagaaagaaaatttaatagaaaatctaaaatctatcatttataaattaagaacaagaattgctgaaaattgtcttatttcataagcattagggaaagactagtcataataatatatattctttaggaccaaaaaaaaaaaaaaaaaaagaaagatcagttaattttaaagattcactcaacaattaggagaaaaatctggattgcggtccaagcttttcccgtatgtatgtgaccttgggctgtttccacttttagatcacctcttaaatcatttttaattgcaaatgttactattctccaagggctcaatataaaaattctaacaattctatgttcacatccattcattctgagtagcttattcactattctctaatcatgtaattgactttcatatgctcttaaatagacatgaaataatggtttactacagcgattggtcacacacatttgctctgtctggagtcgtaatctgcagaaactcctttttccccttgtctatttgttaaagtgccagcttgcttttaaaggtgaagaaatagtaaaatattctattggaaaaataaacacatgacatcagacatcaaaatttctctctaagcagaaattattttaaataa

SEQ ID NO: 40988 - DNA, 1271 bp, Bovine  19866880458412
  misc_feature (1)..(1): n is a, c, g, or t
ncacagaaagggcagtagggaaaagtgaaataaagctaaaatgaagcaaatattttgttcaaaacaaaataaaaaacacttcagtaggtatttatttaaccaaattaattatgttaaaggagagttatcatcaaatatttttgttattttgcttatgagtaacagtcctctaataactttagaatatttattaatatattaatgagaatacttagtctttctgtaagataatatatgtagagttataagaaagccttatagtttttattctagcgggataggaaattttaagagcaaaataaacttagagcaggttacaatacacagcctagttagtactttagataaatcaaacatttcccttgaaaatgtgaagtgttacagaagtactgtacacttaatacagcagctggaaccagataattgagttacgtgccaggtgggtgataaatctaagttagattcacccaagatttatgcacagaataaggcagaaagacaaccataaagcaaaaactaaacaaagaataacaacaacaatattatgtgaaggaaaataaatgagtgggggaaactgtagcttttttccaagagtcctaactttctggggaagtatgtgtgcttggttatttattttcagttcagtagcattgtggcacccacttctgggatttaacttgcactgtagaaaagtcaaatctcccaagatccccttcctcctgttcacaacaggtcagaatctgccaacaatgggcaattacaataaagatttgggcaaaagaggaaaggaggttattattttccagatggagtcataagtgtgaatgagcaaaggtcaggtccaaaatagccgctgagagattttcttgagcatcaatgatgttaatgatggagattgaaatagaagtagagcttctcggagtttggtgagattgacaggggcttcagggtaagatgatcccggattttcagcaattgctggcttagattttcagaactccctgctttggagcagcaggctgatgtcattggtgacagtttctctgatctctgtccttccaactttaccaatagtcacatcagcctctcattctttctgttaaaacttttcacttaccaatcatgtattctgtccaatatgttgtactccttacattctcattactcaagatagaagatgcaagtcctgctgcagtttagattcgttggagacacagccaaaaaaaaaaaaaaaaagaagaagcttacttaaggaaggagaacgtttggca

SEQ ID NO: 40989 - DNA, 790 bp, Bovine  19866880499312
  misc_feature (1)..(1): n is a, c, g, or t
nagtaggatacagcttaccaactgagcaagtaggcaatcccatcattaggaccccaccctcatgacattatgtgtgcatgctaagttgcttcagatgtgcctgactctttgtgaccctatgaactgtagcctgccaagctcttctgcccttgggattctccaggcaagaatactggagtgagttgccaagccctcctctagaggatcttcctgacccagggatcgaaccccttgtctctaatgtctcctgaactgataagcaggttctttaccactagagccatctgtgatgccccctcatgacctcatctaagcctgattacctcccaaaggccccatctccagacaacatcaccttgagttaaggtttcaacataggaattaggggtcaggaagccatgaacacagttcataacaatgttgctttctttctatcattactcccctgacctgtgagtttagaattacaatgactatacttacacttttctcttggcttttaggaagagattttttttttttttagttatttttggttttttttagaagtccttttctacatacctgtaactgtagaatgtaaaagaaagatagttgaaaaaattacatagaagcatatgctctcttaaaaagtgttaatgagaaattaagtggaaattgttttacctgggaaatagtactatcctctttggtctacttatcttctttagtgtttttaaagcagaaacagagaaattatcttaattgggaaatatttaattaaggagaaatagatcattgggggaaatca

SEQ ID NO: 40990 - DNA, 734 bp, Bovine  19866880521040
  misc_feature (1)..(1): n is a, c, g, or t
ntgtaggcataacacctgtaggcataatacattaaaaactcagttcagtgtttcatgctgaaagtgggactctattagagggaagcttttaatgtttgtatagggtctgacatactggattttatttaacagctgagtttcctagacaagtactaggcatttcttcaaagaacccagccaaatgctataatccatttccctcggaaatggcagttgttaaattagaccccaaacatttatgaatgtcgctttgcctttccagcaattaaaagagttccaaaaaaaaaaaagaaagaaaggtccctttgtgtttcatggctttgaaattattatgttaatcctgagctggtcctcccatgagctctgtcaaatgctttggaggttacattcaagagggtggcatcattctgaactggtgtgggaaagggtttcttgatgtataaaaagtgtttgatattaaaggcgttttagcaatttgagcgcatctactgctgtgagttcccgcgtaagtaggcagcccattcatttccctttaaaggacaaacacctgaaatcaacaccagagacctactttccccaggatggagggggtaaccggtgagttgactgaaactgtccctttgctatttccttgtcatagtgctgatcctcctgatcgtcaccatgagaagacggaaaaaagagcccctgattttcgacgaagagagagatatcagagaaaacatcgtccgata

SEQ ID NO: 40991 - DNA, 1796 bp, Bovine  19866880579874
  misc_feature (1)..(1): n is a, c, g, or t
ntgaaggttactgctaagaatatactgataaaaggaaagtcaaaatggaggcagtgttgttaagagaactcttttaaactggagccaggactctctgaggaagtgtgacttaagaatggctcagcctggtggtatgtgaagcctagtgactgattgtctcagcacaggcatccagaacaccttccccaatgctccagaaactcaagatacttacgggacacttattccaaaatcaggcttctctagtggcttagacggaaaagaatccacctacaatgcaagagactctctcttgcattcagtctgtctcttgacaaccttccctttagggacaaatatttgctttcctgtgtcagagttaatcataattcctggcagacaattttaacaaaccttacagtttttttgtttgtttgtttgtttgttttttataagcccctgattctttatctccctcagaacacttttggattttaccagaatttgggtctccccagctgcaatacctaagatacccaaacaaagctctttgttcttggcagtctccaagttgattattaactagaaaattctgccaagaagctactatgttctttagttttagtagaagacactgatgttaaaagtttttatattcaaatagttattttgtactttctccaatttggaattatcattttaaagattacctctttgaaggtcaaaagttgaaaccagagtggatattgtgaaggagcctcaggcagagagcagcagttttcctcaagtctaaatgaaaaggctccaggtaacttaaaataattccatcaatagtatctggatagagtgaatatggaccagaatgaaggctcaaaagagcaacagagtgtggtttttaaatagtatggctcctttatatatttccttcaggttaggaacagtctcagggtaacaggataagatttaaagatttggaggtccttatcctgcaaagaacattctcatttagagccttctatattcagagtgtggaattagacactgttaccttgacagacttcacatgatgacctttataaccttcaaggccatagacacattcataacagtatttttagcagacatataaaaatactttgaaaaaataaaatacatttttttcagcttagaatggtagcaaaattcatattgtaaaagtcactgtgtatgttttgctttcattattcatgcatttgtttgggattgtgtttctgtaaggactacatatttataattaacatttcaaataccccaccaatgtttttccctcatcatttacaactgctgcagaaactactgaaaatgttgcatttctaaggagaaaggaaggcacttcaaggtccttgctattatgttaggaaacaacagaaaaggatgcaaaaggaaaggcttgttggtgatgaatgacattaggagagaaattgtaggagtggtctcaggtttgcagtgcagctctgtagtgtctctattgctattgaattgtcattgctaacatacagaaggaaatggtgaaggcactttattgctttttgaaacttagaagggaaaaaaaatcagtatcttaaataaagatttcaattcctgacctcactagcttactttgcaattgaaccaaagtctttaattttagcctcaagtaaatgagaattcaggatttttctctctgcatgcaaaagctcaataaaatgggctgtactggtagagtagacccactgcatatgcaaattcagacacattaggaatggatttcatttcacaatgtcatagtaagtcactct

SEQ ID NO: 40992 - DNA, 1323 bp, Bovine  19866880652367
  misc_feature (1)..(1): n is a, c, g, or t
ngagctactactaccactgcgaagttacttcagtcatgtccgactctgtgcgaccccatagacggcagaccaccaggcacccccgtctacactccactaaattcatggaacttcaaagtatgtaagccccgctgtgtaacgtgggaaatggcccaatcgagcttcacatgctatatttctctttaaaaaagcctaagcccttaacatctaccatggcttttacaatgcttacctttcttctggaggaattttttcatcatcccaattaaaccagaatttgaaagttcctttaatattagtttatgctatacatcaaagtgttagttttgctgaaacatgctgatgatatttcatcttaaaactggcaggatttcaaaagcaagtaccactgggtatttttaaagaaatcacgaacaaggaggctggtattctgaagcctcttacctggcctggctgggcgttttcacaaacagtggtctcatagtccatggcaaactcaggggcattgtcattgatgtcaaggatagtgattgctacgtagcctcttcccacttgagatggattctctagtaaagaggaaaagattttctcatttacaggcacacctagttctattgtactttgctttgaatgtgctttgtagagattgtgtgttctacaagttgaaggtgtatgccaactctttttttttttttgcactcagacaattcattcagtggatttacatttatatatatcaaaaaatagttttgcatagcttcagagttccaatacatttttttgtcaacaactctgttcagaacacagtttattaaaaaaatattttttgaaccaaggcttattttgtcatctccagatctccagaggagaatgaatctgataagaggattgggttatatcctctgggtatatgagtgaagcacaagactgagtcacaatcatgtcttaccaagtgattgggtacacctattaacaacttttaggctagagaaatctattcgaaattcgtgccatcattttcccatttctagtatgttattaatgcttcttttttcttacttcattattttatttttttaattttatactttttttattttataaggtgtatgccaactcttcatcaaacatgtgcatcaggcccatttctgcaataatactggctcacccacctcatgtctctgtcgcattttggtaattctcaaaatatttcaaaacttatatttattatgtgttatggtacagatgataccacccttatggcagaaagtgaagaagaactaaagagcctcttgatgaaagtgaaagaggagagtgaaaaag

SEQ ID NO: 40993 - DNA, 1129 bp, Bovine  19866880710239
  misc_feature (1)..(1): n is a, c, g, or t
nccaatatgtgtagccattagtcctgtatgatactgtcattcggagaagctgggtcctactttgcagcctatgtgtaaggctgaaatgacttcaagatggtttcaaatttttacctagttgatctctgttttacagatgagaagactgaaatgtatgcattttagagcattgcttaaaataatgaggaaattgacagtataacccagggtttctgcttactgatctttccactatataaagcttcccccagtacagttttagaagattctgtcctaccttctaaggggataattccttttttctctcctctaatttgaagactgaatcatgaaatcagagtgtttccaggtatccttgtacaagcctttgttcacggatccatgaatttgtgcctctggttacccacctccacagctacagatcagctgtggaactgactcctttccatcgcctgttacctgcttggtttatcaaccaggcaatgttaggatggagaggctttattttttttaactcttttatctaagacggtacctaacctagagcaggtacttaataagtatttgaagaagagaaggaaggggaagaaagaaaacacgtgacagactgcctagcatgccaaagatgttaagcatagttctacaaactattgtttctctccagtgatcacgatcactatgacagataatcaatataaatcagatgaaacgattaggatgaaattcctcccacgctagcactcatccatatacgcttaaaccagcaaagcctcagtgcctggcctgtgcttgtctaattctgtcatttatcttggtgagtcacagagactgactgtgtatcagtgagcatggcatacacagttggtcagttacacttttctatagaaaagcccgatagcatccttttagcaggaactttgtctttgcatttagaaattcaacataaacataaaaacccaactattatacactgaattaagcttttcaaaatttttgctcctctcaccaaatgggtgacaactgtgcacaaacacacacattaaagaagacgggattttaaatgatccttggatcaacataaacaatcaacataaaaaaagaaaattgagagccaatctagactatctag

SEQ ID NO: 40994 - DNA, 931 bp, Bovine  19866880786424
  misc_feature (1)..(1): n is a, c, g, or t
ntccatggaattctccaggcaggaatactagaataggtagccattccctttccagggctttttcctgatccagtaatcaaacctaggtctcatgcattgcaggcagagtctttgctgtctgagccaccagggaagcccttatacatatgaaaggcagacacatacacacaccccacacagtttaaggactagacatgatcgttcatttgtgtagtagaatgtagaataccaagttatatttccatttatagtaaaattttttctctaatagatcttatctgctagacattttttttaaaccttcctgagtgtgtatgttgtaattctgctcctatggggcaatttaaaaaatgatagtttatggcatttttccctctaacttctgttgctttgtgattgttgtagttacattcatcaaacaccacattcatatgcagcaatataattgggcccgttcaatatctatcatcacttaaagagaatgaaggggaattagcccttagctagagtgtttaaagagggaaagagtgagccttagtgtttcaaaacagatgagtcatttgctaccttaagatttcttgcaggatttgcgcctagtctgatttttctttagactggagaaaatgcttgtaaccatgaagaatttaaatgagtacattagacaaatgctatattcaggtggaatatagtatcacatagtagtccatttaaaggattcaatacctgaaaatccagtacaatgaagtttcatcccttcagattttctagaggtctagacgatgtggaaaaattactttaaaaagagtctcacatataaaagaaggccctctttttcctgtatgtttataacaagtttggaagtaacaactgaaaatgataatacaacaaacatgcagtatcaaatctgaaattagattatttaatgatattt

SEQ ID NO: 40995 - DNA, 940 bp, Bovine  19866880806824
  misc_feature (1)..(1): n is a, c, g, or t
ntattaaagatggtggtgatggtggtttagctgctaagtcatgtccaactcttgtgaacccatggactgtagcccaccaggctcctctgtccatggaatttcccaagcaagaatactggaatgggttcttgctgtctgtggataccgataatgtgtttcatcaaattagggtgcctatatgatactaattgttctatttaactccatcatttctttctaatgtaacaggatttcacaattagaaaaaaaaaatccattttacttccatatctgacaggtttttgccccacaaaaatttcaatttatttgagcactaacattgtagctaacaattttgggaagtttagtgctaatgtgaaaaaagaaaatacccttgcaaaatttaccacaattgtttactttctgaaaatgagcactaaaacatttgcataacatctgcactgcttggaggggtgaaacactaaggcaattagctctgtattctataatgcatattgcaactcaggcaacgctgaagttgagctaacttaatatttagttagaaaagaaaaggcactttatttgcccttcactattagtgcttctgtaaactgcccaatcatggttaatgtgtttagaatcttgttttcaagactgttccaggaaacatcattttaagaaaaaaagtctctaagagaccttcatttagtctttataatatgtgtgcatttacatctattttgtgtacttgagtactacagattttacaagcagttatactatagcctcaaaagctccaggtcttctataataaattataaggaataatttataacagcaatatgccaaaatagctaaattatttgagattatggagaatgaaatggcaacctactccagtattcttgcctggaaaatcccatggacagcggacccctgggtggtctacagtccctggggt

SEQ ID NO: 40996 - DNA, 844 bp, Bovine  19866880844664
  misc_feature (1)..(1): n is a, c, g, or t
ntaaggttatttaaaaacctatcagaatcacaatttgtttcagctaaatctatggtaattatatataaagtctagaaaaatatcttaggtgaacatataacttattctacaaattacacactgaaatttcagagtagatatacttttgatgtaagtaaattttcctcctttttattaaattggaaattttaattaataaaatataagaaatttatcaattacaatcattttaagaatacagcatcaaaaattaatataattcatattgttttaatataatttatattgttaaagtagtattataatttatggtgttataatgagtatcacctacccaaagataataagccatcccagtactacttaataggctgtattgtctattccagtaataaaatttgtatagcttcctttaacctgagttaggattttaattttcctttcatgttatttatctttgcagccaacatatgttttccacaacaatgagaattatgtgcctggagaatccaggctctagctttaaagtgaaatagttgctataaaatgctgtatcttgagttttgatcataaaatttccaaatgtaggtatctcgatcaagtactaaaacaagacaactctttcctttatcatgctgaaatagctggttattgcttctctggggaattggtgtattaccttcaaagacagaactttagtgtcatctgttgctgcaatgaatggttcagtactgtccccagagttgagtgaaatgttgagtgaaccttgagtttcctttcccaattctgtagttgaaaataattgctttgcttttcccaagtgatagttgtagcaaaatagttt

SEQ ID NO: 40997 - DNA, 1079 bp, Bovine  19866880853564
  misc_feature (1)..(1): n is a, c, g, or t
natcccaaagaataggacacaattgaagtgacttagcacgcacgaagatggaagacgccttttatttccttctagcccttcatgtaatgaattgggtttaaagcctgtgcaccctacaggacactgaactctgtccttttgaatgctggagcagtatgaccttgagacttcacttgcttctttctgtatgtatgttttggatatgaaaaaaaagataaagtttacatctaagttttctcctggaacttttcctcctaggtttaacacaatatctatcaatcatatgccaaaagtactttataaggagactaaagaaaagagactagtttctgaattacttagtccttgtcactctgtacctgacactattgtcatttcccccacattgtataatttgtgtatatagaagttactttgtcctcagatgttagaagacgatagaccacaaagaataaatgcttcccacgcaacttgttaggaatttgagcaaaagaacagaagagattgctctctttctcattcctacgggattacttggaagttgtttcactctgtctttgtcaagttgctcaatcttaccttaaaacttagatgcttgctctaagagtgaacatttgacaaagactagctaccagactgttagggctttcccagtggctcagcagaatctgcctgcaacgcaggagacacaggagaggcggctgccatccttgggttgggagatcctctggaagagtaaatggtgactcactccagtattcttgcctgaaaaattccacacacagaggagcctggagagttacggttcatggggtcacaaagagtcagacatgactgtgcaccacactgccaggcttctgtcccttgtgatcagttgctactaagttttgcaccaagatcatcacgtgccacactcctctggggccgccagagtggctgcttggagtgcagcagcctgaccttcagggcacctgccacagccaagcccccatcatactgtcctgggctcccttggtggtttgctgctggtactgctaagtcgcttcagtcgtgtccaactctgtgcaaccccatagatg

SEQ ID NO: 40998 - DNA, 1012 bp, Bovine  19866880892984
  misc_feature (1)..(1): n is a, c, g, or t
nctagctagtgtagtttttcagctggacacatgcctgcctctgacataaccaggtttctatgaataagaattaagggcaggtgaacattaggcatgcaagtgaaagtgtgttacatgaccttacatagctgtttgaggattaggaaacaatgtatatattttaaattcttagtctatttagggggagggactattgggggaaaagttaatgaatctgcttttgggtatactgacctttaacagaagatgttgccggtatttggggtagtttatgaaatctcaggaaaaggattgaaactggatattgagatttttgaggcgtctgcataataaatacagagagcacaaccttaactgctcgtgctgcaaaaatatggaagcgatctctttaattggtcgctccaacctccagtgaaggaggtcaagtattttcggctgtaatttatagaaactagaaggatcattgtgaacgtgcagtcagcactaactgcagcagaagttgcattaaagataactttgggtcatgattagagaaacaccagtcctttcctttcccgttcagcctctaattggcaattgtatttctctgtccccaaaccagtagatccggagctacaaagagcgtgcggctctgaacttcttcagagtgtttttttctctcttggcctcactcagccctcccagacttattcagagacaatttgtaccactcactctaaaaagtgctatattgtatttctcttggttaaggaatttttttttccccttaggtaactttatccccaactaatgtctcatacagaaactcctgctttttgcatatccagaggggctggtagaaactaggggcccctttaatgctggggatcccaagtccttgtggttaagaagtagaataactattctttgtctcttcctggtccctgccagagtcctccatctcttctcaagttaattcctctttctgttccccactcttgccctcgttcccttcatcttactgagcacagca

SEQ ID NO: 40999 - DNA, 1587 bp, Bovine  19866880959404
  misc_feature (1)..(1): n is a, c, g, or t
nctgctcctactctctgcatacttaagcagaatatattcaaactgcaaagaaaatcaaagacaaagagaaaaactagaaggcacagagaaaagacacacagaggaagaaatataagaattttaattgatatccaccacaaactatgccaacaaatagaagctagatcctctttaaagtgaaaaaaatgttaacactgagttttattcaaagcataagtgtagctcacaaagtgtaaagaaataaataccaaaaggtatgagtaagaattcaagatctcttccatccccctgtccaagaaacaaaggtttctatgacccgttttaggaaggaaagggagcaactctcttgtatctcttagatttaaaaaattgagacacaatttacatattacattgtgaatgttttaggtatagattgtattggcttgacacttatatgttacaatataattagcacttggagtgcaggctacctcctctctcacatcacataatcttttcatttttgtggtgggaacaattaaattctagtttcttagctctgatgtttataacacaatactatgtccataatcattatgctgtgcattggatctctaggacttatttatctcctgactgaatgcatgagagattcacactccctttcctccctgtcatcccaagggcagcagtaagagagtgcgaggaaccatacagctgttacctgctttctaagtgaataataataacctgtctgatccagagcaccctggggttttcattcataataaaaccactaaagataaatattaaaaccacaaccaactcctcatcatacttgaggctatccctctctgggtcctcagtaactggctcacttcaaaaagaaaagagctttaaagcatgattgacaacagagcagctgaaatctatgaaagctcccaagaccaagtgttgggtagaaagtgaaaatgagaaggttactgtaggcgttgatgaaacaatgagtgaagcagtagccactcccaaaacggaagtgtgcactgcttgcccatgaggctctctaatcagtgtataaggtatgtacacacacacacataatatttacaacagattggatgatggatcatttttagtggaatacatatgttttctctctcttagcatgatataagcttggagcttaaaatgcatttattatgtccttctctttccccttttcaggtttaatctgggcagaatttaatcagctgaatttagtgtttgtagcctataggttaatccctataataaagggtcattgtggttcaaccagacaagatagagaaacctcttgagtaaaaaaaattgaggtcggagacctcaatttttgcatttagacctttttaacatactgttcagtgtaatattttaacctctcattttaaaattggaagattgaaattataattctgaccctactgagttaagataaagactcatgattctggctgagtgctaccttctaaaatgagtaaattgacaaaatgctaaagttattaaattatttagatgagggttagtttaaataatctaatgaaagattgcctgtttaatggtgaataa

SEQ ID NO: 41000 - DNA, 1382 bp, Bovine  19866881092360
  misc_feature (1)..(1): n is a, c, g, or t
ngagttgggttgcttttctgggtgcctgatgtcctctgccggcattcagaagttgttttgtggaatttactcgacgtttaaatgctcttttgatgaatttgtgggggagaaagtgttttccccgtcctactcctccgccatcttggcgccttcccctcaatctgaaatttcttagcatccccttactccgtgacactgagttccatctcaagaaccagtcggtactttaacctgattaacagatcttacctctgctgggtctctccacatagcagagttgaaggaaacctttgatccatcctgcatactgctactacctgactgattgtgtacatgtgacaatgctttattttaagcttgctgcaggaagtgagacttctaataaatttaattcaaacatttccttcagctggaaagtttttatatacaaaaacgtgacctgataataattttttgatggtgtataagaaaggaaatgtctggttaaaggttactaggctcctcacaagtctgcaagttaactttctgggggaatccaacccaacataagggaatttgatctcatagagtcttttagaaattgctcaaacccattccttaaaaggttgttaatttcatcaaataactaagttctgttccagactgcctcttcaggcaaattttttgtttcattttgaaatctttttttttttttaagttttcgcatgttagagtacataaactctttccccattcaaaaaaaactttgtactatggacataagagaaatctttaatttgacaaccaaggttaagtatttctcttcagtggccttcaccctcctcttcacttaggtggtaaatttcagcttcttggtctaatgcttgctgctgctaagtcgcttcagtcgtgtccgactctgtgcaaccccatagacggcagcccaccaggccctgtgtccctggcattctccaggcaagaacactggaataggttgccatttcctcctccactgcatgaaagtgaaaagtgaaagtgaagtcgctcagtcgtgtctgactcttagcgactccatggactgcaacctaccaagctcctccgtccatgggattttccaggcaagagtactggagtgtgttgccattgccttctccaggtctaatgcttacttagtggcaaaaaaaagctgtaatagcaggtatatgtaggggtggaggaggtcatggccccaagaaaccactcctctggccaggggagtcacagagtctggcagggctacctaccctagagtctggaagggctgtgatgtgccttgactccaggtctataggcggggccataggctggactcccagtcatccctccaggtcgggccaacactgtacttcccagctggctgtgcc

SEQ ID NO: 41001 - DNA, 1054 bp, Bovine  19866881228919
  misc_feature (1)..(1): n is a, c, g, or t
ncattgctatctctgttatggataatggtatatttctgccaacatatatatgaagatgatcgtcatatttggcacttatttttgagggggtatgtgctttttgtagtaaagcattgggcatggtccaggactaagttttagacttgtctgtacgttgtaaggtctcatgggggctgccgtgtcctgacttcagcttatgttaaggttaaaaggttcatgtcatgcagcttgaaccataagaaatgtttgctaacaggtgagtgcgttgtcggggtaggagccatactcgtgatgctggccattagcctacagggttattggcccacaggcaacagagcacaaacaaaggcttcaggcccaaaggagaaaactggccaaaatcaaaccagtttctaaaaatagagacaagaagaaaatcttcttaaaaaaacccaaaaaaactagaatgaaaaacctaaaaagaaagtacataaaaagggccgtattcctgtggaacaaaaatgaaacaaatgagcaactgttcacatgtcctggttaaacctaacagacagtaaccacattttcctgaatgaagttattgatagtactgaaagctttacgtcaagacaaatcttgtaagtgagagaagactgaatctacagaactggaacgtactgggtttattgaaaatacctaagcgggtattgtcagaaataatcttagttaagaaggctattcaaagagtatattttatgtctagcctggggaaatccaagttgttcctagaatttggttgagggtattttgagccttattggaatacatggaaaacaaaatgtataaatgatccagctctcggggagcttatagtcttatgtaggagacagccattaataaaaacagtacgaaaactatgaatgcattacataagacttacaatctgagattagcactctgaaggaatgcaacagtcttgaaagagtgtataacaaagacataggacctctactgggactttggggctcttgccagagaaaacagcttttaaggtaatgttgaagttatgggcaaccag

SEQ ID NO: 41002 - DNA, 2053 bp, Bovine  19866881297929
  misc_feature (1)..(1): n is a, c, g, or t
nagccctacaaggattccagcaacggccccggccctcatggcccccctgccccagcagactaggattccagcaacggccccgaccctcatgacccccctgccccagcagacgccactcagcagtcaccatcccttcctttccttttacttattatgggatgcctttgagtgttgtctgagcccatgtcgtggaccgcagggcctgggtttcagagcgtaaaaaggaagggccaaacacaacaatcaaaaccaccaccccctcagaatcttcaaacagaaaccgagagagggaaactcctttttttatgagagactggaaatatgtgagcccaatgcaggttaaagatgctcaaattaattaactagatgcctctagagaatatagaagaaaaacttggagaatacagaatatgatattttttcatgaattttttgtaattttttttaattgtgaactaaaactagttccaaatataagaaactgcttctcaatatttgaaagtaggaagatggataattctataagcattcttgtgtcagtgcaacaattacataaggctttcaaagaagcagcaatgaggtatgttaaattctcttaatcttcacatgccatttttaaactacttttaactactttggtattcctccttaagagagactgctaaagtgatcacaggggacaatatacctatttattttcatttctaagcactggaaaattatacagcctacttggagggctctcttacattcgtgacggaagtgaagattgacattgatgtgtcgcagaagtacagatagaaacctcaaaattaagctgggattttgcgagtagaaaactggatgtcatcacactattatatcaaaatagcagtgtataaaattcacctttctgagggctaattcacatcagtatcctaatttcactctggcttcccaggtggctcagtggtaaagaacccacctgccagtgcaggagacatgggttcgatccctgagttgggaagatctcctgaagaaggaaatagcaacccactccagtattcttgcctgggaaatcccagggacagtggagcctggtgggttataacccattgggttgcaaaagagtcggacatgacttaatgactaaacaacaatttcattctatttcatcccaggcaggcaggaaaatacagttttgaagagatttaaaaagatattttctcacatgctgctacgttcctaatagataaaaggaaatggatgcattataatcttttctgaaagtaatagtaattttaaccttcaaaattttggtgatccttcctctgtcttaagattctgcttttataaactcactcttttacagtacacaaaattttgaaactaaagaatgcaggtgcttatggtccagaaagaataatgtgaattcagtgaagatgaaaacaaagaaatgtctgaggaagtgctttaagtctagcacttctaattatcttctgttaagtatgatcatattaaatttcctttgagtaaagtcattttctaaaagactctgcttatgcagcaagcaaacacatgcaaacaaaacagaacaccatcactactatggtaactaattctaaaactttgtatcatagttctgaattggaaattgagccaaaaatgaaggaatagcataatgagaaaaaaaaaaaaaaagctgctatgttactccagagaggttaggaaataattagaaaaagatatgaagaacagggtttgatgaatgagagaaagcacgtaaggttggcaataataccaaagagacctgaatgctaagacaaaatatattcaatgacattcagttcaaatgtgaaccttaagggcaacctgtataaatgtgtattgaaaatcagatgggaataagatataatttttaatatattacactgtgggagtttttaatcctgcaggagataaatcttttttgtcagtgtcacaggagcatggattttttttccaagtgcacataaaactgaaatgtagatacttgctccttggaagaaaagctatgaccaacccaagcagcata

SEQ ID NO: 41003 - DNA, 2512 bp, Bovine  19866881331143
  misc_feature (1)..(1): n is a, c, g, or t
nttcttgacctttttattattatgctgccttgtactggcttggatcttaaaagaacaggtgtgtgtgtatgattgagtgacattggaaagtatgtctgaaacgaccttaaaaaataacctaatattatcttgttaattccagtgtattattgtcatttggcaaatgcctattaagcaataagacaaagtctgataaattcaagggagcaatattttgtttgcttaagaatctaaattgggaaaggattgtggtgttaaggggacagcatttagctgaactatctggataactgtcttccttgttttctttttattgagtagatgccatctcattgtcaacacagaatgtggaatgtgaattatttattgtgacttgtcaccaggctttggcttgttgagcatcactggtgtaagaggaagcaccccttgtccgtggttatcaaatctgggtagaagtcatttccagcacattttggctgtgccctggataccactctaattctctgaacctttatatctttgtgattaaaactgagttaattaccatcctgtctgttttagaagcttgtgagatgattaagtgaaaatgctgtgtaaactgtaaagcactgtaaaaatgtaaggctttattatggaaaattatggaaattatgtaataagattgattatatttcctcttagtggtaaacatggataatttctggcttgggaaatatgcaataagggaaaaaacatgcaattaatatcctaagttgggaaaagacacaattgatattattaattgaagcaactactttagaacaggtattttataaagtctttcatgagtttgggtaaactccaggagttggtgatggacagggaggcctggcgtgctgtggttcatggggtcgcaaagagtcagacacgactgaatgattgaactgaactgaacttataaggtctttgcaggttgagatccaaaccaaactaatttaactgctaataagagttaagcaaatcagcatgggcatgctgatagagaattcaataattctgtcagtcatgactggtgcttgtgtaattaatcatttatatacttcaaagaattagagtagaataatactgacttaatatgaaaaccattctgtactcttgatgacttgaaagcatttttaatatcttccaatagccttttataaatgaagaagccatcagaaattaaaaaataatatgcataggtactactgatatgttagtctactcataaaatgagcattaagaaatcttctttgtgtatgtgtgtgtgtgtgtgtaataaagttttattgaagtataaaggagatagagaaagcttcttacataggcatcagaagggggcagaaagagtacccgccaaaatcttctactcaggaattagttatctggttattcaaagctcccatgaacaagcattataaataaatacattagtagctatataactactaagaatgttgctacaatatacactcaaattaactcttacatttttgttgcattaactgatgaaattatgctgctaatgactgatatttttaaaagcaggaaaaattatatgattcactatcttattgctacatgctatattttttatgaatataaatactatgtttatgtatctcaagatatggaatgtatagttcgttgaatatgaccagttcttcaaaagaaatcaactttttaaacaacagatcagataactacatagcaattgcattttgtctgtaataatttaaaacatgttgggggagtgtgtaatttccttggttctgtctccccgcagcaagtgggccttaggaagcatcagtacaaacaagctagtcaaggtgatggaatcccagttgagatatttcaaatcctaaaggatgatgctgtgaaagtgctgcactcaatatgccagtaaacttggaaaactcatcagtggccacaggactggaaaaggtcagttttcattccaatcacaaagaaaggcaatgccaaagaatgttcaaactaccacacaattgcactcgtctcacacactagcaaagtaatgctcaaaattctccaagccaggcttcaacagtacatgaacagtgaacttccagatattcaagctggatttagaaaaggcagaggagccagagatcaaataaccaatatccactgtttcatcgaaaagcaagagagttccagaaaaacatctacttctgctttattgactacagcaaactctttgtgtggatcacaacaaattgtggaaaattcttaaagacatgggagtagcagaccacctgacctgcctcctgagaaatctgtatgcaagtcaagaagcaacagttagaactggacatggaacaacagactggttccaaatcaggaaaggagtatgtcaaggctacatattgtcaccctgcttatttaacttctatgaagagttcatcatgtgaaatgctgggctggatgaagcacaagcggaatcaagattgcgggagaaatgtcaataacctca

SEQ ID NO: 41004 - DNA, 1574 bp, Bovine  19866881371451
  misc_feature (1)..(1): n is a, c, g, or t
naaaatggagagggttagagaaatgggatatgcactctggcagcagtaaggattcaatacctttgaccttatggatcatgaccaggaagcaaacaaagctgttcttgtttacccaaaccccagcaaactcaatataatttttaaacaaagatgaatatcaaccttgtaattcctgatttactaaggttatcaagttgttaacacacacacacacacacacacaacttgggatggatttttcagagtcaggagagacagggtggcaccacttggcacagccactaggggaccaattacctgagtgattctgggcaagagatctgcctctctggctcaaggttttcatgtatgtagtgaccataacaatacaatcaacttttatagatgctaaaaaaaaaagttaaatatgacaatgcttataaagcatttagaacatcagctaatgattcacttgttaaatagatagaaatcttaccaaactgaaatcattattttcctgagttgcctggaaaaagtcaaatgggtgaaccaataaaaggaacatctcttcatggcctatttagcaacaggattacttctggtggtcatctgggacggtctttgtggactaggtcactgttagcaatttgagtgacttacatcatttcactgtgaagccatttatgaatgaaagaactctttccattggcccaaatattcttgcatcgttttttttttttttcatcgtttttttttttttaacatatctagaaaagtattgatagaaacatgtttgaaaagttgaaaaaaatttcagctccagacaataataaagtagttattaatatgttagatatttggtgaattataaagattaaaaatagcttattgtctccttatcagagagagatcaaaattctgagatggtattgtccaaaaactagcaacacccactaccaaaattaagccccaaggagaatttattattttgcatatatctactgacatgtctttaaaaattattttgagttatcaaaagacagccccaatgtgaaagcccagattactactcatcactgtctgactattccaggtttaatattgcattttaaattgttgagatactttttttaaagccttttgggcttaagtatttgtttttgtatggctaaaggttttaacaatctgtgttcatggattctgtgaaatcttgaaagaccagatctatagaatgaaatttctttcttctcaaatctataaaaattcaaataaccagacttctaaaagaaatgatttctcttagggattttattgactctggcactccaaatatatacatcttcttgaaagaagtaaaccattgtgtgataattttattaagaaggtatttggagatggcagtaattaaagtggtctaagttcatctatttcagaagcaaagcaggaagaccaagaaaagagcctgagaactgccaggaaacttcacaggaagaactgaaatccacccaggagaaataagtttctattaaaatatgacagggcatttaactgcactgatcttcctctctctttggagatatgttcgatgggaagta

SEQ ID NO: 41005 - DNA, 1201 bp, Bovine  19866881652464
  misc_feature (1)..(1): n is a, c, g, or t
nactggtgttgaagctgaaactccatactttggcacctgatgagaataactgactcatttgaagaccctgatgctgggaaagattgagggcaggaggagacagggacgacagaggatgagatggttggatggcatcactgactctatggacatgggtttgagtggactccgggagttggtgatggacagggaggcctagcgtgctgcgattcatggggtggcaaagagtcggacaggactaagtgactgaactgaactgatattgtagaattgcatgtcaagaagcccctcttcctctaccacatatcctttggatgatttatttcagtatcctgctttttatttttttaaaagaaggaaaataacctttggtcctctttttccctcggactttaattatactataagaacacctgcctacccgaactgattcctctccagtggcaattcctagaagactaacaatacttctcaacatgtaacctctgtgtccctccatctgtgtgtaagaccatcagaaatgcaagatagtttctccttatttatctttccaatgacacacacatactgaaaataccagtttctccaaatattagattatatcaagacgtttaatcccctctcctccctcaaaatatcagaatttcactactccaaaaatgttaggcaaacagtattaattctcaacacataagctagaggtgcttaaatgctacttgtatttggaacaaaatcaaattaatcaaactgcatttctgaattcagaacttaatggagtgtagtttgggtaaaccttagtgggaggcttgagccaaacttcagactaaaggcataatcttgaaaaaaaagaaaggaaagaaagaaaattaactgagagattaacaagctttatctagttccattaagcatcacttttctttagtaaaatcctaatagcactggaatctcttgcctcctgggaaattctcaaagatgtcattagctttctagttttggaaagtatttgagaataaaacaatcctgtgtgcatgcgtgcgttcatgcatgcgtgtgtcctgccctttggaaagtatttgagaataaaacaatcgtgtgtgtgtcctgccatttcttcaaatctgtggtttgaaaagctgtcctatgaaatttaaatctgatttgattcgaatatgtaaaatttaaacagcagccaaatcctaga

SEQ ID NO: 41006 - DNA, 823 bp, Bovine  19866881875398
  misc_feature (1)..(1): n is a, c, g, or t
ncaatgtctttctaggctgcagagtagacactacaagggaacgggtgggtgtctgaattgaggttctcagatctactcattaaatcagagcacaactttacattcacaggattcagatcataaagcagatactttcatttacttccccttcaatacttgctcaatcagaactatttctcctctgtcagactcttcaggcagcttccaaacttcatcacaacactggtataaaacacgcaatgcagcctctgtgaacattctaatgaatgatgagctggccttgaattcgtctgtttttgcacattacagctgtcattctcaaaagacatttaaaataggtaccccgccacacagtgatttgagaatgaatgaatactgccatttttataatatggaaaacggggtggtgaatggcattaaaatattcatttaggatcataagtatcatcagtgattcaagatcataaacttggctatttgaagaggcattcttctccatgataaagataaaattactaaaatacagagaaattttggattttttcagtggtgaagaaaagcaatggctcacacccacccacactgccctataccaacagccagagaagcataatagataaaatattattttataaccaagaaaacagtgctccaaattatagccttactgaatgtaaaccatttcatcttcaaagtgaaacagaacatctagccaaacaaccacattttctatccaggcagttttgcaacccatatttttttttcttctaaaatgaaaaaaagtcatttaatttagtttttgatttagcagatcatcatccta

SEQ ID NO: 41007 - DNA, 683 bp, Bovine  19866881907755
  misc_feature (1)..(1): n is a, c, g, or t
nggattctctattttttattttaaatattaaattgaaaagggatgataagacctaggtaatttcttgaagacactgagcagtataaaagaagaatttccatacaaataaaataatgtgtcaaaaagcagaatttagacactggctactaacacagctcaaacattccctcactcaaaatagtaatttctatacaaatattaatgtgattctttttccggtacttatgatgatttaattttaaacacaaacctccccaaatcagatagtgtcagaccaacttgtgcttactcacccacaggtgacatttcgggaacccctgccgtgtacgggccatccaagaatttgggttcgttgtcgttgatgtcctgaatcttgatgacgaactcagactcgggttccacgggcttgttggtgagccggtccaacgcctgggctcgaagcgtgtagtaggcttgctcctcgcgatccagcctcttggtagcatgaatatccccagtgttctcatcaataatgaaaatggaacttgccccttcgcctgacaagatgtatttgatggaaccatctcctttatcaacatcagagtgaagctggtgaaaaattcatgtgagatgagattaacttacaagagagtcagcgatatggagatatgtaaaaataattctaatgtcaggcagcagcacat

SEQ ID NO: 41008 - DNA, 1171 bp, Bovine  19866880385959
  misc_feature (1)..(1): n is a, c, g, or t
ntggagttatttggctgtccgtgaggcaggccggggatgtgggagtgtccggggaaagttttcttgttggccctttaccttcctttgatgagtaagtggacggcttcatttgtaacttgaggtctgagatgtgtaatgcattacttgaattttaatttgcttatgatcccagtagggctggtgtcggaacgtctgtggactggagctgctctgctttggaagagagcgtaccggccacttcccagcctggccaccctgtgtcttgtgctcccggacggtggctgtagggcttccggtttcggtgtctgtggcctgtgggcagcttttgtgccggcagctcctgagactcctcccttatgacgccttcccccagggaggtgtggagcccagccgagctgagctggacccaaggctcctcctcacctggccagcccgcgttggggcccgggctgggaggaggggttctgctttgggcagggtctctgagcccagcgagcccagcgtgatctgggctgtggattctgtgtctcaagtgaaacttgaaaccatgagctccggcttgttttgtctttggctgggagactgattcaggtttgtgaacttgggccaagattcgagggttcccacagctttcctctcctcttcccctctgcctgcccaacagtgtctgccgatgtttcagggtcctcgctggtctctcatcaggctcattatggttttctgggggcaagtgacgtggtgcttacctccttttattgaatttgtacgtgtgtatgtgtttgttcattcattaaacaaattttttttcggctgtgccacgtggcttgtgggattttagttccccaagcagagaccgaacacatgccccctgcagtggaagcacagagtcctaaccactgacccgccaggaaattccctgaatttgtgttttaaaaaggctttttacctgatgtctctggatatgttcacaaccacatgtagaagctgctcatttaaagtaaacaaggccacggaaaagaattagcaccccgatttgtttttgcctcgtgctacaatataacgtcagtgaaaacatagcaataaaggagctgtgtacagactagagacagtggggaacaggcccctgtagtcgctccctgttcggtcgagccgggctgccagccctcgtgtg

SEQ ID NO: 41009 - DNA, 2824 bp, Bovine  19866880533044
  misc_feature (1)..(1): n is a, c, g, or t
natgccctgaatgattactttaacacggttgcatgtgtgcatgctaagtcacttcagttgtgtccaactctttgtgaccctgtagcctgtagcccaccaggctccttttgtccatggggcttctccaggcaagaatactggagtgggttgccatgccctcctccaggggatcttcccaaccctgggattgaacccaggtctcccgcatttcaggcggattctttaccgtctgaatcaccagggaggaaaatgtgttccttgcacatttctccttcctggtttttctcttggagatagcaaagtggggacttccctggcgctccagtggttaagactccaaacttccagttcagagggtgagggttcaatccttggtcagggaactaagatcctacacatagtgtggacaaaaagacaaaaaaaaaaaaaaatagcaaagtagtttgacctgagtgtctccagcctcctcatggcctggctaccccagctcatccacacagctcccagctcttagctgccccagctaagagctgcccatttgggggctccccattagggggctaaactctcccatgccttccctggcaggaacaggaccactgtcatgcccaccttttcccctaacaatctatgtgctaagctactgcattcaggccttgtgaaatcccgcagcaaggacaagctccacagaccagatactgatgggacccagtacatcacctaccacgaatgaaattaggggtcatccagagtttcccctatcactcaatacggcccaatgactaccccttctttccagagccctgacacatcagagggtcccaggcccttcaaactgcaaggctgcccctgccacatcttgaggtcaccccttaatgtgggcactgcttagacctggactcaggccaccagccgggctcagttgtcgtgttactgagtctaagctccctctgctcgccacacaacccgtcagtgaatccaagagacaaggtgttgaggcacggaatacgatgaaagccagctgactgagaaggtggcaaaaataagtggagagaaataacgtgttcatggaccggattgatagacccagtatagttaagttggcagctctccccaaatggattcatagattcaatcaaaaatcctggttggatgttttgggggggtagattgacaaagctaaattttatatggaaaacgaaaggaattagtatagctcttatgaggcaaggaagacccagtgcagccaaaattaaactttaaaaaaaaaaaaaaacccacccaaagagacaagtcatctgtattagcaaactgatgaaatgctggtagcatcttaagccagcgtgctgcagtcagacgcgctttaggagcccctggagcccctgcaaatgggtgggtggaccggcaccctgctcctagagaggaggaggggggagggtgacccaggttgactggggaatttggttgaggcctgcaaggaggcaagctcacttctgaagaaggtaaaccctgaagatgtcacagaaactgctgtcttacatcatagcccctttaaattgtcttctttgtggatctgacaaaatctacataactgatatttttaggtccaagccccccgggcgttgcagctcttctgtttttatttatatacaattcactttttgcccccagttaagctaaagaagcctggaaagtgtgaaacagaagttcaaagcaatctcttaaggtgaagtgagcccaccacagcctgcaagtactcagtaacatgccagccatttccatacaacttgctacttctcttcacccctaacagtcgccacgtggaccctgagctcctgggccagccatgagtaagcaggtgtggctggcaggacctgggcaggacctggaggctgtgattacctggctgctctcacctggcagccaccaggcgtcccatgacagtggcaaaggacacagggaggggtggctgggcctcccactctggtagctgagtctcctacaacctggactggctagttctgagcccttccctgcccattacctaaagtcaggttcaccctggactgggggcttgcaggggttagaggtcagactaaaggggctgtctccactgcagggagaagatcccacaaagacacaggagaggtaggacttactcaaggacttttaacgagagaatctcatacaaatacaattttattgttttcaaatacgtggaagtatttatgacataattttaaaaacccaatgcattaagtttactgagtgctcacaagtggtactgagggagatgaaggagtttgaccatgaagaaggaggataaaacacgactcaattctcagttcaaactggaaagtgatgactttataaatcgtgttttgaatcctaaagtggttgcccagggagacgggcagagtccctgtaagctgtctgcagcatctagaaggtagcaggagagagtgggcatctcctggcagaaagactgtcaaaggcaaagagaaaggacaaataacctatttcatgccatggttcttctacactctcaataagtgggaagtgttatttttagctcttggcaaagatgaaatggagaaagaaagatgggagcttcctgctgggaaaaggaagctggagaaagagtcaaaagaaagtagtcggagaaacagtgagcctcctgttgggaaggaaaaaaactggaaggcaagagattgtagcttttgatgtcagtttgatccactcccatcactcaggaaatgaacaaaatgtagaaactcagcaatcagggaaggaaagggtataaccggcaacaggaacaccccag

SEQ ID NO: 41010 - DNA, 1649 bp, Bovine  19866880588010
  misc_feature (1)..(1): n is a, c, g, or t
ngtcctctatccctgtcaatccccattgccctgcactccctgggcagctgcacatgtcgggaactgaggtgtgaggggaggtgctgctacaccttcggcagcctggctctgggccttctttcccgggactcttcctgttctgtctcatgcggggtcgggactcttcacctgcagtcttgtcttcattccacacaatgtggtgtcagtgggtgaaacccacatcaggttcctctttctggttcccctgtcagcgctggaacctcaacaaagacatgtgaccagtgaatactgtgactgatgtagaacattttggtaaacagacttcctggttgcttccacaacttctgagcctggcggttttcttaccccctgctccctgctcttagccatccctggcaacaggaaggggctgcttacttgggtctgcaggtcctgggaggaggtggtctctgggctagtggtggcccaatgggaaggtacctgttttctccccacaggaatcttgtctatcggcctggctgctgcctactacagtggaggtgaggaacgtcatctgccccgccccacccctaggagcttccttagctgattggaaaatagagaaaaaaaggaaaccctgtcatttgtaatctgacaggcatgattttggggattgcccccacctctaaatggggcttccctggtggctcagatggtaaagaatctgcctgcagtgtgggagacctggtttctatccctgggttgggaagagcccctggagaagggaatggctacccacttttgcctagaaaatcacttttgcctaggaaatcccatggacagaggagcctggcaggctacagtccatggggacataaggagttggacaaaactgagcaactaacactttcactttctgcctctaaatggtttgcaggcgtggtctcaccttcgtgtgctggtgtgtcccccacagcttacattcatttacatcagcattttcatgtcaaaatgttcagaaaggcattctcatgtctgcctcaggtcttgtggcaggtatagtctatgctttcagcagctccctggaagtagtcccccatctctgctctcacacctggtgccatgatagtaacctcaaggagtcacccaggtggagagctgagggcagagctggtggaccacgtcctgtcctgtgtgacagggcccacagtgccaggtggccttggcaggggtggggtgtccttggaggcatgggcagtcagctgggcccccaggggccactcctgccgagtgtctgggaagcagctgttctgggaggaggcaccctgtgcaggcatgttgacttttgcccccctgctacctgcccatggctgtctcctgtgtttgctccccagatagtctgggctggaagctcttctacgtcacgggctgtctgtttgtggccgtgcagaacttggaggactgggaggtgaggctgatgcaggaagggtgcccaggctttggggctcctgagtttccctgcagggctcgtcaaaggaagaaagattccaggggcctaattccctcaaccccatcctgaaatgtgagcccagtggtctctggccagcttgacttggcccctggacattgcctattttgtgaccatttgtgggccacacaatcttctgaag

SEQ ID NO: 41011 - DNA, 1066 bp, Bovine  19866880671150
  misc_feature (1)..(1): n is a, c, g, or t
ngaagccatagttttcctgccttctcccggagtgtttcttgaactcatgtccaccagttccccatcgtcagcgtcccacgtcagtcgggggtccaggcgggcagcccctctccccgatcctgctgggtgatgatatcttcctggtgccttaagttcctgtagtttttacaaaataccccctctccccgatcctgctgggtgatgatatcttcctggtgccttaagttcctgtagtttttacaaaataagagttgaacagtgtttggagtttgttacatgtgattctgtgatataattcataccagggattagagtctccagtgaaaactgaaaaatcatctcataagcggtcacagcacatattttcatttcttttcataaaaagtagttcacgtggccaacaacaaatgcagctctttaatgtcgtcttaatattttttggagcctgaagttacatctgttactcggtgaaaatatttacgttttgtataacaagagttttaactttgttttcattaattttcaggggtctgggaggagagctcatgagacaagcaggtaggtctgagcaacagaggctgcaggttgtggggcaaggtcctttcttcccaccactgaaggaagacaaaagtcccaaggctatttatttacttgttttccaccttgtaaagttccctgatgggctcctttgcagggaccagtggccgggccgttttctggtcagagttaccgtggcggtgcacctggcctgcacatcctaactccagggctgcctgctcagcccgctgcttctcctgtgtgtgtgcaccccaggctcttaattttcagcttctgtgggtccagatacattttagtagctacggggctggcagccgctggggtgggatgaatgagtagagtaagtgtcccatgaaggggtgatacagttaggactgcgaatgttgccctctttccctcttcaatatgatagattgataaaacagaagggagaatcagaagtttcaaacgtacatgggatttcacgtgtgacaaagaaggtacgtgtttccaaccggctaagagggca

SEQ ID NO: 41012 - DNA, 1184 bp, Bovine  19866880753351
  misc_feature (1)..(1): n is a, c, g, or t
ntgatcgatgcgtgtgggagggacacatgggcttttttgagtgtggctcccggtgcctggttggtacacagacacacccacctcctgtcctgacccacaccaaggtggctgcgttggccacagcacctgcaggacatgatgggcacaggttggggtcgggggggagggcgcggggagatggacactcacctgcagagcagcccagagctcacgggcctccctgtcaccagacctctgctctaccaggtccatctggggctgaatgcgctgccgggcatagaaagtgacccagtcctgctgccagtcgttcacctgtgtgggtgacagcagagctcaggggaaggtgccagagccagggttgggagggctgacccccagaggcgccactacagggacaggtgtgaagcaggggagctgacccggcagcctggggtctagaggacatgcagggacagcaggcacctggacaacctcccacaacacctcaagatctgaaccaagtggacagtgccctgtaggttactcagtgtggccctcccagggagctgcttgcttctcctcggggggcatggccaccatcctacccacttgccccaagtgtggctccctgggctgaaacccccagggcagccaacctcaaaatcataaaacgcaaacttatagttcctttccattgcactacctttaggagtctccaatttaaaatcaaacactgtttaactttctattttcagcccccttggtatccagcatcctgttagtccttcctggctcctttgagctgacctagcatgtgaggtggagaaggtaatggcaccccactccagtactcttgcctggcaaatcccatggacggaggggcctggtgggctgcagtccatggggtctaaaagagtcggacatgactgagcgacttcactttcacttttcactttcacgcattgaagaaggaaatggcaacccactccagtactcttgcccggagaatcccagggacaggggagcctggtgggctgctgtctatggggtcgcacagagtcagacatgactgaagcgacttagcagcagcagcagcagcagcagcaacatgtgaggtggacactctccatgtcgacctctttcattagcagagaaaaaaaaaaggagcaaagaccgttcaccaaatttcaccaaaaattaggctg

SEQ ID NO: 41013 - DNA, 1244 bp, Bovine  19866880853655
  misc_feature (1)..(1): n is a, c, g, or t
ngtaattctgttatgttcctacttggttggcaaaatgtgcattttgatattttggagttcctggccatgctggcaacaacccctgccagcccccatctgtagttcctgctgctggagcccaaatgcccaaacccgaaagagcagaggccggcagagctgctggcggacagctctctccatgcttcctgcttctccacgcctgtcataagatggagacttcgataccagggagcacggccccctccttcagccctcgttgggcagctccttcccgtatcctgtgtttgatgttttctttttcatgaggagagaactgcgggaagaagtgttgtaagaaatctgaacagggacatccctggcggtcccggggttaagactccacacttccactgcagggagcatgggtttgatcactggttggggaactaagatccctcgtgccataaggtgtggccaaaaaaaagaaaatctgaacaaagcagagattgcatttttagcagttagatatacattaactatccccattaaatatgtcatttctttcattgtgaacgactgcattattaccagatgaaaggggccacctcctgttttcttaaatcagcctgtaggttgcgactaaggggtcagttagttggttcgggatacctgagcctcacctctgctcccgtcctcggcaggttcacctctgtctagtcagcctgtcttaatcgctgtgcagcgaccactgccaccgacgatcaagcctgtcacctacactgtcgccgcccctgtgacgacctcgacttcccagcagcccgtggtgcagacggttcacgtcgtccaccagatcccagcggtgtccgtcaccagcgtggctggactggccccagcaaacacatacaccgtcgcagggcaggctgtggtcactcaggcagctgtgctggcccccccgaaggcggagccacaagagaatggagaccacagagaagtaaaaggtgagcagcagcagcagtcactttgggcagtttttcaagtttttaaaaacctgccagccttgttcacctgagccttgctaacatgttacgtaatgttgtgctagaagcagggatgtttgccacctggtttgctttactttaaattagtgagagttctgtaagctacccagtaatattagttgatttcaatttttttctcttttctttgaatttagtgaaagtagaacctattcctgcgattagccatgccacaataaggtgctgctg

SEQ ID NO: 41014 - DNA, 1187 bp, Bovine  19866880917182
  misc_feature (1)..(1): n is a, c, g, or t
natttttggctgccccctaattggagaggtgggttcctcaggccgtctttggggtgttcattggtagggtaccaggtgggcagcggccagcccggcggcacctggtgcctgactctcgcccgtgttcctcctctccccctgggaacaattgcgggaactacacgcagtatgaaagcccagcttggttaaacatgtggtcacagctttgcgtcttcctaatttccccttttattaagggaaaatgcgaaatagtttacgagttcagtccataccttgtggggcaggtgtgccctgggctataaaagcattatttcctgcctcccgtcaggaagctattccagccagcttggggccagcctgataagtcagggcaacctgtgctggcacgtcccattatgctccctgattctgaaggcgtgagaacctctgcaagtcaggttcccatgattgtataggatatgttatggcagagatctgaaaactgatgatttcatcactagctggaagcacggtgatcaaaatgatgacagttgcaaaacgtttcatcaagtgtgagcccgagagtcctggtggtaccaggagtgaacacagacacacacctgctgcaccagcccggacccgcgagcccaaaccagctgaaaacccctcgggtttaagatgacgatggtgttagctttaaaagcactattgtttgatgttgctcatactttgaggccaaaatataaaataagctcactttggttaagttttctcaaaggtttataggagatctgttgtatgtaagttttcacagcgttactcaaaataatagtttgggaattaattgctcctatgttaacatgtacttttttcagtcagatgatcttgtgcccgcagttttggtctgaaccttttgttctttggtcggctatcttacaaggacagtgaacaggttttcaggggatggtttccttcgtgccaatgttctgggagatgagagtattccagggcgcaactgttggaaggcgagcctggatggagtcacaggggcagcagttttagtaactttgagtaaactgacctctccaggggttgcacaattcactaattaaaacaagggagtgcagctgcttcagacgctgatggagacgagctagttcactaggttataaaaatgcaatcatgtcagagaaataaacggggtaaga

SEQ ID NO: 41015 - DNA, 3559 bp, Bovine  19866880952572
  misc_feature (1)..(1): n is a, c, g, or t
ntgccttgtagcacaggcatgcccacctggcacccgtgttccctgtgtacacgcactgtgcccacacagggtttgggtaaaatcccgttcccccatcttggccttctgtgtcgtccactgtatttggatgacacatggctgatggacaggtgtaacacatgggtgatggacaggtgtgacacatggctgatggacaagtccacagtggggcatgtaggtggtgtggccggttcagacagtatgtgtaagcagttggtgttttagaggcattaagtataaaggtgcgtttttttgagtaagtaatacatgtgcatggtataaaattcagaaggtgcaggagttgtttagggaaaaccagggcatctcccctctcctctgaggcacctggttctaccctgggggtccttgttgacccccagttcctgtgtcttgtagagagctttggctcatgtctgtgggcgtattgacttccttttgtccatgctgagcagtggcacacggtgcccaaggtgggagccactcaagtgctcacccatggaggattggccagatacaggcacgccgcggggatactgtgggctccgggcagaccgctgaagaaagcaagcattgcgttaaagtgagtcacatgaattttttggtttcccactgcatatgagaggtatcttaacacaaatctgtaatctgttagggggtaatagttaggtgtctataaaaacaatgtacatgctttaatttaaaaatgctttattgccaaacactgctaaccatcatctgagctttcagcaagtcataataacatgagccatcactgttcacagatcaccataacacatataataatattgaaaaaaaagtttgaaatgttgcaaagattaccaaaatgtcacacacaaagtgagcaaatgctgctggaaaatggtgctgatttgttcaatgcagggctgccatgtatcttcaatttgtaaaatatgcagtgtctgtggagtacaataagacgaggtcagcctgtagtaatcaagttggctgtcagtagtaaggagcagctctgcgcgtgtgccgtcacagcagagcctggacgccgtttgctgcctgtgacgtcctgcgtcttggagagccttccatatctttatgtggagtgtgacctgtaggtctccccctcctggccattggcttctgtcttctgctgttatgaacgatgtggagtgaatattcttgtgtatattctcacctgtgtagttatatctgagtgaattagtagaagtggaactgctgaaccaacggatattcgttttcagtttcctgggcagtgccacttgctgtctccagaggctgtgccaagatgctgtccccagcagtttctgggtgcttctagatccttccagtggtagctataaaaccctgattttggcagtttgccaaaaactttggacaaatttttctttctgtttcccattgaatgacactgaatgtttgagctgtatcttttctataaacttgagtgatttttctcctaggtgatgatattattgatttggaaatactccatgttacagaagtctcttgtttgtgatagcagttgcagatatttttttgttttatggtgtgtttttcccggcagcatttttctcctttggttgagtattttgaaggtaccaatttcttctttttttggctcctgggttttgagtcataattagaaaggcgtgtcccacttggaaactatttttagaagttctcctatggtattttcagatggaactttcatttttaaggcataattacacttcatcagctgtcctcacatgaagcgtacagttcagggagctctggcagcctgcacacttggtggccagcactgtcactgacatgtgaggagctcagctctttggccccaggtgctgctctgcccatcaccgtagctcactgatgccttttgtagaatgtcgcacaagtggaatcagaaagaacagattcttggacctggcttctctcagcacagtggtttcagagagtcacacttcctgtgcgcgtgtgtgtagctcgttcctctttattgctgagctgtcttgagtctgccactgttgccgtctgtgtgttagtcctgttatagacagacatttagggcgttttctctttggggctctgatgaatgaagctgcttgaagtctttatgtatttagaagtctttttgtggatttatatcttcatttcttttagataaatacttaaaaggggatttataggaaagttaaaagatttataggaaactgccaaacagtttttgaaagtggttatatctatcgcctcatgttcgcagaagcagtgtgtgagtgcctcttcctgcacattctcaccatctctgcacattgttttttccagcatgtttattgccggctttcctgagtacacgcaacccatgatagagcacctggtcaccatgaaggtcggccactgggacgggtaggttttgtgtttttgtgtttgccgaagtaatttatctgtcaaataagaattcatattatttcccaagggagagattaaattgagctcgtaagcctttgatatgttttttgattatagatttcgtatttttgaagttaacacttgagaagtaatgtaagctccactcttcacacctgatgtgttggttaatggtctacctccagctttacttctggagacttcagtgacatgtgctgggtgtgtaaacattcccatgtcatgagggcagggaacttgggctgtgagatccactcacccctctatggccacggcctcccacctcacatctgctccatttggccgcttagccgtctcctccatccttcctggagccaggcaggcctttgctttttcctgattacggggcagtttcaaggtgtcttcgcatttcccagcagttaaacgtgtccgtccaatggggagggccattgtatgacccagagcgggttatcagcgctgctgtcagcacctctgggaaaacagcttattttctcttggaaagctctgtgtagctgccggcactcaggccgaggtctgagggacacagacgcctgtgtgtgtaaggagcttctccaggttctacatttggaatcccagcttatagtggctgttgcttgtggtcagtaggacatataaaaccaaaattgcaactatgtcacccatggtgttaaactaaactttttagccattgaaatctccagctgttgttgaaatgtttatttcttttttcaattctgtcttttttccttcgtgtattttgggtgagactctctggttaggtgcatatacatttctaacttttttggtatcttccaaatgtattgtctctttttgtttcatgttagatttcttatcttaaagtgtaatttgatatgattatagcttaagggttgccaagctttttcttgtaagggccagagagtaatattttgggtcattgtcccatgtattttattgttttttggtctttataaaatcctttaaagatatgaaaaccattctaagcttgggccttacaaaaagaggcctgtcacagcccccgtcacctcgcacc

SEQ ID NO: 41016 - DNA, 2488 bp, Bovine  19866881028964
  misc_feature (1)..(1): n is a, c, g, or t
nactcttcagtagctggacagtctcagtgctaacagtgacttgcggactggagtacccgtgtgcctctaaatttagacacaatttccatctcacgggagaatgtatctcaggctcaggagcaaatcagaagaaatgggagctacaccataacctcaaagttagttttaaaactctgacaggatggataaaagccagcaggactttgttagcactgcctgtgacccaactccctttgcccatgcagacactcggtgccccctctctcccggtggaggcaaggcgcctgctctgctgctgtcagcagtgtcttggcacaggcgctccagtgctacctaggcctttggcgtgctccgaaaagagtatataaaaaagcagtgcctgcttaagcttatcaaaaggacaatgatactctgtattcaattaaaattaataaaaatattttattgaatttcaggaacttggtacttttaaaatttcaaacctttgcacacaaatcaccactatcctttctagaatagtggaggttaggacttgaagattgtcacttgtctccttgtagtcacatagcacagaaatcccaagtcctgacacgccccgcccccttccgaccgtggcctcgcctactcttgttctaggagaggacgatgtgacgggtgatgcatttaaggagctcaactgtctgattggagactctactgatgcaagaagatcagtcccaaagccatgcacagacaccttgatacgtgtcacatcacttagatcacattgtgagtttctcttttgtaattttgtctggttcagggcgaagctgaagtgaagtttctagccccggaggaagctcagaagtttggcaaagatcgaagcagagactttttgaaatgaggcatttaggaaccaccagtggacagctgggcaggagttaagtgcaatgtgactgctgatgtagcacctggcatcgagtggggcctcaaggacacaagattagtgactcccaggtgttgaagggctcctggcaattcagagctaaattcaaacattttaaaaagcgcccaggacatggtagtctgttaatctatgtttgtttgtttgttttttcctctgctttcttcttgatattcttaaatttctgcttgccaacaaatgagccaactaagacagcaggaaaaaggaaagaggatgccctgcctttgaaaaaggcatgctctagctcccagcagcaaaagctatccttccgccttctttagatttgagaacagggtgcttttcttacccatagacccagctgaaatccctccagactcataaagtctaccttttaggctcaaaaataatcaactgatagactgggctcacacagggaaaagctaccggggtctttctacctggtggtggggatgcatctcccgggacaacaccccgaggcattgcttagtgccgcctgagctgtctccccaccgggtggttttatccactcacctcccccagagctcacggttggggaattccccaactcacggctggggggctgcagtggccatgactgaaaggtctggagactcagtggagtgacccaacccccacatacggggtggtagggggacaggacacagcaaatccaaattattttttaaatagcaaaccttctgtgcaaaaaggcaaataaaaatataccttccaaggtatctgtaaagtgtctgggaaatgcagattgctgccctggggtgctctgatccatccatgcttcagtccgcaagttagattttgctactgtcctgcatgtggtctcattcacatgatgattttatttttattttttaaatggttgagtttaaatccagctagtgtgcagtaatttcataatctcaatatgcattatctgcaataccattgtgacatctccgtaccatgaactgacacacaatacttagaacagatttatcatatttggacttcaggtaaataataaatgttttaaaattgcctaaatataccattctcagccatttcattccacgaggaaaatacagggttttttcctgtctttaaaaaattaaatatcaaaataactacatttaaataaataatgttatgatgatgacatttaaacattcacaataaggccttattgaggaagttgggctgaggccaagtgggcctcctgcttttcattctcccaccttgttccctttcctctcacttgatgttccatcaggatgatctctaattgaggatttcttcttattctcactggagatctgttatgatctgaatattcatgtctatcatcagatagactattattgtctctgtcacactgtctctactctctcttctggaaatctaactagaagtatgaaagaccttttcattttatccttcatgtctcttaatttctatctatttctcctctggtctacttctagatttcagagtgtcataggacctaatcattctatcttctctttgtagggaattcatctaaaattc

SEQ ID NO: 41017 - DNA, 1074 bp, Bovine  19866881207791
  misc_feature (1)..(1): n is a, c, g, or t
ntctagcttgtcttcccactcctaacagtctctctgttaaggagaaacattttatactttgataaacttgtttgtatccttgttcttttatgaattgtgttttttgtgtcattatctaagaaatttctgcctgactgaaggctccacgactgtctcttaacgttttctcctagaagtttcgtagtttgagtgttccgctcagacctcaggtctgagtggggttggtttctgtgtgatgcgactacaggtccaggcctgtgtcccggttttgcttgttgacgccccggtgctccacgtgtgcaaaagactggacttcccactgcgttgcttttgcgtcattctcagaaatggtgggtgtgtggtccagcctggggctcttctgttcctggatgtatttgcttgtcttcacaccaggatcccacggttttgatacttgggctctgcggtgctagctctccaggcccacgctttcttcccgtcgctgcgtgggcttgtcttcatccttggtgtctgcacatgagcctcaggactggcttgtcgtttcctgcacgtcctgccaggagtttggttggggctgagctgttggccgtccagggaggcccgcgaggcagtggcactgagtttcccgcgtcgcgggtctgcccttctgctgttctgacacctggcatctcacacttgccttccccccagggtgtccgtgccgctgctcaagacgctggaccagatgctggccaacgggtgcttcgacatcttcaccgcccaggagaagtgagtgctccctgtgctctgtgttcagtgctgcctcagtggttcagcctcgggctcacctttcagagaaccgttaatcagatccagagatcaggcttctgggagatagtttcctggtatgttcagggtcagcttttatacacactctaagagccaccaagaacatcggctgctcccgtgggggttgggggctcctgctgtctgtttgggacacggagcaggtggggcgttgcccctgacgggggcctgcagtcagcaccactgtggacggtggattggatggtgaacgggatcacagagggcctg

SEQ ID NO: 41018 - DNA, 713 bp, Bovine  19866881240469
  misc_feature (1)..(1): n is a, c, g, or t
ngtggaaactgatctgtgattcaagaaaacactgtattttacgatgactattaaaacttaccttataaccaggaaacagttagatctgttaccaacagcaaagtagtcagctgtggtcaaaatatcgatcccatgagggaaagtaccctaacaaaaaaatgggggaaaaaaaagaaacgaaaattatttcaatgaataaaaaaggcattttcaaagtttgataaccatatgcacatgagttaggcttataaacaaactgagaagtgccggggaacgcagacttggttactaaactgacagctaaaactacacgcctttaccaagctcacccaaggactttcaagtcaaggactactgactgcctctccgagcgaggctggacactgtgctaaaattatttgaagcacttaaataaaattttttcctaacaatactaacatttcaactttgaaatactctaagagccgtttctctaaaccacacaccacagaaagacatcagatttcagcagaactcaagttcagatttcattccaccagttcccctccagccagaaggaccccagaacccctgaggggggctggcacctgcctgggttgtgaatcctggacaggagcccacccccacagctggtgggagaatgagcaagacaaaaactgggaggtcacctgtgggggcccgatagctgacacccaggaccagactctgaaaca

SEQ ID NO: 41019 - DNA, 1569 bp, Bovine  19866881393255
  misc_feature (1)..(1): n is a, c, g, or t
ncagttaaagatccccgacctgttcctgatctggacatcatcccagccctgctccacggagacctctggggaggaaacgtagcggaggattcctctgggcccatcatctttgaccctgcttccttctatggccactcggagtatgagctggcaatagctggcatgtttgggggcttcagtagcgccttctactccgcctaccacagcaaaatccccaaggctccaggctttgagaagcgcctgaagctgtatcagctcttccactacttaaaccactggaatcactttggatccgggtacagggggtcctccctcagcatcatgaggaatctcgtcacctgagctcgggagggaggccggagtcctggtccctagatcataaccggacccctgtggccaggctctcctaccctggaatagcttcagaccaattttcccagcctcgtatataaagtatgtgacatctcaggagaaagcttttctcaccctaaagttagacttcatagctggatgcagctgcactagaaattggtgtgaaccaaagggaccagtggagggtgggctgcatttaacctgcagctgccccaaaggtagagaagggaggtggccagagtgccaggcgctgccaccaagggcatcttccctccagctccccatctctgcaggagtgactggtatccaaggtaatgcttcttggtgggtcagacttgattgtggacatgaaggcattgtcctgggagcacctcctgatgaccagttccaaaccaaatacaccccctttcctctgtgccgccgctggactgctcatttctacagcttgtgagctgtcgttcatcggcactgtagaaaccggtactacagcggtggtttccctccttcagtcttgaagtggtgagaaatgttcacgaatgccactgatgctaacaaatccttttgcgtaaaaacttgaataaacttcaaatggcttcagtgatgtgtgagactgtattttcctcatttacgttctctcctgtgtattggtgctgtttgccaggaaactctcgtaatgtgacaataagtacaactgttgtttcttaaaaaaacacttttttttcttggctttgctcagtaagagaatagctcagagcttccagataagagcaggtgtagcctgaggacttgctgctaccagtttaactgctgttgttgtcaccttatgagatttgcttaatggtaaagggaggttgcggagaaggcgatggcaccccactccagtactcttgcctggcaaatcccattgacggaggagcctggtgggctgcagtccatggggtctaaaagagtcggacacgactgagcgacttcactttcacttttcactttcctgcattggagaaggaaatggcaacccactccagtattctttcctggagaatcccagggacggcggagcctggtgggctgctgtctctgtggtcgcacagagtcagacacgactgaagcgacatagcagcagcaaagggaggttgaaagtaactctcaaatttcatttcaaggaagaagccgatgggtggcccctactagttctgg

SEQ ID NO: 41020 - DNA, 821 bp, Bovine  19866881495404
  misc_feature (1)..(1): n is a, c, g, or t
nacggacagtaggcaggaattagggggcagacacctttccgaagtgatgaaacccacaaacccactgaatcggggccaagggagggatgagaggcgggggcagagtcacacaggggcgacaacagagtagaacagacaacgaaccaccaacagaacacacaagcagtggacagggacctggagagaccggctggggaagcacggggccctcactgtgcgggggcatgaatccagacccgaacaaaagccagggagctggccgctgagctcctgcctcatgtgccgtcaggtcaggggaacaccacccgcccacccccagagggtcccgaaggaaggaaggaggcagcgctccctcacagggacgcccacccaggcgcctgctcaccgtggactcggtcaggccacccacggacacggccagccccagcagcacgtggtagcggtaggcaggcagccccaggaggcgggccatgcgcgggaaggcctgggagggcgcgccccagttcacggaggccacggcggccctgcaagacaggagcaagagctggaggcgctgccccatggggacaaggggctgtccccccgccctggagcagggcccagtacctgggggaagagcctctccagctccggccgggcgggcacgtggggggatggaagggctgtcggcgtgcagcagcgccaggaacacgcgagccgcgtgtgcacggaaccggtcgatcttctcactcgcctgctgggctaagcagcacatgagctgttggcagctgcagaccagagtgcagggttagcgcgtctggaaccggagagtgggcacctgg

SEQ ID NO: 41021 - DNA, 850 bp, Bovine  19866881558813
  misc_feature (1)..(1): n is a, c, g, or t
ncagacttgaaaagcagagggtaaaatttccaggttgaggacttcaggggtttgatgttttgacggcctgctggccccacgtgtgtgcggtgcaggaggggccctttctcctttgttgactcggattgcggatgagtttgtgggagccttacctttgtgtgggataattcaacctgtggttcttatcctttggtaccttcagttacacgccggtcctggaaacctggtgccgttctttcctctccgtacaggccggcgcgcttactccaacacgggcgtgcgtcagtgagcctgcctcaggctgtgtccctggtttatgctgcccactcggaagattttcagtctcgtaatttctttcctgtatagcaaatcttgttacttcatggcgagtgttcaggataaaaattttgaaagattgcaaagagttgttttgataatttatgttttaaatttgtaaaggtttttgtaatattttaatagtttttttttgtttgtttttttttaggcacaaatatttaaacatggaaaacgtgaagactgtttaccctacggtaagatttatttgtaagtgaggatgtgtttgtgacatgagtttgcccaaattctgatcaaatgtgtctcactaagattattcataggcacaaaaatttgtgacttgctgtatttttttgttgtcacaaattttttttgtcttctgtgtgtgtatgtgtgtgtgtgtaagagagagtgtgtatgtgtgaataatctaactctttggcctcaggccttgtacgggaggaggtctgggctcctgactgacaggtctcgatcctggggacttggaatgtagacctagcccctgaggtcttca

SEQ ID NO: 41022 - DNA, 943 bp, Bovine  19866881562802
  misc_feature (1)..(1): n is a, c, g, or t
nccagggtcagcagggactacacacccggggcatccaccctcccgccaaggagagagcaccacccaggaggtagcatgcgccatcacgcggtcagaagaccagaccctgagcagccgcctataccaggcgagatggagaccatggctctgcattcgaggcaggcccgctgcctgctgcagagccgtcagcgccctctggaaggacgaagcagaaccagagcgtccttggtgtccaggatccgctcgagagccacacggcacaaaaagaaccaggaagacgggccccatgtcccgggcagacgtgagccccagctgcaggcagagcaccatcgcccacactgccctggggatcaagagcccagccagggtcagagcagcgacatggaccacctctggccttggtgggacactcatgagaagagcaggggacgaggacagcacgagcgcctcaccaggcgcccacgttccccgcggctgtcggtggtgtaatccttcagacagtccagcagcgtgcagtaaatctgggagacgttctctctgcacacagcttcgtccggaggcccttctgcccgcacaccgacagtctggcaaatcctaaaattaaaaacgtgtgaaacccagctaacgtctgagaatcccatgcaagctctcctgccgttcttgtcgttttggctggatgtgtctttcctgccaggatgccctcagaacagacccataacctcagaagcagactcataatgctcctgcactaatgcaatgctgaatgacacgtcgccaagccacatttctagcgtctacagtttcagggtgcactgggggctggctgtggctggcccctcctaccccgccatcctacagaaggcactccacagggcttgtcagagaaagggcaacccctcccgacgtgcatgtgtgtactaacgtcagcattccctccacacag

SEQ ID NO: 41023 - DNA, 1179 bp, Bovine  19866881819742
  misc_feature (1)..(1): n is a, c, g, or t
nggtggaccgcggccctcgcgcagggcgtcaaagggtatgacccagagcagtgtctggctattatcacgtgaggtagcaccttaatttccagtgttaatcctaaagcttggccaacccaaaccagttagtgggactgtcacagatttcaaagaaccacaggtataacaagcaagcaaaggaaaagcacagaaggggaggcaggggcctgcctcctgacccctggggacggattagtagctagagctgaatctccatcgtcactgcaaagcaaggcaggcccagagagagagcacatggaatcaaaacgaaaaaaaacgggaagagacttttcataatcacttggaaatcagcaagaaagtggttttattggcattgggttttagaaggggaaaaactgaccccaagaatctgggtaatgaaggaaaacacatctaccaaggaagctgcaagtttctcacgatgagtctcgtgtttggcaaagataaggaatttgctttaatattattgccttgaaaagtcaaatgtttgtgccagggcctgatgtttggggaggcctgtccctttgtgaggggagtcggttgtcatggtcacagcaggaaaaactcccgcctcggtgagatattaacattccttactcttggagagaagagggtgggattgtgttttacttcaattttagcaagtgatcacattattaagaaatgttttgctctattatgatatgaaataatagtaaatgaatcttaacccaatttaaatacccaacacttctcaaaatagatactttggatctacagtatccaatagtcaatataacattgcctatttaagaaaatattattataggaaaatgtgtcctttcagacataatcaaattaactccattttattaatgtgtaacacaggattcccatgaatttgccttatccaaccttaaagagacagcagaatcatttcttcacaatattacaatttacttttttgttattgatagaatatatacaaaggtgatgtggctcaagttatatctactctataaaaagcatattatgaaagataaaacttgctttttaaaaaaaaacaaaacttgcttttaaagtagagattatacaaccaatcacaggggtcatcaaaatgcccttaatttactctcattccactaggaagatgcaaaacat

SEQ ID NO: 41024 - DNA, 1197 bp, Bovine  19866881820034
  misc_feature (1)..(1): n is a, c, g, or t
ntttctctgttgtgcattttctgcttttatgtaaccccatttatcaaaaataaatcccctcaacaggtgccacagcagttacactgaaacaacttgccaacgttagagactgattgcaacatattagaacaatgattttaaagaactacactaaagtgtaatatctcttaattactgaaccaacatatagtcagacattttaaataaaacagttacttaccgcatccaagaagcaaaggtaagaccctgagctctgtgctactgcttgatttttagaatatccgactgtttaaaagagaaaaggaaaagctcttttagaactcagttttagtggattctcttgcataaaacttactgcgatgtacacagtaggaaagctaggaacactcctcactgccaagtaaaaactcagaccaatttaggtgaaactgacgcagtaaatataatgacgacagacaacagtccacccagtactggtgttaaggcagaacgtgctcacagaaggaaaataaagccggcaaacatctatccagcacagcactaaggtaaccctggggagtatttttaaaacacaaaattacaatgtccctgaatggaaggacttgaatagaactggcagaaacactttctctaaagcctctgctgataaaagtcacgatacagttacctgacagatggggccacaaacacaagagagatcggctggtagaagcagctcattggactagacgcttcatgggcacagattgcactgaacacctgttccggggatgagttacaggccctgtcagtgtccactcttcctacacgtcctgggaccccccagctcccccaggaggtgcagacccaacttcaccaagacgtgactggcacaagaacccctcacggaatagaaactagaccacgtgtatgaacatcctggccgcacacagagccggcgccacttgcactgctgagcaccaggacagcacgtggagcacaaaggctgcagattcacctgtgcctggaaatcaaggaagcggtgcccggggatgggggtgcttccagggccggtgaggtcagctctgcctcagggagctggctgcagggtgtgttcagtttgtagaaaaataactgagctgtactttgatgataggtgtactttcctacatggatattacatttaataaaggtttaaatcctcatcttcaaagagat

SEQ ID NO: 41025 - DNA, 1604 bp, Bovine  19866882022303
  misc_feature (1)..(1): n is a, c, g, or t
nttctgccaggagccccacacctcccttcactttaacccaacttgtgcgcatcacaacagtgccccttggtggaaggactcagcaatctttttcttggttcaagttcaaagcgctgctctgaatagaaaaaataagtctgtctctaagacctggtcactctggctaggcttttaaaactgctgccctccacagagcaggcaggtgccaggatgggacaaacgccatggtgggatggaccctggtatcacgtttcctgttgcaacattttctgatttaacaatcccctaagacagaaaatgcctcttctcagttcaacttgttcattgatatcttcccaattctgttacatctttccaggcaaaccacctcgtccaccagatggaatccacactgaggtgggggggcacctcagtaaaatactggccatagcctgggcagtgaagcctgggcctgcccctgcactggtggggcctgaaacactcacactccccagaacaggtgtgagctaaccaacgtagtgggggggcagtggggaaggaatgccgcctgtacccccaaccccacatgactttcgacctgattcccaccaattcatcaaagtaaaaacagatgcattttgaacacaccaaattctatgttaacatgctgctctttcctgaatcaccttggcactgcgtaccttcaaaccttcggtgactgtcatagtcctcagagcagggcacctcgatgaacctgcctggcaggatctcgctgcggtgagccaggacctcagtgatgccgtcatcaccccccaggctgccccagaacaggcaggcggcgagagcagtgcaggaccccaggacaacgactcttaaccacctcttgcgcacatcccgaggcgcccggacactcttggtgctgagaacagaaaacagctgtggtcacccgaaggcaactgcgtgtgctgaaaactcagatcacaatgaccagagaccacacccacacttagttacagccttaaaggggtcccacactggtcatcatcagagctactctccatcaatccagaggcacttgtcagcatacgaggacatggtggggaatgtgtccctcgccccatacgaccagacagggctcactatgcccccgaggacaagacgaactgctagtcgcggtccctcccagcctggccatgtccatggagaaccatctgggagatcctgacagagcctgtgacatcgatcacattgcctgcatccgaagatgactgacacaaccccatgcactggccctagggtgcacactcacacacaacgtgaactaaggcagtgaaagtcgctcagtcgtgtccatctcttccaaccccgtggactatacagtccatggaattctccaggccaaaacactagagtgagtagccttttccttctccaggggattttcccaacccagggatcgaatgcgagtctcccacattgcaggcggattctttaccagctgagctaccagggtgaactaaggtaaacacgaatcaaactcatttcactgaaaccaccaggcagccgggaaaagaatgcaagaaccacagaaatgattccacactaagacactttctgtaccacct

SEQ ID NO: 41026 - DNA, 968 bp, Bovine  19866880404659
  misc_feature (1)..(1): n is a, c, g, or t
ngataagacagggagatgagcatgcctccccaaagctgactggactggaacacctgctgattcacccaagggataacaccaacacatttgggtccacatttctacaagtccccagaatgccctctccctttgctgcgcttcacacccctctcccatgcacagtcctctccttttgtagtaacaactcccatcccgtggttgccatgacaaacagatgaggcattgttaagaaagatgagagctgagaccttcacttctatttcaatcttgcagtttatttttactcttgagttcttagtattttacaacctgcttcatttgcccatgaactccaaatgatttccagaaggatctggactttatccgatatgtaagtaacaaaggtcctcctttgtcttccctcttacttggcagtggtgatcaaagtaccagcatcacgggatctgtgagccaattatgacagagtgatccaaaagtagtcgaagacaaaggagccacatatttaccaccactggcttcatgtgaagtgaagtcactcagtcgtgtccgactctttgcaaccccgtggactataaagtccatggaattctccagaccagaatactagagcgggtggcctttcccttctccaggggatcttcccaacctagggatcggatccaggtctcctacattacaggcggattctttaccagctgagtcacaaggaaagctcaagaatactggagtgggtagcctatcccttctctagcagatcttcccaacccaggaattgaaccagggtctcctgtattgcaagcagattctttaccaaatgtcatcaggaaaactggccttatgaagggttgtaaaaatgtttaataatggagaaacaattaagatcaccaatgtgagtcaatgaagactcagttccaaccaaaagcactttgcatgtttgaacatgtccactccattaataggataaaata

SEQ ID NO: 41027 - DNA, 1558 bp, Bovine  19866880449417
  misc_feature (1)..(1): n is a, c, g, or t
nttgcatatttgtagttttagagttacaacatcccccgtggcactctcatttaaatcctctttaataggacatccataattcatacatacatatagtatgtggacacacatacatatagtttcctcattttaaaaaacttacatacacgcaagtaaatcacatatccccacaataaggctagagttagatgctttatttatgggtggagatttcaaagtgaaaggtaaatttttttgccttacatcctgtgtcacagtataactgatggaattcattgcaagtgtgcaggctgacctttctgattctggtatttggaagcggcattagacttactccattgccttgtggatttgttctatgtggttacctttggtggaacataatttgccctttagttcataagctagcctgtgttttattattctgtgtttatttgtttaacactctgaatcactgcaattgttttcaccctaaagtattttaaatgctttcttgttacagaagtatcattcacccatcctttcaacaaatatttgtcaaacacacaccaggggtgaggcagactgctagctgcagtttatactaatcaaacatacagcaggtaagttctgtcctcagaaaactgaacagtgtcagggagtaatcattcatataaacagagcactatgattgcaggtaaaaggtgcagtaggcatggcataataaggtcctgtgtacctggagagaagaaacttctgctaacagatgaacccacagtaggcttccaatggaagggtgttggggctactactgggagggctggggatcgcagagagggaagaagacttaggtgaacctcgtgaactctgcttgtcattagggcatgccctgtttctcgaaccagacccctcacctttgagaggctccatggcttaatggttaagctcaccaaggctagatacacagccttggtttgaatcctgctcctcccacttccaggatgggtgatcttgagtgaagtctttgacctctctgtatctcagcttccctgtctacaagttgtggatgctagaaataccacctactacatctgatgacagtgagttcaaggtgttcagcctcataaagcaattggagcactgcctggtccaaggtatgctgttgaaattatcaaatctttttgcaagatattagcagatttttgaacatccagttaataagctttctacttttctttccttcatcctgaagacaatctctagcaactgcccaagtaccaaatattgctctagaacctggagatgcatgggtgaccttgggccctgaaccttcagttccttgcagtctcataagacatagtgcttcctggtcagtccatattcaggatagaaaatgaatacatcatgagaatagaactctgagaaagaacaactaggggagaagcttcgtagttcagttcagtcatgtccaactctttgcgaccacatggactgcagcacaccaggcctccctgtccatcaccaactcccagagcctactcaactcaacgtccatcgagtcaggatgccatccaatcat

SEQ ID NO: 41028 - DNA, 1009 bp, Bovine  19866880460822
  misc_feature (1)..(1): n is a, c, g, or t
nagggtgtccagaaaatctgactgggggcccccaaagcctcatgattctgatatagacctctaatccatattttgaaaaaatactgatccctagaattgttttcagccataatgctttgcaactctgtgaacgcttggcttgctttacattctatttctcaaatcattctgtatgcttctatttccctctctttcaaagctggagaatattcaagtcatgtgagattcagtattgaaaagatttataccagttgaaatttgtgttattatatttgtttcatgcattgaattcctgttgagactttaagtactggcagctggacccctattccaggtgctatgcctcacaaattgttgacatcttttctctctgttagataccagagcccagctgtaccagaagtaacaaacctaccacctacgttaccctctcgtttgcctgggtgaccaccaccgaagatatgaaagcacaaatttggaggtggggggtggttgctatcctaggctgcatgcaagccatctttgtagcttggctaactgaagtatacgaatagtggtttcttctagattaaacagatttaggttttgagaattatttcctggcagagaaaggaggcaacacaaaagcttaatgattcataaaaaagttctgccgggaaagcattggggttttatataagcatggatacccaacacccatgtagttttgctaacagggtatttaaagcccacctcaatgactacttatcccagaaaatgttctataatatctgtcctacctacttaattgtcaaaaattaaaattacattgctttagtacctctaacattaatgtaaccaatattgattaactgtactttagtatcagagtcaacagagagagctttcagaaattaagatataatccttgctttccaggagcttatgggtacaaataagcacttaaagagtgaagagctgattatactatgttcagaggataggaacatatatttcagtcttcctacag

SEQ ID NO: 41029 - DNA, 828 bp, Bovine  19866880489042
  misc_feature (1)..(1): n is a, c, g, or t
nataaactggatttgagtgaacagatgtttgctcattataggaagacaatgctgtgaaattctggcaggtcgctgcatttattcccaagcatgagagttttagggatcctgagcatttataacttgtcagtgattcaggctggacaagacggaatctttgtcaattatatcctcttcacacatgacctgcccacagcagtggtcactgaaggaaaggtaaatgcaagagactctttgaagggtacctgccacactcaaaaaacatggccatttttaatgaggcatgatcttttcatttgaagttgtgatctaccagcagggcaacttttttcagcttgttatgttctgagttctgcaggttagctagctaagctcaaatgtgattggcatgcaaagccccttaaaactgtcaggccaccttgcaattaggcataatgccaccagaacagatggcatgaatgatggcatgccagacagccaatacacgtatcagcattgagcattcagagagaatttcctctctcagaatgccaaaatatgaatctatggcttagctatcaataaagtaatttacattgcacacacattttagaaagaatactgctagtttttcacaggttgatatgggacaagataattatagactcatagattctcagggttaagagacactttaaagtcaatgaatttgggtgatgcatatgatgcttccattcattcattcatccctccaacagacactgaacccccatgatgagttagtcaccacctggctctctgcccagctctttggcctttcatcatttaccttggacttgaccacattca

SEQ ID NO: 41030 - DNA, 1059 bp, Bovine  19866880637672
  misc_feature (1)..(1): n is a, c, g, or t
naatagcagagactgttaaaatcttcagaaattaaaggcaacagtaataaaaagttgattttttttttacctaaacattctcataagagatcactgactacagaggtaatggtgtctaatgattaaattcatttctgtataatttttaatttttttttggttcttctataatggatggttgaagtattggggtattttaagtacttggagtggggaaaaaccagtatcagtataaaataaatccaataaatcttggatttatcagaagtttgtgatagagaaccaatacatttaccatggagattgtactaacatagcattaaaaggttgcttgaaagaaagtccaaggaggcttgatgatctcgttacaatatggttactattttgagtttcagacactgattttcgatcaatatttttgtcatatggagtccttttctcatttgattgtttggtggacatgtacaaggccaatgtcaatttaacgagagggctctgaggcttccaccagcaagacctgctctcaggatccccaaaggctccatatttgaactatttttgtctactcaactgcatttacaagtaataacacttttattatctcatgttttattcatcaaaccctatatagctgccaatcaaggcttgtaatcaacatgagattcccgtgctattgacatgaggttgacagcaataaggcaaggagtggcttgttttgtggtttaggggctggggtttggatctcagtcactagctttgtggtgttggcaagctgtttaaccaatctgtctctccctttctgtccatctctctctctttctctctcactctggctccctgcaggcttataaaatgttaaatgctgatatattgcaagattgttaggagggatgctgagacctcaggatgggaaccactgtaccatggagactcttctaaatgggataactgatgatggaaagagacaaggacccctagaattgaccttgggagcaagtagagcaggttatctatacaacactcgcctagctgtcatgaaattgatgatctaaatgatag

SEQ ID NO: 41031 - DNA, 1691 bp, Bovine  19866880672208
  misc_feature (1)..(1): n is a, c, g, or t
nttaccctctgctgtaattgggggtttcattctatctgcattagcagaactgttaataaatcacacaagcaagaaatgaggaattgaaaatctccaggtgtttgatgatgccccaaatatcctccccacatgttccataggagccatgtgagttcataaaatgacttgatgatcactcactcaggatacagtcttgtttacttgcacaggatcaattaaaacataggttacgatcattataaccattcctctagcctaaccctcaggagtttcttaaatcctttgcatatgttagatatctggtcattacttctctgacccttctgttttattataaaacttacatacacacacatacacacccataattttgccacagagatggagatttgagctgttagtagaatggttaaggacctagttaagagagatgtgcttgtgtgggctccacatttcctggagaagctattatttaaaaggctttgctttagtgtcattactgagaaaggatgaggtgaagacatgattagaatatagactcaagccttggcacctggcagtagctgagtaattgggcatcagaagtgaaatggcttgtcagagccaatcttatatagcaagtatagtcttctatgagataatctgctagacagagggcctggggacacttaagacctaggtcttgagctcttgggggactttgccctgatgtctgatgtgtctcagtatcagaggaacagaacattgaaagaacagaggtgaagtcagtcctcatacacaggaggcctgaccgtgggggaggatgccctttgttcttatccaacatcatgttgatggtaaaccttccttttcttattccaatctacttctaaatagaggcaatgtaactctgtattataattgtattttccaatgggttttattgactactctgcaaatgaccaggaaatgaaaaaactcttgatacgtctcaaaaaatgtgaagatacataagccagtcttcttgacaagatgatctgtacacaatgctttctacccaagaaggaacatcatgtgggcattagcataggactctttctgcctttgaacagagaaggcaactgccaaatgctttgctctgagaaaagatcagtcccacctgtatatagatattcccaccaagatgtcgatttcagtgtagatttttttccttttaaaataatcctaagtgttacaatagatgcaggaaggaaggaggttgtcccccaaggaccctctacattaaccagagataagagggggagtcctcgcatcattgcagggcatagtttgggggcagagcacatatacacacctctgtacacatttccaaacgtacctgactcagcgagccccttctcctggtgttgtgacgtttatgcaacaacagatgaaaggcacacatattttaaccctaaaaacatctttccaggtagttttgtaaagaagtaaagaagagtataaagaagtcttctgggatccaggattcaggggcaaactgctagttttatcttcttaaacctcagtactctcagcttctcattttataatgaggacaataatcagcctgtgttatgaaatgattgtgatgattagataatgtatttaaagttgctaagtaagtatcctcccctgcaaaaaaaaaaaaagaaaagaaaaaaatctagctgtta

SEQ ID NO: 41032 - DNA, 1705 bp, Bovine  19866880822571
  misc_feature (1)..(1): n is a, c, g, or t
ntctttatataaatctgtatgtgttgttgttgttcagctgctcagtcttgtctggatctttgggagccaatggactgcagcccaccaggcctctctgtccttcactgtctcctagagtttgcccgaactcacgtccattgaatcaatgatgccatccaaccatctcatcctctgtcgcccccttctcctcctgccctcaagatttgttgtaaatgaatactaaatgacaggctagtttaaagagcgcctatgccaatccactctgtgctccctccactcaaggctttctctggatgtgcaatgttaacagagatccccatggccgttaagaaggaaagggcctcctcctttctccctgacagaagccccactgcaatcctgctgcccttagcgcagggcactgctagcgtggattctacttttcagggaggtggaggggcttccctttttaacatcaccaggttttgttctctcctctgtttggtggcataggcacccagtgactcaaccacagctatatctgtacttgaacagccagggcatctctgtgctgcagaatggaccagctgcctcctcctgctgccctcccggggtgctcagagagggctctggtcttcagcagtagtggaaaagcaagcagctgctcaactgtttggagcaggctgtgtaattcgaatcccactgctgcttctattcctggaatgcaaatctaaacacatcaccttcttactgggatgggaagagcctcctgacacccccctgaaagacccctggactcagcagtgggttacagagacattcaggagagatccaggtctgtgccaccagcctgtgccaaccctcactgcggtcacccaagccctggccatggcccagcagcccttctgccagaggctgtgggtctccactgctctgcatcatctttcctttggctaatgttttcttctgacagggaagcattggaaaccctacctttcccccaagcagctgtctaggtccattcccttctcatctgtgttcagttggaacccagctaccccaacccctgcagtagcctacagatgggaattggccagcgttgaccagaagccccctctggactgccggtaggtttgtgagaagccttgtgattttcatgtgcttcttacaaatcacgggtattcatcagtactagcttcccgtgatgcctctgcacagagtagctagaagctttctaagggatctcttgcagccccagcctggcatcaacacagtaccctccagccggagcccacaagcccactgaggctgccttcacagcccagcctgacacccgatctgggcccagtgactcagcctttctgatgtcatgtctgcccactgggggcgcctgctggcctgactgccccaccagggagaaaagaagccaggaggaggccatgacctgaggccgaccccccccaagaggccagccggggagctgccatccttggaggctccaggggggatccacgctcgctgggattagtcaattaggtaaatattactcctgggtcatctggaaagaaaataacaaacaacgtgttctgcaaatggaaaagctggtcctgccagtgactgaggagccaggtgggtctctgccgggcaggctctcaatcagagggggttattaatatgctaaagatgccgcagccaatcggctcccatggcgaccgtgcgcagcctt

SEQ ID NO: 41033 - DNA, 1842 bp, Bovine  19866880845541
  misc_feature (1)..(1): n is a, c, g, or t
nctactatgtttgattcctccctggcttattagcttcttaaggggaaaaaaaaaaatcatgtctgggttacttctatcacttttccattccctgatataagctcttcacaggtaaatctgaacaagagccttagcctgtttctttgaagaatgctcaggttctgctgcttaaataaataaacactcaaaaacaagcactttagcaaactgctgtaacaaatggattgatttgctccctcccatcttctttattattattaaattttgatttctgcaatctgcatcatttttctctggggtattttaattagatagtagaatttaaaaataggatctcccatatattaagaaagtttcagtggtgtttatgtgggacagctggtagatctctgatttgagagtttttttcttattctgtcatctgaactttgctttggtaatgctgcaaattagcagctattcattctttaatgaacaagggttcatgtaaattccaactatgaataggcaatcaggatttctttgggtataatgggttatttaccaggcttccatttcaattttgaactctttgcttctttaaacaccatcctatataatttagcagccttctaattatgtatgtgtatatttactatatagatactgcctttgtgcctctatgtgctccaaattgctttattgaaataatggcaaaatctcactccacctgaagtgggatgtacaatactgaattcaatgaacattagttgtgcaaagctttgacggaattgtggagacgttgggagcagacatttggaatggttttcccaggagcctcggtaccatagctataatgaaaaatggcgaagctcagatgcttaaccattttagacttttcataatttatttccccgaaagttttacttcaaaaataatcttcagctgtgggaaagatgatctatttctggatgttttcttttccattttctagtatgttttagacccatcaaattctgaaggttaccaagacccaagactactctcctgagtttggtttcagaatctgcatggtagatagaagacctagaataattcaggattaagaacaaatggaatgattttctcacttcttcccccttcctttccatcccatctctcctcagtctaaccctaaataatctatctatagcgtaataaccctgtttatgcatttcaacatgggttttccagtagtcatgtacagatgtgaatgttggaccataaaaaaagttgagtgccttaagaattgatgtgtctgaattgtggtgctggagaagactcttgagaatcctgtggactgcaaagatatcaaactagtcaatcctaaaggaaatcaaccctgaatattcattgaaaaaactgatgctgaagctaaagctccaatactttggccacctgatatactgattctgggaaggattgagagcagagggcaggagaaggaggccacaaaggatgagatggttaaatagcctcaccaactcaacagacacgaatttgagcaaactctgggagatggtagagaacagaggagcctggagtgctgcagtccatgggaatgcagagtcagacacaaatgagcaactgagaatgatgcatattatgtacagttggagagacatggtttggaaaccagttatcattctgaaagctgaaatttgcatctggtgtcataattgtgactcagaatatttacctgtgaaattgcacagagtccatgagagcccagctgagtgcagctcctcctgcaaggtccgcagctgctgtccctaggacactcaaaccaccagaaagtgcagcacgaacactctcatacagaag

SEQ ID NO: 41034 - DNA, 3523 bp, Bovine  19866880853980
  misc_feature (1)..(1): n is a, c, g, or t
ntaagtcatgtccaactctttgagaccctgtggattgcagcatgccaggcttccctatccttcactgtctcccagagtttgctcaaactcacatccattgagttggtgaagccatccaaccatctcatcctctgttttccccttctcctcttgctctcagtctttcccaatgtcaaggtcctttccaatgagtcatctgttcacatcaggtggccaaagtatagcttcagcatcagtccttccaatgatattcagggttgatttcctgaggattgactggtatttgatctcctgctgtccaaggaactctcaagagttgtgaataagtgctgaataagcaccacagttcaaaagcatcaactctttggagctcactcttctttatggtccaactctcacatccatactggaaaaaccatagctttgactttacagacctttgtaggcaaagtgatttctctgcttttgaatatgctctctaggtttgtcatagcttttcttccaaggatcaagtgtcttttaatttcctggctttagtcaccatctgaagtgattttggagctcaagaaaatcaaatctgtaactgtttctacttcttccccttctatttgcaatgaagtgacgtcatgatcttagttttttagatatttaacttgcaaatattttcttccatgtttgggttgtcttttgttctttatagcatcctttgatgcaatttttaaaaaactttagtgaatttcaatttgcttcttttgtttctgttgctgcctgtgtttttcatattatacataagaaattacttcctaatccaagattatgaagatttatcctacattttcttctaagagtatcatagtattagtacctacacttatatctttgatccattctgagttaatttttgtatatggtgagaattatgggcacaatgttctacttttgcatatgacaatccagctgtcacaggacaataagttgaaaagaatactgctttgcattttaattttctgagaaaaaaattagtcagaaatcagaaaaaaaaaaactgtcaaaaatcaattgattaatcaagagagtgcagtactagaaaagaaatagagaaatgaaacataatggagagcccagaaatagccctccataaataaagttgactggtcttggccagagaagcaaaggccatccaatagggcaaagataggtctctcaacaaatggtgctggaacaactgaacatctacgtgcaaaaacattaatctagacacagaccttacaccctttcaaaaaatgaactcaaaatggatcacagatctaagtgtaaaatgtaaaactgtaaaacttctaaaagataatataagaaaaaacataaatgaccctgggtatggtgatggctttttagataaaataccaaagacttgacccatgaaagaaataactgacaaattggacttcattaaaagttcagttctgtgaaagataatatcaagagaatgaaaacacaagccatagacttggagaaagatttgcaaaagatccatctgataaaggactgttatccaagatatacaaagaacatttaaatctcagtgataataaaacaaacaaccctaaagcagccatactacccaaaacaatctacatagttaatgtaatccctatcaaattacccatgacttttttcacagaactagcacaaatcatccaaaaatttatatggaaccacaaaagaaagagaattgctaaagtaattctgaggaaaaagactaaagatgaaagtgttatcctcccagacttcagacaatactacaaagttcgagtaatcaaaacagcatggtattggcacaagcacagacatgtagatcagtggagcagaatagagagcccaggagtaaactcaaacacttacggtcttccctggtgactcagagggtaaagcgtctgcccgcaatacaggagacctgggttcgatccctgggtcaggaaaatcccctggagaaggaaatggcaacccacttcagtactcttgcctggaaaatcccatggaaagagaagcctggtaggctacagtccatggggtcgcaaagagtcggacacgactgagcgatttcactttcactttcaccatataatttggtaatacactaaaataaatacattaaaaatacggaaagtgatgacaagtgtaaaagcgactagtcaaaatgaagaaggtagttgctgtatgtggacattttaagaggataatataatttagacacatccaacttggaaattgatatgaatgtttccattttacagaacacgtaattgaggctcttaagagattcagtgagttgccttaagtcatgtatttactatatgacagtgaatattgacacccagatctgtctggttcctaaattcttttctgagtagtatgtcacttgttttcaaaacatggttctggaagtcaaatcacttcacagtcaggcctgggtacaggtgtttcaaaaggagaaaagaaggagctcaatttggcaggtatatgtcaaattaaggtcattggcacaggtaatactgaggaattaatcttgcttcatcaagagaaacagcatatgactgagggggacagaggtacattgcatttctatcagagcatggcttacaatactgtagcattagtcacatttacactgtgtctgaatttttttttttttttcccaaaatgcctcatttaaatgctgacagattggttggcatcgtgaatgtctttgctatgtaatcatgaagtggtgtgacttgtgaaaatgtggtctataaagctgctgttactcagactgatttcatggtagcatttgatggacaataaggacttgtgtaaaaagaaaaatgatgtctgttgcgaattggtgggtggggggggtgttcaatgtggtatgttgttatttagatgatctttaaaatcctttttgctcattacactataaaaaccgagaaagcagcccttgaaaagggaaaaacaacctgtatcctggccaaatcctccctttcaaagtagcttggcttgatttttttttctcttgatctccaaataaatttccattttttaagcaaaaaaaaattctacaatgctgaattttgtacatctgggaaagaaaaggttatggatataaagtccctcccactcccaaataacacatttcttttattttgatatgaaaatgctgaaatgaatgtggtgacttgtcacaggctatccatggggtttgggggagttgcagaacttccttgaattttcttattgtctttcatgattcctaagagcttgaaatcagttagagaggaattcctgagacagagacaacaagtggtgacagttttagcagagatctccttcatggtggatgaatgttggcatggttctgtgtcctggcagattcttcttgaggatgggctagtttgtaatatatttggtgatcctggctcaaaaggacagcgagctgggtcttggctcaagtcacacacatgcaggggtgggtcacttacaa

SEQ ID NO: 41035 - DNA, 1243 bp, Bovine  19866881040455
  misc_feature (1)..(1): n is a, c, g, or t
ncccaggacagttgcccctgactgcagttggcatggcctgaagccggccagctgggccgggcaggtgggcgctccacatgtcctcagctcctgccagccctgggagcacctcatggggacacagatgccacaagccgccctctgctcctctcacagggatgggctggcagtggcatgcatccatccccctgctccctgggggccgagactgaccctggttacttccactctctttgttgccaccctccctgccctctctttggccctgcctggtgcgggggttcctgggaaaccacacaggcagtgtagcaggctctgtgcctgccacgccagcctgcatcagagcacgaacactggaacagagtggggctgtgggaggcgggagggaaaaaataagatctcaggttgtcagcgccagagccttcccagggcagcctcgcttcccatggttggaacgttgctcgccttggaaacttaagatgtaaaaagggtgaagcagagaggcacagggctgagcggagcagaggattcatccattctagctctgagaccccagagaaactctgcagagcacagtttgaaatggcaggtgtaaccaagcttctctgttttacttataaaaaaattttgtgcctgtggagacggaagactagcccaggagacacactgactttggccccaaccttgactcttctgttggcctctgattcccaacgcctgttctcctagccgtccttcctcatccaaaaaagacttcgtggaaggcgggggtccacaggccacctactgcccactcagtcacatccttcaccccacctgcctctcaccacgccgtttctagcatgagtaaatgtgcatttaggtggagaccatggtccatttgctaaggtacatttctgtaagtgacaaattccagaatggtggtgtattatgttacaaccaattagcaggaaattaccactgtaaagtgcattccctgcactgggacagaagccaacgcgtagcatttaccaagtcttacctcatcgggctcagtcgacagtgaagaggtctaaatccaattcaataaaatatttgatgctgagacggaagctttagaactataaattccagttagtggaccagaaagaggttcctccatccttccaagcatcattcgcctcccctctccactgttaccgacaggactgggagctggaagctcttggcatttgaagatatgctacttgtgttcaggtcacag

SEQ ID NO: 41036 - DNA, 1765 bp, Bovine  19866881141918
  misc_feature (1)..(1): n is a, c, g, or t
ncctattgttaaagtgtctggatttatcgcactgatatcttttttgtgatacagtcccctttatcttgtggagaaatactaggcttttcctaatgaagtgtggctccacgaggtgtaatatttcctgagatgtccccaaacgagcagcactggctcctgcatggaggcagacacttattcttgacaccctaattccttatccgttccctgctgaccagaatctgaaaaagaatagatacatgtgactgaatcaccttgctgtacttctgaaactaacatagcatagttaactaactctactccaatataaaataaaaaaaaaaaaaagactcgtgatgaatatccaatgagttgatgtaggcggacacgcattgcaaacaacaaattgctcttaaaatataaagcattattatataaacatgtataagacgtcagcaaattgcatttgatttgaactaatgtggtttccctgatggcgggaatggagaaaactaaataataaagagtctgaaatcgatggccagaggctgattatttaaaatgagctgcagtgttgtcagtgagaggcctctgtctttgcaaaacagggcccccattcttccctgatttttcttctttgtgtctgtgaattgtgggcaattttggtctttaaagagataatactagatcaccttgtcagatgagaagaaaagagcagttatttgttgtctgagtgggttttgttcatgtttaaagattttaactaaatccattttagacaataccatcatctagctgaaaaaataagggagacagagtaatttttgatggtgactgtggttaaggttggcaacttaatcacccttattacctttaaaaatctattcttgctgatggttttgctagaataaagaaggctttttacatttagatggtatcagcctctatattcatagctgagtatttaatttggtgaacagggagaatgtgcaaaatgcagtgcaaattgtagttctgttgccaagaaggagaaaacctggacctgcgtggatttattcagctggggagacaagatgtatctgatagaaaaagtgagaatacaagtttgtacgtgattaggagtctggtaagtgatacacagggcttcactggtgtctcaaaggtaaagaatcctcctgccaatggaggagacataagatacatgagtcctatccctgggtcgagatcccctggaggaggaaatggcaactcactccagtattcttgcctgggaaatcagtggggttgcaaagagtcagacgtgacttggcaactaaacaacaacaacaaaaaatgatacacgtgaatggccccaggcagaattcaagcatgcagcagctacagtggccaagctttttggaggtggaaagggactctgaaggatgaatgacattagaattaatcaactcccaaattaatttttttacatttattcttttcagtactcttggtattgtcataatttgaaattatgcagcttttgtttaaactggtgcccagtaagaattaaatattttcttataatgacagtgtgatatattttttataagcacttgactatttttgtaagaactatggggaaaaaaacaaagctttcattttcattttccagacaaggaatttaagactcatctacatccacaaaccaagtaggtggcggagagtaaaacaacacacagctttgatagctctgtggactattttgtagataaaagacaagcacgtcctttgcattgtgaaatgtagt

SEQ ID NO: 41037 - DNA, 1063 bp, Bovine  19866881240387
  misc_feature (1)..(1): n is a, c, g, or t
naattgcagctgtactttatgaggctatgatgaaaaagacataaaatgtagctgtgaaaaattgtgttcacaaacctgagaaaatttggctatgactatctactctgtgaattacagcgacagattatgacataaactacatcacgggaattggaaacatccttggatattaaaaaggaagtacacacacaaatacacacacaaacatacacatgtaccacttgatgtgaaatattccagagaatgaagaatctttagaccatcattcgtttgattctatttgcttttcactgtcaattgaaacacttgcttgtttgcagtaatcttttctatctcatttttaagagtgagatttaatttttggccacctcaaaattcatctccactcaggacttcagaatgtaatgttatttggaaataaagtgttcttgtggatatgattcattaggggtggaccttaaagtccggtagatcagaaggtcaagaagagcacagacttacagaggggaggagccatgagatgacagtcagaaagtggagtgatgtgtctacaaaccgaggagcatgagggttgcccacaaccacgggaagctgggaagacccaaggctggatttcttcctagggtctttgggtgagttcaggcctccctgacaccatgatcttcagaatgccagcttccagaactatgggggaatacatttctgttctaagccacctagtttatgatgatgtgttatggcagccttagtagctacaatatacataacttaatgaatgagtattcattacaaaaaatattactctctagcacagggtaagtatgattgattttcatgcatcttatttttgactccaagaagccaagcctcatcaaaattttcacatggaaatgtctcagttcacagatctgactgcgtttaacacaggagaagcctcagcttgtccatttaaactctccttcacaaggaaagcactgcttatcttctcaaatataagtcatagttgtttcccttttcaggttatagccatttgcaggactcacaggaggtcaagattttggca

SEQ ID NO: 41038 - DNA, 532 bp, Bovine  19866881380744
  misc_feature (1)..(1): n is a, c, g, or t
ngcactgttggaagcgcggcttccacatatcaagaaaatcagggctgggtctcctgttggggtgctcagaaaagaactgagcccttgcaccaaagtgtctgttgagtgaaagatcccccaacattgtcaggaatcctaatacagcaatgacagaaagagctcctccccaccccacccccaagctattccctccatgccaggggttagaattactaaacactattccaggtgcagtactgacattcatctgtctatcccctgccccgtgataccatgaaagagaccatttctactcaaatacttaaggcccgtgttctctgtcacattggatgataggatttcccttgcctttattaggtttacattattcagatgctgtataaaagggccattgttttactaagttagaaaaataaattaagtctttgagtggtggatgactttgataagaaactctatttgcggaaacatgggggagtcgctatttctgatgtctgcttgacttgagttattcatctgggactgctccagt

SEQ ID NO: 41039 - DNA, 1400 bp, Bovine  19866881585775
  misc_feature (1)..(1): n is a, c, g, or t
naattatttgtgaggccttttcagctacatcgcagtattggaagtatctgagggatggataacagacagcttcgtccccacttcatcctgaaagcttattgccctgctcaacaccacaggttgccgaggacccaaaagtaagctcacttgattaattagaacttttctctagagaaagtttaaaaatttcaaggagaagaaggtgaatggtaaggcactcacctttttccagaaaagccatctggagaaaacttctgtccttgctaagcactgaagctgaaaacgatccacagttctaaacctgggtgctgaccctaggcccccaccccacactgagcacaaagaaaccctcttctgtgattggtgctggggcgggggcgctgcattctgactgcctggctctcccagcctcagtccctgtaaccagagccgcctccattatgccccatcacaaagaagggacagccggaaggtcaggttcacggagggggctataattttagaagcacttcctgttatgagtctgacttttgatctgtgatcactcagaccagggaattgaagcgaatggtatgcatgagtcactttctggtgggatcactcctggagtgtggtcagacgtctggagggctgttttcccctgctggctctaggaattacttagccagcccacttggccctcaagcatgtagcctgagcagactttgtcaggaacacatatgctgtggagctgaaatgtatgacataaccacactgtcctgtagcatctttctgcttaaccagaacagaactgctcttaggagctaccttcagacttttcctttggaacatgaaagagaatgtcttctggatctcattactaattaaagacaggattgagaatagaacccagtctgtatggctttcaaagtaagcactctgactgtgtgtttggtagatcagacttccccacagcaatcaggcattgcttgttctgatgagatgtgtatcacaagaaagcagaagccggggtagactttgtgaggttatctgtaagttgaagttccttagatgagaggagccagtgagtcagtttcacagctagaattcattttctttttatgtaaaataaaagctaatgatttaaatggtggcttccaggcaatgttatcttgttctgaattgccagagaatgttttcaaacttcagatttctgcatgttatcctcaatcttccaaatagcagtttctggaaagatactaggaatttctgtttttcagatcccacacttactcaaacaagccctgagaccgccccccacctcccccagaagtctgattcagctttcatattccatgattactgaatcagcatttctcaaagtctgcttttactaggaagcttttataatcaaggtgaga

SEQ ID NO: 41040 - DNA, 1250 bp, Bovine  19866881653568
  misc_feature (1)..(1): n is a, c, g, or t
ntgattttatcgcttctgattggtttgaagatactttgcccctgaattctatttaagtctctcaccttatggtgtttttttctatccttccttaatgcttctagggggaaaagaaaagccttaaagcatctttaattttgtatttaagataaggcacagtgtgatgtcatgctaccttcccagaaccatggatttccttaattcttagcctcattacctaacatgttctgtctcctcttttaccggttctattcatcagccatattggattcctcatcttttttgaaggacagtgcatttttcacactgttgtagctttgcagattctgctcccttcaccgaaatggtcttgaagtagttctcatagtcaggagacctgagagacaccgaccttgaaggctttgaggtttgggggctagttctgctagatgatggtaactccatggctccatcagagaccaaggccagaagtacatcctcccagaatatgtacagtaattatggtaaagataaacactgttaaagcagttcaagatggggtctaattgaattatacaacttattaagtgctacaaatacctactcaatactcttgcctctatgcagatgagataaaagaataaagcagagattgttgggaagcgaggaaattaagctttcaccacaaaccctggagaagtttttcaggcagagatgcataaacgcatgagatgaactcccaacaaagcattgttgttgttcggtcactaagccacgtccagctctttgtgaccccatgggctgcagcacgcccagctcctctgtccttcagtacctctcagagtctgctcaaactcatgtccactgaatcagtgatgccatccaaccatcccatcctctgtcgcccccttctccttttgccctcagtctttcctagcctcagggtcttttccagcaagtgggctcttcacatcaggtagccaaagtactggagtttcagcatcaacatcaatgcttccaatgaatattcagggttgatttcatttaggattgactggcttgatctccttgcaatccaaaggattcttaagagtcttctcccacactgcaatctgaaagcatattctttggctctcagccttcatatccaatgaaagtcacatatgttgatgctgggccaggacagagagaagtgtgtcagggctgggggaacagagccctggtgcttctttcctgtcccagcctccactaacacatcagggcggagggag

SEQ ID NO: 41041 - DNA, 2686 bp, Bovine  19866881696962
  misc_feature (1)..(1): n is a, c, g, or t
nttgacttcttgcttttgcattccagtcccctataatgaaaaggacatctttttttagtgtttgttctagaaggtcttataggtcttcaaagaaccgttcaacttcagcttcttcagcattactggtcgggacataggcttggattaccgtgatattgaatggtttgccttggaaacgaacagagatcattctgtcgtttttgagactgcatccaagtactgcattttggactcttctgttacctatggtatattcacaaggaatttatatacatcaatatggaaagtgatgattttctggtagctaagtgaaaatagaaatatgtaaataggtaattaacgaaaggagaaatgcaaataaccaataaacacacacactgtacaaaaatatataaacacaatagcattcatttcattgctctttatattggcaaacaagtcacaagtcatgtaaacatcacaaaaatgatgtaatggttaatgcttcataattcacagatgaatgtaacagtatttgcctatgaaaaatatggccattaagacaaagcaataataaaaagatttgattagtttataatttttagcaaagaagctgaaaaataatacgtattatgtaagacgttaaatctttgaagacatcacagaataaatgctctaaaggaaaattctccaagtattttatgtctcttgacagtgttcttataagaggttcttatctgtgtttttctgtacttgctgtaatagcacataatcaattcagtcagaaaaacaaagtttgacctcaccagtgcttcccagggcagagcaaaggcaatgtcaccctgacgcgcggcgctttcacagcgtgcctccgagtgctgctcccagacccgtggcaacctcctccagaactcttcctccccggcgatgacacggtctttgaaccccactcagtctgatctgtccctgtgctctctaccacctcgtctgtctcccctcctcggctgagcaaaccccttgcagtctacaggctgccaggaaggaagaggtgccctgaactacaggaggccgtgctggccttcacccgcgaccctcatggccagggcggggaccgcatctgcagacgcagtttccttactgtagcaagcaaggaaacagaatcgataggttcatttgtctcttaaatctaatgataacaatggggaagatgatgatagtgcttgtgctttttcactgtttaatcttaattttcaatttattttatttaaattttattttacaaacagtatctgtccacacatactggaaatgaaaggggaaaaaaaaaataacaaagactaaagcaaatccagctctggttcctcaccacaggaacttggagaagcgaagtgttgaggacccagtctccaaagcacaggaggggtgaggccttcagatcagacagcctgaagtccagaggaagctgtggaaagacaggggctgagaaggactggagggcactctggacgaaggaggccttctcaggatcgcctggtggggaaggaagctgaggatggcagttgctcttcagaaaagtccatccaggataagaatctaccagcagccaagggaatcttcctttccctggctcttccaaccacatcttttgaaaagcgttctttgccctattgtgggcctgaagtgagtgcccagatgtgtgtggagatcaggttaccctcccagccaccagcccacacccgccccccaccggaaaagtgacactggaggcagtttggaaaaaaaaatgcatgaatgatttcgtgatttcacatttgtgtctctagggcgctgcctactcatttgttaaaaagaatcttacgtttttataaaaacagaagcccacctccaaaaaaaagaaaaaccccaaaatcccttcaatgtagccttcttgttttcaaacagaggtaggattatgctgccaaattaaactaggaaacttctgtaaaatttgatcttgatgaataatagcgagcaaacaagagagacagagagagatattcatttcaatagaagtcaccatggcccctgagatgggagtaatcccactattttgttatgggattagatgtggaatcacggttgtgcttcactgagtgttttcgagtatcatggttctcatttttactacctgctcttatcaattaagaagtcttataatgctttctacatttttctatcatgctgtcactttatttcagtgaattttgcatatccctggaactgtctagccaagggaatatacttcagattacacacacaagtagggccccagtgtctctgacccccagaaatacagacagaagtgtgctaacaaagagtgccttatactggcttgtccctctcaccagaggatggagttaatgaatccaaggtcagggagatcaatcaccatatgagccacttaagccgaggctggagcagagctgtgtccccagccaaagctgcaccctgtcacaatcttcttgtaaatgtcagccaccagccacaagtgcaactagaaatgaaaacagggctcgttccaaatagcttctaaccaacaactaactgcaaaatagttctgaaataaaaccattgtcatcgaactcccagtgataagaagtggtcccgtctttaaagtatctgtgtagacatttcttcactctcttttaaatattatttatcacaactg

SEQ ID NO: 41042 - DNA, 4094 bp, Bovine  19866880244172
  misc_feature (1)..(1): n is a, c, g, or t
naaaatgaggtccagaggtcagttattatacttatctactaatcacaaagcaggcaggcactttatctacttcaaaaataagtgtatgaaagttgaaattcccaaaatacacgcatatatacattttaaaaaacgaatacaaatagctacgtgccagttcagttcagttcagttcagtccagttgctcagtcgtgtctgactctttgcgaccccatgaatcgcagcacgccaggcctccttgtccatcaccaactcccggagttcactaagactcacgtccatcgagtccgtgatgccatccagccatctcatcctctgtcgtccccttctcctcttgcccccaatccctcccagcatcagagtcttttccaatgagtcaactcttcacatgaggtggccaaagtactggagtttcagctttagcatcgttccttccaaagaaatcccagggctgatctccttcagaatggactggttggatctccttgcagtccaagggactctcaagagtcttctccaacaccacagttcaaaagcatcaattcttcagcgctcagccttcttcacagtccaactctcacatccatacatgaccacaggaaaaaccatagccttgactagccagacctttgttggcaaagtaatgccaacttcaaaggcaaatatccaccagaatcaatcaactaaagttgtgctctcctaatttgaatacttcctaaagcagtatggaaaatcttaggataaaacaaatgcagaacacatgggtaagttcacttgatgaaaaagactggactttgcagtcagttacatggatgtgggcttaggaaagtcaataaaactctctaagcctcagtttcttcagttgtacaacatccatgacaccatggatattacaggatcattttaagaattctaaaaaaaaaaaaagaattgtaaataacagacatgaaacacctattagaaagatggcacactgttgacaaaacttttgtacattacacaaataagtaataaaaggcaaaagaaatcaagaaaaattttgttaacctgggagcactggataatggggtaagcagaagtaagagtgaggaatgatcaggctggaagcagaccatgaagggctgtgccagaataaagaatttcaatctttctttttaacctctgagcaaaaatttctgagtgacctcacaataatttcaaaaataatttactttagctactaatttaaaaacaaacaaaaaaactatggacagctattacatcaccagaatcacaagaaggtctaaatgatgaaattctgaagtttaaaaattttttctcaaagtggcagtgtttttagagattgtttctctcaatttaaaatgagaaatggagactaacatttacataaaccttgagagaatattttcacaaaattttgatactgcttgctctttattttaataaagggaattctgagataggctctgctgaggtttaaaattataatgaaaacatttatcatttatctttcttcatttaaataaaatgaatcccagcagataagctcccaaaccttgccatgagaggttaaagaactatattacaaacagaaatgtttacctttccattaatcccagtaaaagactccagaactgttttttttttaaataactatatagaaattatggcatccaaagcaactataagactgtgaaaaaaccaattatacaatcttgtataactttcagctcactcagttcaaagttagcattaaaagatctaacagtgatcataatcaaacgggaaaatactgaaggtgatccactgtatgtagaatgaagccccaaaacacattctgtttactcaaacaatggttccctggagaatttcctaactagtttgaaaaaacttaagaaacataagcaagtcattactgctgactttgaactgtgtcaaacaaaacctcacagaaaaggttttaataacctgaatgggaacaaacaataggagaccatcctacacacaagtataaagaactttgctgtaaataatttgtatttttgactaatctgtatttatatagaattacacctcatgggggaggtaatgacaatccttaaaacctgtcagaactgagtgcttagaaacgttaataggtaaatttgcaactgtattcttaacttttaagaaatattttagcagttaacagaaaactaaacctaaggtttacaactgcattttattgacaaaaattcttagaattcaatcttttagttgaagtccccataccactatcttcatcaccacccaatgtggttaaccagctcagtgttgactaaacatgaaactaaaaagttcacggcattcatcctcaagccaaaaaccccttctcatcgaagaatctggcaatttatctgcaagtaaaagtttcaacaacttacctaatgactgaaaataaaagttacaaatctcaaataaaagccttatcttatcacttcacacccactaggatggctatagggtaatttagaagacagataacatgttttgaggatgtgaagaacctgtggtaatgtaaaatggtgcagttcctcaaaaaggtttaaacagttaccatttgaccctggcaatttcactcccaagtatatgcccaagagaaatgaaaccacatgaaatatccaaagcaacataattcatgatagtgaaaaagctgaaacaacccaaatcgaatggataaattaaactggtattatccataaacccctgcatggatcatagccttattgtggtgaagcggcttgtgtaactcaatgaagctatgagccatgccttgcagagccactcaagacagatgggttacagagaagagttctgacaaaacatggtccactggagaaggaaatggcaaaccactccagtactcttgccccaagaaccccataaacaatataaaaaggcaaaaagatatgacaccagaagaggagctcccccaggttggaaggtgtccaatatgctacttgggaagagcagagagcaactactatgaactccagaaagaaagaggctgggccaaagaagaaacgacgcacagttgtggatgtgtctggtggtgaaagtaaagttcaatgctgtaagtaacaatactgcataggaacctggaatgttaggtccatgaatcaaggttaattggatgtgaccaagcaggagatggcaaaagtaaacactgacatcttaggaatcagtgaactaaaatgaacgggagtgggaaaatttaattcagacgaccattatgtctactactgtggcaagaatttcttagaagaaatggagtagatttgatagtcaacaaaagagtcagaattggcagtacttgggtgcaatctcaaaacaacagaatgatctgtttgtttccaagacagatcattcaacatcccagtaacccaagtccatgtcctaaacactgatgctgaagaagctgaagttgacaacttctacaaagacctacaagaccttctagaaataacaccaaaaaaaaaaaaaaaaaggtgtccttttcatcataggggattggaacgcaaaagcaggaagtcaagagatacctggagtaacaggtaaatttggccttggagtacaaaatgaaacaggacaaaggctaacagagttttgccaaaagaatgcactgatcatagcaaacactctcttccaacaacacaagatacaactctacacatggacatcaccagatggtcaatacaaaatcagattgattatattatttgcagctgaagatgcagaaactatactgtcagcaaaaacaagaccaggagctgactggctcagatcatgaactccttattgcaaaattcaaatttaaattgaagaaagtagggaaaaccactagaccattcactaattattatagaaatgcaaatcaaacctgcaatcagatatcacttcacacaagccagaatggctatcattatagaattcacaatcaataaatgctggagagggtgtggagagaagaaaacccttctacactgttagtgggaaggtaaattggtatagcctctatggtgaacagtatagaggctctttaaaaagttaaaaa

SEQ ID NO: 41043 - DNA, 4463 bp, Bovine  19866880341800
  misc_feature (1)..(1): n is a, c, g, or t
naaaccccaaaaagattccccacacatagtttgaatatcactgacctaaacctaacactcagcacaagactgagcttaaatagttaatgaccaatcaattttaatgataattaaattatttaaactacaatgtacagctaagactaacaaaatgcaattaaatttcattgtcatgtttaattcatactctgtgttcttacaagatagtttttgacaacctatgtgactattttgaatttaacactctctgcatactaaattttgacaacctaagcttgacgtgcaacacagcatagtggttaagagctctaactctagacttagacacccacagttcaattcctggctcagcagcaaactagctctgagatcttatccaagctatttagtctttctgcagctactttcctcacctataaatgctgataatttataagctgttgtgaggactgaggactaagatctttggaaacaaattaacaaataataactatgcagtaagttacttattatcattgtaaatcaaatatccatttaaaactaccagactattgtgtgtctgcctcttgagaaatctgtatgcaggtcaagaagtaacagttagaactggttatggaacactagactggttcaaaattaggaaaggcgtatgtcaaggctgtagtattgtcaccctgcttatttacttcatatggagagtacatcgagcaaagtgccaggctgtttgaagcacaagctggaatcaagattgccgggagaaatatcaataaattcagatatgcagacgataccacccttatggcagaaagctaagaggagctaaagagcctcttgatgaaagtcaaagaggagagtgaaaaagctggcttaaaattcaacatccaaaaaacaaagatcgtggcacctggtcccatcacttcatggcaaataggtggggaaacagtggaaacagtgacagactttgttttggggagctccaaatcactgcagatggagactgcagccatgaaagtaaaagacgcttgctccttgaaagaaaagctatgaccaacctagacagcatattaaaaagcagagacattattttgccgacaaagatccatatagttaagttaaagctgtttttccagtagtcatgtatggatgtgagagctggactataaagaaagttgagtgccgaagaagtgatgcttttgaactgtggtgttggagaagactcttgtacagcaaggagatcaaaccagtcaatcctaaaggaaatcagtcctgaatgctcactggaaggactgatgctgaaactccaatactttggccaccagatggaaagaactggctcatcagaaaagaccttgatgccgggaaagagtgaagacaggagaaggggacgacagaggatgagatggttgaatggcatcaccaactcgatggacatgagtttgagcaagctccaggagctgtgatcggcaggaaagcctggcatgctgcagtccatggggtcggcaaagaatcggacatgactgagcgactgaactgattatatgattgaattccctgaagcaagagactatcttcaataagtttatacctctaaaatgtagcaatgtctagcataaagtacaaacccaaatgtttgatgattaaatgatgaatcaatgagcaacctgaggcagttcctcctataaaactgggaaaacacttgatacatctgagaagcaacatggcctatgttataataaaactacgcagagctgctttcaatctttctaactctatgatcttaagcaaattagccaacatctgagtcagagattcctcatttataaaacaggtttcatagggggcgttacactgaacaaataaaaaaaatacatggacatgtctagcacaatgcctgaaataaaacaggtataaacttagtttagtgtaaaaaaattctaatttacttagttcagcaaaagcaatcttaattcctcgaatattaagacgaggaaaaagtctacatatcctgctttactacagtatcccttccccttgcctgttagtctttctagaattgttcttttttagaacatatttctatctgcagtaacaacttaattcaaccatttgcagtttacattaggaaataatacatctcactgaatttgttttatcaaaatggcctttttttaaaaaaaaaaaaaggataaaatttattgacatcagcattcataggtaagtcttatttatagcttttctgacaccagaaacttgctgcagaaataaaattcataacctttcctacccaaagatcctgatttgacattatataaagaatacaacataattaatcctgtttattatgcatgtcaaggttaactttgaggtcaaaaagttctccaattactcttactaaaatgactctgagtactcaaaactaaaaaaaattatctttaaacagctttttattaatcagacatttataattacatatataaaattttatttaaaaaggtctaaaattataatgtagacactgttctgttccagttacattgattaaaattaaatgtaatgttagaagtgatttataatactgaactaaacttttgtgcatgataacatcttgttagtttatctgctacaacctagggaaatgaacacattttaatttcttttttgtatttagattttgctagacttaaaacattaaatgttaataacttttcacttccttttctgtattatttcaaggaagctttattttttcattaaatgtgatctttttaaagcctaaaacaacttaaaattcttatctgccccaaagtatacagtttttaagatgcactctaaaatttgtttataaaaggatcatagtacactagatactagtaaattcattgtcttaagcagttttctaaatgaatcaatatttcataattttacaagttgtgactaatcaatactaggatgcagtgtagtgcaacaatttccaagcagacatatatacaaggggttctgagcctaaagaaaattttcagcgtacgttttactcacacacagaacatgctgactgatagtaaccaaaaaaaaaaataaaaaaaaaactatcccacaattcaccaccctgatatatcattctctctaaattattatatccaggtgagattacccaattttaataactaacagttctcatcactttaaaacagaaacagggtatgttctgtttcacccagagttacacatttcggaactacaagactttggtgggggggggggggggcgccgatcttcggaaacaaaaggtaacctgatccattccagctaattactaaatgcataccaacaatacaaaattcgaattgcatttctggacactaagatcacaaagggagcagaacgtcaaatgtgtaaggaattacttttgtattaaaaataatcaaaacgaagaaacacggtacgccgaaactaagatcccgcgcaaggtacaacattcatttgattaaaaagttgatcatctaaaaagaatttaatcaatgttgttaaaataacagtaattcatcgcatccacatacgacttgaaatcccgatgaggtctttctttcaggtctaaatatctcattcttttgcaacccggataccaaaaggacctgaaacctctcgcggaggcgtacaacacactcggcgagtgctgtctgtttacaaatacgaatctcacagtttcccacgtcaaaagcgttcattaccaccattcgactggggggcgggggagagagaaggcgggcgagcaagaaacgaaatcctcacagacacctctgccttctctcctcccgacaagggcgatcccggaataaatatttattatgtattatatgcgtgtgtgtctataagttatatacgtagtctgtatcaaagccagggtgaaagaaaaggcacacaggacagggaatcctactggaccccagagaatattcactcctatcccgttaactcagaatcctccgcctgggtctacaggtttcggctcggggccgagagctccaacctcaccgtggagttcggtcccaaagcgccccggtgccctgctcaggaagcccaggccgccgcccctacctccctcatctccgccttcccctgggacacccgatgcccaatccagcaaagaaagaagtgtcaggccccaagagggcggctgatacgcgctcgggccgggaccgcgacacctgcgaggcgcggcacctgagggcgaagagggggccgcccggcctgcctcgagcacaccccctcgggcgccgggtgctatgccgcggccggaacctccgtacctgcgaagcccgcgagctacaggcgcgcgcggcgcctcctcatctcagtggctcccgctccccctccgcctcccgctgcccgccgtcaccgccgccgccgctggaggccaggacacgacgagctcagggctccaccgccatgtccgccgcgccgcg

SEQ ID NO: 41044 - DNA, 1889 bp, Bovine  19866880507027
  misc_feature (1)..(1): n is a, c, g, or t
ncagactcctctgtccatgggatttccaggcaagaatactgaagtggggtgccatttcctcctccagggatctccctgacccagggatcgaacccatgcctcttatgtctcttgcgttggcaggcgggttcacctgggaagccctatgtgtgtgtgtatgtgtgtatatgtgtgtatcttctttacccattcatctgttagtggatgcttaggttgcttctgtgtcatgtcttggctgctgtaaatagtgcttaaagcttctgtttcttgcttaagttgtgaagaatagagagagtagagcatcattttaatagctctctgagcatattctattaaattgttaattaagtagatttaaacccactcaagatgtattctgcaatattatactttattaagtttagttaatgtgatcttcatgttgatgcaaagaaaaagaacttgaaatttaatttcattacaaagtaaatgaaaactgtaggttatcaaagttaattttttaaattatagtataatatatataacctaaaatttgcctttttaatcattttaaattacatttacattgttgtataaccatcaccccaattctcaaatgttactttgaaaaacgcctctcactaagacttttaagtagatccaaatgtgtaaatgttcagaaagtatgagataatattgaaattttgtttctgttgccactgctggtttaaaaaatatttttcttttatggtaaaagaaaccttggtaaaggaacctttctttcattactatgatttgatgatgccaaaaggagaaactatacaactgtaaacatttgcacattttcattcatagtttaagcccaacccttgagactcacaggttaatgagtatcttatgctatgtttcaaaaagtatgaatttgaagttttcacttaaattcccatttgtagtcttgactatatcctgccaaattcttgaactctctgtaacactgtctatgccaatttacttttcctagacgaatatttctctattctctggaagtataactcaggtcggaagtcctgttggcagtgcaatgaaccttattcctgaagatggccttcctcccattctcatctccactggggtaaaaggaggtagtgtagacttagagtgtttaaacagggagtagttatacatgcaaaagtgttgccttccaattaagggaatgagagtgaattcaagtaataacctcctttctcttttctagcaacaaaaaagtgattattcagtgccatgaaaagcactgttgctgttagtgattgttttagagaatatatttatgtttttatattataattgcatttgttgaaaggctgtattatttttaattgtaatataaatgtagcttattggcagttctttctttatattccaaagcatataatactctgtgaagagttgctcatagttctaggattgacccatgttatacagtcagtatattcatttaactttttgttttgagtagaatacacattcagaaatgtatatataataagtggagagcacagaacataagtaccagttttctgttaaaaaatatttttagtgagccctggtaagaagctaagttactactcagtcaaaagaatgcttatctctatgtgaaattttcttgttgatagatccagatcagcacccagtcagtacattttcaggagctggttttttccaataatctttcctcacttttgtcctaggcttttaccttgtctccttgccttcagtttttctcacctttatttaatcttgcacattggtgccagttatcttttattttttttaagtacagttatttacagtgtgttaatttactggtgtacagcaaagtaattcagttatacatgtgtttgtgtgtatat

SEQ ID NO: 41045 - DNA, 3598 bp, Bovine  19866880712095
  misc_feature (1)..(1): n is a, c, g, or t
ntaagtgatgacaaaaataaggatcatgtcatctgcagaaaaatgacaagctcgccccctagtgtcaagtaaggaagataacagaaaaagcaaatattcttaaaaggcacaaccaccacaaagaaaatcatttctaccctaccaagaatctggagagaataggacaaactactaatcaatcagggcttaccacgtggagctagtggtaaagagcccaactgccagtgcaggagacataagagactcaggttcaatccctgggtcaggaggatgccccagtagggcatggcaacccactccagtattcttgcccagagaatcgctatggacagagaagcctagggggctacagctcctagggtaataaagagttgttcacgactgaagcgacttagcaggcacacactaaccaatcaagatagtttattcacaagaacagtgaaaaagggttcagttctgagagacaaaacgtatcataaatcccttgcttacagatttctagggtaagtaagttactttattaacagtaccaaatgagtggcctgaggatgttatttttaacatgtgaatgtctccactaacggaagttttctgttataccctcttgagcaactcagaagcataatgacctttatctttacatcacacataactcccaatctctgaatttattgaaaaatctgactctaaaaacaaaaaaagcagcccacaccaatgactgcataagtcagcaggtggcagtcctgactatttaactgttcttagctccttaaacccgctattacgtaaatcaagatactttgatttttttaagctctcccaactaaaaataatggtgatgatggtgattccttcaggcctgtggctactaatttttccagtttcctgctctctctttcccacccccacaatctttatggctcactagtctgctgtttttcacagaaaaggaaaagagtttgagaaccaagatcttataaatgtggatcacaccagataaacaaatattgaccaaaataaacattttagactacatctgagcaggtgacactggggagcaatgggtctatgtaatcagagttactaatattaaacaccaagtctttcttctctagcaagtcgaccttcaagggctccatcagaaataggaggtgccagcatcaagctgtctgtagcatgggagggtgggccaccctagccaaacgttaaaggctggacacttttctgctgttctttgtgcagctgccgggcccgattttttagttcctcagcctttgcttcgtccttatcgacaccatccccaagcttgtacatgcggctggcattagcacaggcccagacatggcccaagtcacaggctttcattgcgtatttgcatgccaggcccatgtccttgggaaagctgggggcaccctgcaggaacatggcactgaggttgaaacagctagcagcatagttgccatcacaggcccttgtgtagtagtctctggccctctccagattgggctggccatcctcattgacctgtccatcatgtgccaggagaccaacattgtggcatgcttcggtggacttctttcccggcttctcacatgccatcagaaagcagttggaagcagctttcagatcctgggatagtccacctgggaagaaagaaaaaaagtcaatccaagccaggacagaacctgaatgtctcaggtcaaagtcaggaagcaattcccaaataaagttcataaactttgagctaaagcagcatgaaaagaagatggcctgtcatagtacacagaacttacagctttttcagccacggaatcttctgctcaaatggtatcttataaggaagcccaaacaggtaaaaagggtgaaatgactagcttctcagccttagcttcgtccttattggtaaatgatatttacctctgggataacagcaagatcacggcatcttataagcacttcgccaaatgtttgttaatttaaatatatactgaatatatattaattgccaattactatgctaggttctaaggaataaaaagataatgaccctgcccttgtggattttgtggtctaataaaacagacattaaataccacacaagtaaatgtatgattctaagtgtgacaagcatatggagaaagagtacaggatgctatgagaatgatcaaggctctgaactaagaggtgacgtaaaggaaaatttctccaaagaagtgacatttgagctgtgaaataatggaaaaaagaatgaaaagaaaaatatggagtggggaaaaaaaaaaggcaaagaaaactgttcccagcagcaggaacagaatacagagagaaaaggagcccatgtgctataactcagaaatcactaaggaagggcggtgaggcaggcaggggctagctcacgcagggtctgatgggtcttcttaaggaccctgtactttaacctcggagcaatggaaaactgctaatggatcattttaagcagaggtggtgacagggcctgcttttttctttagtttttgtttgtttgtttgttttaacagaacatttcaaatcccctattctcaaaatccctcattcctaaaaaaaagagaaacatatctcaacattagtttttaaagaagtcatcccaaatacaccacctaggaaaaaaacatcattaagagaacaccattccagtcatctttgtagtatgtgtttgaattaaatgttggctggctgaatggatagctagatagaagtacagttgactcttgaaagctgtgagggacacccactctccatgcagccaaaaatctgaaaatctgagactagcttaagagtcaaccttccctaaatgtgctcctgtgcacccagactgaaccaacaggggatggaaatcacggagcattactattgtatttattgttgaaaaaatccccatggaagtgaacctgcatcattcaaacctgtgttgtttgaaggtcaactgcactttggaaaaccagattacacatgctacttgtaaataaaaaatttaactttgattttacttgcatttattaagacaaactgctaacttcaaatgagtatttcttcaacagagatatttcctaaatgaggccctggagttataaattattaaaaacatttaaacgttcaagttaccgggtttttggccggaggcaaggggctggggccggggggtgtttcatggtggtgcagcagaagcacagagtcctaaccactggactgccaggggattccacttttattttgttttaaccaaatttcagacagtattgactcacaactataaaaggggaattctcctacttctccccacctctcttctcctgccttctactttttgttagatacattatttcaactcagagagatacaggaaacaaggttaatgaagcctgagctctgcaggcagaaaactgaggctccagtcctggctccatcatttggaaaatttatactatcatttcttcaaaaattttttttctgtcccaatctattttctttctgggctccaacacacgctgtgttagattaagggacactgaaccctatgggttgagactctgacggttgggggaagttttctgcttttttt

SEQ ID NO: 41046 - DNA, 1845 bp, Bovine  19866880805503
  misc_feature (1)..(1): n is a, c, g, or t
ncatgcgaagagttgactcattggaaaagactctgatggtgggagggattgggggcaggaggagaaggggatgacagaggatgagatggttggatgacatcactgactggatggacatgagtctgagtgaactccgggagttggtgatggacagggaggcctggcatgctgccattcatggcgtctcgaagagtcggacacgactgagtgactgaactgaactgaagtgaggtcagatcctgtccatgtttttggcaacgtttctctcctggcttcttgagcataaagaatatgcttaatatgctgtatctgtgaaaaaaacttgacttcccaggtggcgcagtggtaaagaaaccgactaccaatggaggagacacaaagagatgcaggttcagttcctgggttgggaagatcccctggagtaggaaatggcaacctgctccagtattcttgcctgaaaaattccttggacagagaagcctggtgggttccagtcccatgggattgcaaagagtcggacatgatctcgcatgctgcacgcgcgcgcgcacacacacacacacacacacacacacgatcttcagttatgttaaaaaaaaaatgaacagaatagtatgggagctagtggatgattttcttcttttcctgtaatttatgtagcttttgcagttacctgtattttttgaaatcagtattaattaatttaaaaaagttactgtgcatatataatatagtccctctttagctccttgttttaaattggctttcaaacttatcagaataaagattttttttaaacattttgcctagttttgtataaaataacagggaaatcattttttaatgggaggtagtataatatatgatgatagtgtttagaatgttttcctgcagtgatttaatctgattactgtacatgccagtcacagtcaagaccttctgctacacctaagtcagtctcttttggctacaacagaatgatcagctaaatgttgtacttatggaatcttggcttgtagcatttcataatttatgcagacagtaaagtaaaacaagttttattttttaaatgtttaataacagcttctcccatagcatctctcattctttcagtcctgtttcacaaaggcagggatctgtttcttttgttcagtttcatttcctaggtgtcttaaatctggcaatagaagatgaatatatgttgagtatgtcctgctctcctaaatatgaggacattaaaatagaagtctctttttgtattgttgttattaaacgttacactaacaggaaaaacaggaagaaagtgagcttcgttctctgccgcctccttcccttgcccacctggctgctttaagtggttgcagttattgaattagcaaaagaacaaggaataacagatgatgacctcaaagtccgtcaggaaattgtggaggaaatgtcaaaggttgtaacaacatttttaccaggtacaacttcattttatacttagttttaaaagtgatacaactcttcctcttacttcctcttaaacttaatgtttttctttcaatttttttctcttctttttttctacttaaaagtagatgaatttcattattttataagtgaactttttggtgggagatagttcagaaaaagaaaaggaaaaattatagtatggtataatttttgtaataagaaaaaaagatttttaaagtgtcagatacactttcaaataattgcttagtgcttgaatatggtattttatattaaattttcattgtcattgacttctgaatggacattttaatcatatttatttcagttgtttgtattcatgctactcactaaataaaatttcttttg

SEQ ID NO: 41047 - DNA, 762 bp, Bovine  19866880854376
  misc_feature (1)..(1): n is a, c, g, or t
nttctcacctccacttcagagcactggtgcttatttggactgatgtattttctgagacttacctaaaaccacagaacccaaacagcaggaggttggggttgtcctgcaatggagactcttctgttgacatgcaggatacttgagctcctctctcaccttgtgagcccagggagctgcctgcccccaccccacctctcagttaccatctccctctccgcggtcctcacaggtgctggatggaaggaagcccactgggggcaagctggaggtgaaggtgaggctgcgggagcctttgagtggccaagatgtgcagatggtcaccgagaactggctggtcctggagcccaggggcctgtgaggtgggcagctctctgggcccttagaacttctgcctgagccccatgggaacccttccggtactcgtatctaaggagaaaacccaggaatttctcatctgtgaggaagaccaagaggcaaaactgttgggttgggctcaggctggttcatgatcttcagtagaactggggaaggaagttaacccccccaggtctgttgtcaggaatcccttccgaaaatctacttgtacactcactgcagtttagacttcctgtgctttgtgcaacagagggtcaacggtggagtggagtcaggccagcgactcttctccagctttttcccctgggctttgctggctaccgaagtctgtgtacataaaggagacgctgctacacaagcaccaaagacctgttaagcgcgtgcagt

SEQ ID NO: 41048 - DNA, 1722 bp, Bovine  19866880874538
  misc_feature (1)..(1): n is a, c, g, or t
ntccttcgggtttttcctaagttggtatgggatattttagtttggaagtttggaagtccaaaaggggcttcactgggttaaaatcaaagtgttagcagagtctgttccttctagaggttctagaggacagttggtttccatgccttttagagccacgcagtctgtggctcatgaccccttcctccatctttaaagtcagcatctcatgatctttaaatctctctctgactcttctgccaccctcttctgtcttttaaggacccttgtgattacaatggatccacccaggtaacccagaacaatctccctgttttaagatccttcctttaatcacatctgcaaagacccttttgacatataaaacaacatattcgcaggttctgagtattgggatgtggacaagccaccattccgtcatttcttgaacacttgcttgctttctggtataagaagatgtcctgggttcaggcttccaggattccctgagaattggggtagaatgctctaccccgattcctatagagaagcttctgctccctaaattctgaagccccatgccctccagccagcccctctggagtcctccaacctgaaagatacacttccccatctgcttcctgccctaccctggctcctcctttacacctcagctccttcatttgtaatatgggactgataatatctcactgggcagttgtgaaaataaaatagatgacctaggaaaaaggcctgacccagtgccaggcagaaggtaaataccagcaaagacgtcttatcagtcctctcctaactgtgccccatcccttcttcttaggtcctcagatgcatgttctctgtgttatttcaatattttattccttgcctcctcttccccatttctgtttctcttgtcatccactccccatagtcacacctgctgatatacgtaatatctgaccttccaacccatcttgcaggcagttaatacattatgttttttaacttttaacaaatgtattttaaatacaaaatgcttttcaggagtccacaagttttacatctttaaaaaagcgacgtaatttttaggattcaaaaatcctgttcttcaaaagaaatgactaagtgttttcttctgtggtttcaaactttctacacgcaactatttgactgttctatgctaccccagacaggcctggcataactgaactgcttatgtgttactgactttcccaaaagaaagttaaaaaaggagtttgcagtaaatgcaaatctctcatacaatgtttaatgcaatatctaacacaaaagaagatttaaaaagattatttctttcctcatttgatttgccaggagttaatgttctgtaaaagcaaaaaaaaaaaaaaaaaaaatcatttacaaactgtaacactgagggttcctttttcactcaagatgtttactactcaaaatgacaacaattacatctgtaagaatataataaaagggatggaaaacagcaatgcaatcaacaaagtgtagatgttaaatacgattttttaagggttctttttacggagtaggaaggattagaagcttgggaaaatccaaaatttgaaaaaaaaaataaataaaaggaaagagaaaaagatgtcctcaactgcgacccctctgtttatcaatagcgtcttgggctgtaggacggagcgcttgaccatgatctgtatcgactacagtaaaggagaagggatcttctgtaccggt

SEQ ID NO: 41049 - DNA, 1544 bp, Bovine  19866880886926
  misc_feature (1)..(1): n is a, c, g, or t
naggccagtttctgggcagctgctaaagtagctgccatcatatcctcctcagtagccacggtgggctccaggccaggtataggggggaatcctgcaggagagagacactgggagagggttcagggagccttgaggatgcatcaggctgctgtgggtcctactggggtcttcctgggcatggctgggatgggtagttcccccagggtagaggctgatgtgtgagaaatcatttctccctcccctccatcctgctcagagacctcatgagcccccaggccaaaccccacttacctggaggaacaggtaactcggcaaagtcaactttccgtcccgcccggtgggctcgaatggcatcttgatattgctgcaagagaagggagggagggacctatggtgggcagcggtcacaggctccactcaggcaagaggcaggaagaggaagatgaagacagcagccccaggaggaaggagagccctgagacagcaagagctccagagacacacagacaagatgaagactcaaagaccagggagcagacggacagcagctggtcaaggaggcaggctgtagcccaccttggcaatgcgctcgtgcatccgggccttgcgctcatccccactgccccgcgcttgggtgcctgcctcgcggtacttgttcagcctctgctgcagggcatccagcactgtctgtggctcagcaggggccacttgaaaggagaaaggagacagtattagctctgcctgcctccccccaggtccccactccacagtgtctccaggcctacccggggctgctgggatgtcagaggccatcactgggtgcattcgctccactgccgggggtgcatcggagggcgctgtcggggcttgggaagcctgtggaaggggcttcaggtctggggaatccagagcacaggtgtaggtatgggtaggcgtgcttggccagccccagccctagcctgagcaggctgcccccaccaccctgatactgaccctctggtgatgggggcatggcactcaggtccacaggctgccccttctccagggcctccaggacagcagcaaatctctgtggtaggaacaaggcgggaacataagccagggaaccccaaggatctgggctgaaaagcccccgcagaccagtctcactgaagcttggccgggtcaccgctcacagctgtgaaatgaggggctggacacagggcttccgaaccagatgccataccttcccaaccctcatgagctctcgggcacggtctaggtctccagcccgcttggcattcagagcagccactttgtactctctctgccgggccaacagcagggcccgtgggtccgggtctgagtcgggtggggcagaaataccagggctgcccaagaggcttgtctcaggctgggaggggttatctatggagaaacaaaagaaaatatcaaggtcaaagaaggtttccagtgcctccaggtctggccagcccgagaatgtcttacggaagttgtgactgaggccacagacaacggcaggatggggaggcaggccacgggcc

SEQ ID NO: 41050 - DNA, 1424 bp, Bovine  19866880897768
  misc_feature (1)..(1): n is a, c, g, or t
nttagaactggacatagaacaacagactggttccaaatcaggaaagcagtatgtcaaggctgtatattgtcaccctgcttatttaactgatatgcagagtacatctggagaaggcaatggcaccccactccagtactcttgcttggaaaatcccacagatggagaagcttggtaggctgcagtccatggggtcgtgaagagtcagacacaactgaacaacttcaccttcatttttccctttcatgcattggagaaggaaatggcaacccactccagtgttcttgcctggaggtttccagggacgggggatcctggtgggctgccgtctatggggttgcatagagtcagacacgactgaagcaacttagcagcagcagcagagtacctcatgagaaacgctgggctgaaagaagcacaagttggaatcaagattgccgggagaaatatcaataacctctgatatgcagatgacaccacccttatggcagaaagtgaagaagaactaaagagcaagaggagagtgaaaatgttggcttaaagctcaaaattcaggaaactaagatcatggcatctggtcctgtcacttcatgtcaaatataaagcacagtgagagactttatttcagggggctccaaaatcactgcagatggtgattgcagccatgaaattaaaagacgcttactccttggaagttatggaaacttaacttggaagttaaggaaagtcatgaccaacctagacagcatattaaaaagcagagacattactttgccaacaaaggtctgtctagtcaaggctatggtttttccagtagtcatgtatggatgtgagagttggactattaagaaagctgagcactgaagaattgatgcttttgaattgtggtattgggagaagactcttggaggagtcccttggactgcaaggagatccaaccagttcatcctaaaggaaaccagttctaaatattcatggaaggaatgatgctgaagctgcaactccaatactttggccacctaatgcaaagagttgactcattggaaaagaccctgatgctggggaagattgaaggcggaaggaaaaggggatgacggaggatgagatggttgaatggcaccaccaactcgacggacatgagtttaagtaagctccaggagttggtgatagacagggaagcctggcgtgctgcgattcatggggttgcaaagagtcggacacgactgagcgactgaactgaactgattctaaaaggccaggaattcaaggttccagagaacaattttaaaaagtggaaagaaaatcactgatgaaagattttcctgtcttgagaacttggaaaaatatatacatgctatatactctaaatgagaagagctactgatgctaagaaacaacttccatctatcaaataagggataaaatca

SEQ ID NO: 41051 - DNA, 2140 bp, Bovine  19866880939233
  misc_feature (1)..(1): n is a, c, g, or t
nttcgtgttctatatattacactcagactaaaaagaagtgttctcttttttgtccctctggaagatagagttttgactacacgtcaacttaggtctaaccttccagattgctatttataggacatacacagagggattctttaactggagattttacaaaggtcacaaaagggttcactgagaaagaccaagtccatgctctaaaatggaaatgtacagtttaccgcccattgacttacagataaatctatttaatgatcttcaaaggtggtttagtaggttctggtttaaacttcagttccttctttctaagaaaattaggggaaactattaagcaaagtgaattcctcagaatcactttagactttcctttcggcactatccaaattttataaattctcttctgcctggagccctaaatctaaatctccataactgtattggctcaagtttcactttaagtacaatcttaatggatcatattcctgaggaagcttgcttcctccaataagcctgcaaaattctctcttattattcttgattgtcccctgaaatgttactcttcgtgaattaatatggctctgcctagctctagataaaatcctaattttctgtcacgtgtcttgtctgtgttgcattttctgtgcacttttgtccacccctccagtgaaagggggtattttaaacatttttgtttccagagagagcaacttgctggttggaggatccaagtttaaaatggacccccagagaaacatgtatggcttgaggcatcctgtgtaattcaatgaatatccaccctacccctaacccatatttgctggctaaagcaaatgtgaaagtcagagaggggaaggagttatattcaagcaattttatgtacagtcttgtgcagactgcacatactagagagttcacacacttttctcccagaagtgaccttcaactctaactttacaagcacttccaactaggttggatatctaatttccataactatcacagatcaaaatcatcaactagtgggtgggagttgggggtgcagaatagtttagtggtgaagagcacagattctggtgtcaaactacaggcttgaattttggctctgccacttcctagctatatgactttgattgaggtacttcacctttttctgcctcagtttcctcatctgtaaaacagggataataatatacctatttcatacaattttcataaggtttgtatacataaagtgcagcagtaggttctatatgagtatcaagtagagtgggtacactggtaatagttcttatgaaaagtaaaagaagtaactttaaaaaagtgtcaggcatagaccttggaacataaaagatttttagggccccttttcctttgttaaacatgccttaggcttgcatcctcctaagcctttgcaatacggtacttccttggcatgataaactgtattgcctttctttgctggcaaactgttccttcttcacccacttaaatgcatcctcccctctgtagtttctcttgtcttttttttcttttttggcttctttggagagaatgagtctctccctcttcttcagcacttactgctatcacgctgcttgatcatattgtattgtaattacttatttatgaatcttctccctcaccagactttatggtcctcctccatggctggagccacatcttattttcacagcctctatcgcagttctgtccttcattaaatgttttgatgaatggaggaataatatcagccaacacacagtgcttagttctaggctctgttccaatgctttacaaatattaactttaatcttgacaacaatcatatgaagtattattatcatctctaacttacagataagaataaatgactcaaaagagtttacgtaatttgtctaggtcacctctgctactaattgtcaaagccaggatactaatataagtagttggtatcagaaaccaggcttttaactcacccagtacaatgtctcctagagaacaagagaacaaataattgctcgcaaacttggctttcccaaaggtctcactttctcaggcaaatgagacgttcatctagcaaatatttacatagtgctttctatgtgtacaccatcatgttgagcactgatctctaatt

SEQ ID NO: 41052 - DNA, 1296 bp, Bovine  19866881026742
  misc_feature (1)..(1): n is a, c, g, or t
ncttaaatgtactttttctgctgaatgtaactgacactgaggtacggatacccttgagacagcaggattggctggttgctgtgcatctgtagaccagctgaaagaaaatggacttgcattactccgacacgtttcctcttggtgggtggggacaacgctctctacaccgacgggtggcacatctgtctgttggacacaacacagacaggaaactgaaaggcttgtgcctatttacctgataaccacttagaattaactttttccccctagacattccctatttgaattgagatactgtggaggcaaataagactagataatgtgctattcattacttagatcaaagccattactggtacataagtaccaacaatataatcaattcaaatgtcattcaaatctcagttttactaaacaattacactactcaactcaaaaattctactagattccattgcttactaaactaaatccaaactcctttataatatgacctcagctgaccttctctagcctcattacctacacatttttccatttacctcatctactattattttttcttttttcctattctttttactgaggcaaaactcagtgattttgcgtatatttttgcctcagctaagaacactcttctctaatctctacacaatctctagggaaaaaaattccatatatttcaagacttaattcaaatgtcaaaatcttaggcagtttgatccctggtgtccatattctgttctctctgctagggcaaagttaatggattcctctaagctcctatccttgtctgttttacatgtctagctttcctaataaaatatgtattaagtgtaggtgttattatttaattctgcttgagcagtaagcatctagcacaatctgacatacagtatgctctctcaatgaatatttactgaattcctgaagtttcactcccagatcctggccttttcaaaggctccattgtcccagaacaaaacccactcagccttgtaacaaatatgtaagcaacggtaccttgagtatagaaaggtttgttgggctggaatctggcatttccctgatgcatgaagttctgatgcaaaccataaggccacgaagctgggacaagagggaaatggggtcgtggtgcatgttcccagggaattggaggattcagtcctggaaatcctggctctgcatttcaagaacaaaggagagatatatgttaaaacatcaccttgttcattcaaacatcccttcattccacaaagatttatgggtcatcaagaccaagaaatatgctaaatg

SEQ ID NO: 41053 - DNA, 648 bp, Bovine  19866881113545
  misc_feature (1)..(1): n is a, c, g, or t
ngacacctacctcttgggtgtatgagtattgaattgtttattaaaaagcattacttcactgcttatttttgcctcatatatttacatagttgttgtattaacatatgtagtaaaaaattttactgtttctgttttctgaaaaaatgtgtttttaactttttttttagcgctcaccagaatataccaattgccgatatctatgcaaactttgcttaattcacattgaaaacatccagggagctcataaacatataaaagagaaacgacataagaaaaacattttggtaagtctttttagaaaatatttatttattgaatgataaacctgtatgaaatatttttattaatgaaactaaaaaccaagtgtttgtctattcttatagtaataactgatatgatagtgttgaaagctgtgatttccctccttctgttagatggtcaggaggggaacctgctcagtgaccagtttgctcatcctaaagtatgttgtgattcctaagcttaaaagtcaggtataggtcagtccaacctggtttttatttgagttcttatgtgttagctctatgggagtggtgaataagatagtcatggttcttgccctcagagtttctaaagtattggtgaaagcatacaatgaataaggattta

SEQ ID NO: 41054 - DNA, 1151 bp, Bovine  19866881318452
  misc_feature (1)..(1): n is a, c, g, or t
ncctggttgctcacagattggcttggattggggttgaaatggggcaagagtggaggcagagagaccaaggagaaagctgctccaggagtcccagtgagaagagctgaggcccacatgagggtagaggccagggagaggaggacaggttttagaaatcaatgacaaagactatgaactttacacatactgctagaaataaggtccacgaagaaagcagaacctattttattttttgaccgcaaaagcagagagttgagttaaacatactactcggtgtctttggtctttgtcttatctacttatttattcccttttaccctctttcttctcccaaaccctataggtaaactctttcatgtatttattgtgtaactttatattgcaaatatgtgttttcatattgtgttgaacgtattttacatccaggcaaatggtgctgagttatgtatcctattctgtaacttactttttaaaaaaatatttatttatttatttggctgtgttgggtcttcactgtggcacacaggatcctcaccgtgtcgtgtaggatatttcgttgaggcacatggattgtctagtcgtggcacttgggcttagctgcttacaggcctgtgggatctcatttccctgacgagggatgggacccacatctcccatacttcaaggtgagttctcaacccctggaccagcagggaagtccctgtaacttatttcagtacaccacattatatttttcaagatctattcctgctacatgtttatttttagtctgttgtcttcctagaattaaagaattagattgacaatacaatgccatagaaagggctttatcactgagtggagagacttcagctatagcccctgcccctctactaacatgtggtgtgaacctgggcaggtcccttttcctagttgaatcttagcttcctcacttataaaatcagagttgccttctacatctaactttccatgcaaccttccttaccttatacaggaaactccagtccagagtgggagtgactcaatcaaggtcacacaatagttatcaatagttcaattcaatttatcccatatttagtgagtgccagacatgatgctaagtgctttggatatttaaataaataagccctgctgagttcctcctctcaggg

SEQ ID NO: 41055 - DNA, 1274 bp, Bovine  19866881409697
  misc_feature (1)..(1): n is a, c, g, or t
ntatgatgtttatgtgaaattaacaaaattccagacatactaggtaaaggtaaatttcaacggattagcaaataaacaagaaatgttaagaggatttaagaaataggattacagatttcacagatggcagtgatgtttttctgcctgccaaggagcagtcttacctaagctgctgcctaatccgattcaaagtcaagacagaactcttcctgcggatacgggaagtagagggagcttcatcctgaacttctggctctttaccctccctgcaagatatcacagcatgattacggaaagcggttttgggtgccagctatcagcagcaggacttggaagtgagtcaggtagcctaacaggctcctattctttcggcagctactttggaacgagctaagcaaaatttgcccaaaagtttataatggaagtttgactcaatcccagagattaaaatttgccaaaagtttatcatttaaagtagactcatcacctccacaactagaaatcagaatatattaatactaattctacacagagtttcttattctttttaaatttttgatgtatctataatttactatccactcaaggttagtagctatgcaggtatactctcaatgcaaagcatttatcaagaaatctaggtaaaggactttactggaagtccagtggttaagactttgcctttcaattgcagggggtgcaggattgatcaaacaaggtctgatccctggttggtgaactaagattccatataccttggggctaaaaatccaaaacttaaacagaagcaatattgtaataaattcaacaaagacattaaaaatgatacacatttttaaaaaaatctaaaaaaaaaaaaaaaaaggaaaccaaataaaatcagaaaagccaggtgctagagtttctgagcagcaaacacagaaatttcaggattgtcatatttgtacagcccattatgtacagacaaggcccagtgtcaaacttcagagttgttctaaatgcattatcttattgtattttatgtatttgaaaatggtttccagtttaaaaaagaagaaagaaactgattaagaaaattactgttaaaatgtggtaaagagccaagcaagtaatgaaatgcaagactgtgaagcaattcaggtctgggaattatcttctggagcagcaatccccaaaggacagctgggtatgtcagaattatcataagagtgtctcaaaaatacagattcctgggcccaacacttggagactgattcactacatctgggggagag

SEQ ID NO: 41056 - DNA, 2231 bp, Bovine  19866881421797
  misc_feature (1)..(1): n is a, c, g, or t
natgtttctgggaggaagctgtgacagacaaagctgttgaagcttttattcagcaacggcccagcatgcagtttgtaggtttgctggccactgatgctggctattctgaattcctcacaggcgaaggacatttgaaggtcagattttaaaaatatattcctttgtcaggctgaccattgtttagtttacataagactccattaaggtgaatgtctaataatatatagatcatattcatgaaacatgacatagagtgaaaaggccttgcttttgagtctgaattaatattccagattatttgctttatggcccagagcaaactatgatgtaacttttcaatttacatttatttataaaatagatatgactcttacctgcaaaattattctgaagattaataattatatatgtaaagtgcaagtcatgttgtaggccctggataaatgatagttctcatgaagagaatgtttagatattttgaaccacttaaacatatagtatctaaaggatcacgtcaaagaaactagagatgctcctttgtagaaaagagtaatgggaggtaagttgtccaagaagatctctattgtaaaaatggtaaaatccttctcttcttaggtttctcatgcgtaatggcttaaattccatttgggaaacatctactgaacttggctcaacttgagattgaaagataaaaaagatacaggatttgcttccaaggagcttgatagtagtagtaatgttatgatcacaaacaaatctaaagccaaggatcagtatagttgctgtaggagagtaggagaaactttttctcactggagaattttcgtcttgatggaagatggtatctgaatcagaccttgagggatagaactgtaacaggtttaaggacaactagtatttttcttggagaaggaaatggcagcccactccagtgttcttgcctggagaatcccagggacgggggagcctgttgggctgccgtcgcaggggtcgcaccgagttggacacgactgaagcgacttagcagcagcagtatttttctaacatacattgtatcctataagtgctttatattgtatatggtaatatctgtaggttgatgttaactccactttatagatgaaaaacatagaaattatgatttactgttagttagaaccagcgtttggatctacatctatcaaatttcagagccccatttttttttccctctacgacttacatcaaaccacttaagttgaagcatcatttgattctacctggtgcaaatggcaatactgcattcttttttatggctgagtagtgttcatgtgtgtgtgtgtataccacgccacttctttatccattgtctatcaatggacacttagattgtatccatgtcttggctattgtaaatagcgctgctgtaaatttggggatgcatgtatctgtttgaattataattttctccagatgtatgtccaggaatgggattctgaatcatatggtaactctatttttagttttgtaaggaacctccatactattttccatagtgactgtaccaatttactttcctgccagcagtgcaggaggattcttttttagcaatcaatatcgatctcaaaaaaggagaaggaaaggttagctatagaacattttaaaacatgtcagttcttatattatttgtaaatttagactttaaaaagtagaatgtaggcaattattttgagtcacttttttattcattcattcagtaaatattttattaagtacctctgcatattatgtactgtgctagacatggagatttgatggtagagtgaaatggcgtgatcttgccctcatggagcttataatttagtgagggattcagacagtgaagtatcatacatatgttatgggtgtatgatttcaatatatgtatttatatatcatatacataatgtgcacatatatatatgctttaaactgcatagtgtgaagaatctaaaagctacataatactgtatttgagtatgttgaacagagaggcttgacttagtttaaggcttctctgaggacttgatgaatgagtgaagaccttatggatgagtaacttggtagagaagattccaggcagcaagaataatacagcaaaagatgtgtggtaggaagggaacatggtacatccaaggaacttcaagaaagccactgtggctagagttctagagtaggaagttgcagagcgatgagatgaggctggaaaaagt

SEQ ID NO: 41057 - DNA, 789 bp, Bovine  19866881599482
  misc_feature (1)..(1): n is a, c, g, or t
nttcctaggatatgaagtttctgatttttagctaaggataagagaaaacatttaagacgggggcctgaattatatatcacgaaatggtaatatctcagaacatttcaaacaacggaagaattctacctcaatctagttaacataattaaagtgattggcaggctgtcctttgagctgagcaggggagtgcagtaatcgggtaggccttggataggctaagcacagtatggggtagtggctaatctaaagtgaaaaacaaatcgaacagtgataaggatatagtaatagagtggaaaagaaacaaaggaattttctgtggagacagaaagttctataatctacattatgactaagatgtgggttatatggatatatctcttggccaaaagtgtacatttaagatctatacaattaatgtataaattttacctttaaaaatctgttaaaaaaaaaaaaaaacaatgaagcagggagaaaggaataaatgaagatatataaatgaaaaatggcagtacgtcaatcactactgaagttgtataatgagtacacaggaatttattatactattctattattctatttacttttgtatatatttgaaatttgtctataacaagtttaaaagtttcctacagtatgtgaaattctgcttataaccatgtgacaatacattatttcttaggttcataattatactgaggaaatttggcagaaattctgcatttgccatataaaatcaacgtttttatactctatcaataatcaaaatttcatttaaagttatttttt

SEQ ID NO: 41058 - DNA, 4941 bp, Bovine  19866880573420
  misc_feature (1)..(1): n is a, c, g, or t
naggtatttaattaagttgttaaactagaaaagttgttgagtgatttttgaatcattgacctgaaaccggggtggggtggcttttatatttttccaagagacaaagggcttccctaatagatcagtccgtaaagaatccacctgcaatgcaggagacctggttcaattcctgagtcaggaagatccactggagaagggataggctacccactccagtgttcttgggcttcccttgtgacttaactggtaaagaatctgcccgcaatgagggagacctgggttcgatccctgagttgggaagatcccctggagaagggaaaggctacctactccagtattctggcctggaaaattccatgaactatatagtacatggggttgcaaagagttggacatgactgagcaactttcacttttcactttcaagaaacaaaggactgtttagagtgtggtggggaatagaatttaacactgtgagattaatatgctgggtggaattcacaacaactaagtctccatcagttattcatctttgtgtatgctactgctgcagctaagtcacttcagtcgtgtccaactctgtgcgacaccatagacggcagcccaccaagctccaccgttcctgggattctccaggcaagaacactggagtgggttgccatttccttctccaaagcatgatagtgaaacgtgaaagtgatgtcgctcagtgttcgactcttagagaccccgtggactgcagcctaccaggctcctccatccatgggattttccaggcaagagtattggagtgggttgcaattgccttctctgatctttgtgtatagattgtctcttgagattttccaagcaatttattagtgtatgtttgtatttcactgggtaagttttcaatactaatacagaaaaccaagggactgtatgtagtacatggttatagtcctgagatttgcaaaagagaaccttctctttctcttggatggttgtggcataaattattgtgatagtctctcccaagagcccagggattttaaggagagggatatttttggccttttcctatgttctgcctagcatctataatcctgactagccaggacagtgagtcacctagcagccgatgcaaaggatacaggtctggcatcttccaaggagatggagttagtaatgcttctctagggaaacctcatccagagacaacagtctgcactgggtatgtggcagacaacctacatggcactctgtgtgctgggccacttacttttattgggtttgcaagacctgggggaatccaaaataaagccatctatctcaggatgagttctctttatgtgttggataaatccgtgtccatttctgcctctaagaaaatttagctcctgtatctaagaagccatattctcttgtggtgggatctgaagagcaatggataagggtgtcagattctgggttcatgtgaatcccagctttcctccatcctaactttgtgactttggataaatttcttcattttgctaaacctgatgttattaatctgcgaacaggggttataatagtacccatcccacaggcagagatcaaattgtagctgttcttaccatgactcagagtcaaacagaatgtaatttcctgaatcgcaggagaagaggtttaatgttgatataaaaaggagcttctgagaagaaagagttacaaatcttacagtgaaaatttatgaaaactccttccatgaagacctttgaaaataatcccgactataaaattatgtgacagatgtttctggccattcaagaatttatatagtcaagtgactgtcatcagctcacagttaccaccttgggaatttatacactgatcccaatgatattgcttttgggaaaactctctttggtacctcatcactaaaacagccttcagagaatgtaatgtactgccttgacatcttttatcagggacagttgtcatcttcagaggctgatgtggcttagaaacaaccaaaagtcattcagagccagtgaagagaggtggctgtacaatgaaagagaatcttacagggctcaaaggctgacatttgcatatgtgggttttatatcatgtgaacagattggaaatgaagataacttcttgtggcctaatatgtgattgcaggtgaactgttacagatgtttgagttacagacacactggaacttacctttaattctcagatggctgaaacacaattgtttaccatggtctttgtcctttgtggtgaatctgaaataattcataataaaaagtatttttaaaaagacaaatttcagggcttccctggttgtccagtggttaagaatccaccttgcaatgcaagggacaggggtttgatctctggtctgggaagactacatgctgtggagcaactaagcccgtgtaccacaactactgagccctagctctagagcctacatttcacaagggaagtcaccacgatgagaagcctgtgcactgcaacagagaatatcccccacttgctgcaactagagaaagcccgtgtgcagtagcatagacccacaatagccaaaaattttttaaataaataataagtaaaaattaaaaaaaataaaaagactaatttcagaattaaaaaaatagaggaatctagcttccaccaaaatcaccgcttctcaattcttcttggaacatcagaatatatttttctaactccctcatcatttcatgatttagtcacaggcagtgactaaagacatccctttaagtcttctagtttctagttccccatgtaaatgaaatggagaaggactctgtggggcctttccaggacagaccccacccacatgtcctccaccttcctcttgtctgtataaacactttaaatatataaagaataaatgtatcaaaaaataaatgtaattagagaaatggaaaaaatgaagaagcaaagaaaacagtcaaatagaacaaaataataagaatttagtgattaagtaaagtcagggacctttagttcctcctcaagggctatagataatattctgagtcatatcctttgggctgcttcatagagactgaaacttctaccaggtggaagaagttaattacatgatgaccagactgtagccatgacaagctgctatatcttgcacaattccaagaactggcctcaagaaaatgggaaccaaccaatcctggaactgaagactcactacttaaaacaatcaacacaactctgatcagaccaccacatgactaatttcaagatgattggtagagttgactgtactgttcttcatgtagttccctccatctgcctacacctctgaaatttccctttaaaagctcttgcccttgatcaacagttgggagttggtttttggaggtgagtctactttctctcccagttgccagcctcctgataaaaacaatctttcttttcaaccaatacttgcctctcgagtattggctttcaagcagagagcaactggatctgagtgtgataccataaggaccttggaagcagcctttgtgtcctaacaatgagtgacaaggtgaacagacttcttcaacttttcttggatccataagagggaggaggacacagggcaaactcccgccctgagattggagggacagacaggtgaacataaagagccgaggcttaccagagcagagactcaggagtgcaaagcaccatgggaaccagtgccagggaaggaaaacttagaccacaattaaagaagagctggaggctcagtgcaaaaaactctgattaaaaactccaaggggaccaaatcataaggagatcctcataatattgtgagatctaactccagaaactcaatcagattctcataccaaataaatccccatggacttctggcaggggaaggtgatggagaaccatttagaaacagccccaagcactctattcttcttcacaagacctgccctcagaggaagtcagttaactagaacctacctactggaccattatcagaacttaagtggtgtgaggaagggaattcctaacttctgctggctctagtcatcctgtcccagctaaagggggaggaaaaaaacctgaaaaacacttgtgaagttcagagtccaggcatagacatagggtcaataaagggtggagacccaattatgtgtgtgtgcatgttcagtcactcagtcgtatctaactcttctacaacctcatggacgttagcccatcaggctctgctgggcatgggatttcccaggcaagaatattggagtgggtttccatttcctcttccaagggatctttctgatccagggattgaaacttcatctcctgcattgcaggcagattctttaccactgagccacctgggaagcccgagacccaattatagaccgcagctattccttttatccaaaacaacatatccaagtatcagaaaataaaaaaaaaattctgtaaggaaaaagttataagaaatatcaaaaagccaaaaaacagacaaaaaagtccaccacattttgaagacacagagaaagcatcagaactagacatggcaaggatgttgggattatcagactgagaatttgaatcaaccatgattaagatgctaaaggactctagtgtgtgaagtagacaacatgcaagaccagatggacaatgtaaacagaaagatggaagccctaggaaagaactgaaaagaaatgccagaggtaaaaaatacaggaatagagaatatctttgataggctttttagtagactggacatggctgaggaaaaactctgagctagaagatgtatcagtagaatccttaagaaactaaaagcaaagagaacagactggaaaaaacaagacagaattgccagggaccatgagaccactataaaaggtacaaggtatgcatgacagaaataccagaaggagaaagacggagaggaacagagtccatttcact

SEQ ID NO: 41059 - DNA, 799 bp, Bovine  19866880854670
  misc_feature (1)..(1): n is a, c, g, or t
naataatgaatatagttaacaatcatttgaagatatatataataaattgggaaatagaccctagagagaccaagtaggaagccagaactgttgttctgacacatgcagtgacaaagattactctttcagtaatatttagtgtctgatattaactgaacttatttactttgccaaattataaatagctttataatttcttcaaaatatacttttagtaatcgcacagttaatgacatgctgatatatgttttattcaagtctttgaattcaactatttcctgaatttttatactctgtttggcagggacaatcatcatcttaactttgtaaaataatgctcaaaagaaaaacttcaaaacctagttacatttgtctttgtagtttgtctacactgttccgtggtcattctatgcaaggagataaactcagtttataagaattcataagaaagaagggaactgagccatttaatcttcttatattcttgataattgcaaactatgacagttctttacactctgtgcagctcatactttcacagggcttggcttagacatccttgagtatttcagtaaaaatgaatgtacactgtcatgagtgcctgttttgtgacaaaaattgtactttcatgttgcttttcagtgcatattacatatcatccatatttaggttatcagatggttattttagcataatacatacttgtaatattcatatatccattttttttcatattttgtacctatattgcattcagagcccaatattttaatagcaaaagctaaaaagactttccatt

SEQ ID NO: 41060 - DNA, 727 bp, Bovine  19866881023073
  misc_feature (1)..(1): n is a, c, g, or t
naaattcaccaagctggatagttgcaatttgtatggttctctgtatgtaatattttaataaaaatttatggcagattacaggttaacaaaaaatgcccctgatacatatcattaaactaccttctgaaaagaaaaaaaaaatgagttgcaactagcaatatataatcttatttcagtgtacagggtattattatttttaaaagttactaattataaatggaataataatattttaaattgcatttgtgattattaaaaaggttaaaaaggattttgtatattgttttttactaaggattatatgcaacattatattccctggtaaatgtgatggtttcctacataaattcttattttttggtagctttaaaatatcattatttcatatgaactagccaaattcattacccatgatgttcacgtacatatatttgtttctgatggaaataattagtcttcaattgctgtacttaagtgcctgcagattgtttctttggctcagactgacacaatttgtttgcaattacttccagcattttgcacacgaccacaagaaaacgattaaggtatctttcaaaagttgtttgcctatatttttctgacaccttaaatgtgattagataagagagttaggttttgagtgtaatagcctaaaatgcatgagatatcttgctgctatgagggtctttattaaacaaatgttcaccatcctttcatttgcacagtg

SEQ ID NO: 41061 - DNA, 1889 bp, Bovine  19866881086153
  misc_feature (1)..(1): n is a, c, g, or t
ntattatgaattaagatgtcacaaatattttgtacaatcctctttgaagatacagatttttatcacatttgaagaattacatgattccagagacatctagggggagaaggacatggcaacccactccactattcttgcctggagaattctgtggataaaggaacctggtgggctgctgtccatggggtcacagagtcagacacgactgaagcgacttagcatgcatgcatgcattggagaaggaaatgcaacccactgcagtattctttactagagaatcccagggacagaggaacctagtgggctgccatctatggggtagcacagaatcggacacaactgaagtgactttagcagcagcagcagagacatctagggagcaatagtgaaaagcacaagaagttttcggtctaatatatgttaaaaaaaaaaaagatttttgggtataaccacaggttattccaaaaaggtaataaaatatctcatcatccaagatatttatgcatcattgaaaagattcaaatagaagctgaataaatatctgaaatgttggaagataattccacatttgtggaagtagtctagttaccttttctttattcctccaattctaatattctaaagtggtagggctatgctatggtacatttagtagatttagtacatttacttggaattttgaaacaggtaattgctctaatgcaaatcatatgttctgttggcaagtaaagggagacatgaaaatagttaaagaatacaactgaatgttaaacataccaagaggaaatttactctacatcactgaacataatgatcgccacatacaaattaatatgcataaaattttacacagagaataactctttacaatgttcaggtatctttttcctataaggaaatggcatggttggcaaatgatagttgatgctctatttcagtgaatatggtagtctaagttttagagattgacaaaattttaaccttgaagactatgtttcgcaagtttcacagaacatctgcatatatacaattcctcacagaattttagcatacaactgatgaaatgcatataaagagatcatttatcagttttctatgttaaggaaagaaaaaaacaatgttcctaaatgatcttataaattacataaataaaagctgaaatcctttgagagtattgaatcatgattaacaaaatccagggtttttaattttttctcacagcaccaatttgtaaagggtgttatttaacaaagtgactttggactatgtgaatgtcctttcaaaatgttctgataaagtggcttagcagcaggacttctgccattgactcaaactaaagcaaagaactctgaaaagtgcaattgttctgtgagagtcctccataggaagtagaaatgaacaatgtgttgaaatgtaaatttccttcagattcttccaaatcctgctctacagggatttcatttttcaaagcaatcttctatatttactactccacttgttaaattttaactccctgggccaagatttgtaaatgatcagagaactgtcaccacagggctaattcaggcatcttcccgcccttgttacattctacctctttcaacctaatactaagagactgtatttgcaaagtggtgtggaagagactgtaaaatgcagctattaaaatatttccaatgatttgctaatataaaaagttaagaactagagccattttttagaaagatagaagccaaggatgcattctattgtaggtcattatcttcagcctccacagcccagtgtatttataaagataaaataaacttgtgaagcgattttgtatttgagaataatttaaaaagcaaattcataaggattctggcttattctccactgcagtgatgctg

SEQ ID NO: 41062 - DNA, 1495 bp, Bovine  19866881400845
  misc_feature (1)..(1): n is a, c, g, or t
natacattagtaattagacaaaaggttcccaatgatatgtaattatatgaagcttaacatcccaatataattaatatatcaaaaagataaaaattaaaatgttatatggggtttttatcatgtttaactctttcttttctctgcctattttaattactgcatttctcttagtattatttgttaaaatttttatttgtaccacatttcatgttttatattttagagaaaaaaatgaataatgggataaaagtattttcaatgaatgattcttacattaataacccaaagttttcagctttcaatatttcacacatatatactacttaaaccaaattatatgcttatgttagtctcttattttctttgaagaaaagaatatatcccagggctatgaaccacatttccataattatactaatgaacctgagttttgtaatgcattcaatcatgaaatcagttcctgactactagctgcctttaaatgagaaaccgggttttatagctacagggaaattcagacaaaaataacccatattgtaagagctggccaaaatttaaattgaatgtgaaacttcttaattttatatatttcccactgctctctgggatatccctgttcacatgcgatattgaaaaagcataaaagaaaaagtcggacagtctatccactagaacaaattagaaaaagaagttgctttttttttttttcttttcccatgtagtttgattgttaatttgttattttcagcattgttcttcaccatgctgtatttttcaactatgccagttaaattcaggtcataatgccatagtcagaaccacaatatgaggagcatgtttcaagaggagcaggtgccaggtgtccagctcaatagccagggcctcaaagctaacatgactacttaggcagatgtgttcacaggacagttcatcaatgacaactaggagctggacttctttcaatattcattggacaccttacttaagccacacactgagctaggtcaaggggctataaatcaattaacctattatctttccctcagggcatttataatctagcaagtacttgcaagttctccaggtctaggtaagcaagaaggctcaaaaattttgaaaataagagatttagcaaaacagcactagtaagaaaaagttgcgatcttttatcccaagacaaaagtatttttatcttaggacatgttttgctgggttcccctgtggctcagctgtaaagaatctacctgcaatgcaggacacacagacctgggttcaatcccctggtctggaagatcccctagaggacagcatgcaactcactctagtattcttgcagaatcccatggacagagaagcctggtgggctacagtctatagggtcacaaagaatcagacacaaatgaagcaaattagcacacacacatacatgttttcctatctgctgaggtatccttgctaggatggtctctgaaacaaaaaaaggcagaagcatgtc

SEQ ID NO: 41063 - DNA, 1482 bp, Bovine  19866881534498
  misc_feature (1)..(1): n is a, c, g, or t
ntgtaagttaaatatctttaaatgtgtctgccctattattaccagtcttagtaataatatttctcttgttcttggcagatgagttttttttttttttttctctctctcttttacattaaaggacaataacatttacctgtgattgcaactgaatgcttaaggttgattttttttttctttaactgaaaacaatgaattttttctacagtgcatcaatatctactactctgaaactatcttcactgaatgcacaagaaagtcacggtgagctctgaatgatggccacctgcaaagaaatgataagactgagcctttctctcttttcttggcaggacccctttgctgtgttctgacttatgccaggtaattggagtcagtcaactagacaaccagctaatttccattttctctctcttctgtatatatcaataatagcctcacattcttcacaaggaaatgtaacaatgtgtctgtcatttaaataattcaccaactgatgtacaaaaacattacaagagaaagctggaattaatttcagagtgatacaggttcatatatccatcctaatttatattttcctaagataattttggagttagttaattattttgaatggagaggtggcaaacaatttgttgccatcatggagcttaatttgagtgggtgttagtcactcagtcatgtctgactctttgcaatcccatggactgtagcccggcaggctcctctgtccatggaatctccaggcaagaatactagagtaggttgccattcccttctccaggagattttcccaacccagggactgaacccaggtctgctgcactgcaagcagattctttaccatctgagctaccaggggtcttcaaatttgagtgggtagagatgaacaaaaaataagctgtcaaaaagtaaataagatcatttctagttgggtcacaatctgtaaaataaattattgtgacatgataattttaactaaggaatggggagttgctacctaaaatgaaggattaaacttagtcagcatttggcacaatagaacagaagggaagctaggagagctgatgtagactgcaaggaagggagaattaaagggaatcgtgatgaagagctgggcaagagctagaccgaattgaaacttgccggtggatgttacacttcaaaagcatacaagtgcggtaaggctatgatccaaactacgatttgtgattgctgtgtgtggagataattttaggtgaacaagaccaaaagtaggagacaagaggctactgtgttaaaacagccccgagattgacagggacgaaagttagagaaataggagtcgaaatggagaagaacgttgagaagcattgcaaggtggtagcaacagggtaaactgggtgatgagggcagcaggaaccaaagtgtttagtattgaactattgggtatgtagcagtgctatttattgagaagaaaataattgtggaaggataaattta

SEQ ID NO: 41064 - DNA, 1070 bp, Bovine  19866880366284
  misc_feature (1)..(1): n is a, c, g, or t
nattatgctgctgctgctgctaagtcacttcagtcatgtccaactctgtgtgaccccatagacggcagcccaccaggctctgccatccctgggattctccaggcaagaacactggagtgggttgccatttcctcctccaatgcatgaaaaggaaaagtgaaagtgaagtcgctcagtcgtgtccgactcttagcgaccccatggactgtagcctaccaggctcctctgtccatgggattttccaggcaagagtactggagtggggtgccattgccttctctgatgattatgctgacaaaggtgcatatagtcaaagctatgatttttcagtagtcttggttggatgtgagagttagaccataaagaaggctgagcattgaacaactgatgcttttgaattgtggtgctggagaagacccttgagaactcttgggcagcaaggagatcaagtcagtcaattctaaagaaaaccatccctaattattcattggaaggactgttgctgaggttgaagttccaatactttggccacctgatattgagctgactcactgaaaatgaacttaatgttgggaaaggttgaaggcaaaaggagaagggggcagcagaggatgagacagttagatagcataactgactctgtggacatgaatttgagcagactccaggagatagtgaaagacaggggagcctgggtggtgtgtatggcctaatcaccaagcatcaaaaaaatgaggacacctcagaagatgccactttggtagacaatgacaacccagacaagattcctcctgtcccgaggggccttgagtgatttaagttgtttttctataacaggctgagatggaaacccaactcagaaattatgcttagtgaaagaaagtatagaaaattgcattccttgcgcatttgagtctgtgacttgaaatttattttgattataggagcacatttttggattaggattccttggaatatactttagaaagcagtaatcaagctaattaattcctggcagtacatatatttcatactcactgagctgagcaagtttatcttcaaacaaatta

SEQ ID NO: 41065 - DNA, 2820 bp, Bovine  19866880415233
  misc_feature (1)..(1): n is a, c, g, or t
nttcctactgcaaacttggtaactgagttggagtgagcacacagacagtggctctgagctgaggataatcctgggttcagacaccactgtgtgatactggtcacaatgggagatattggaagtcaaggggaaaatggattttaggtcaagcccacctctcaacgggcccagtgggaacacacagtatggttattttttcagtgggagtggcgaagttgaattgtcctgcaagctgattaggattagggggcctttacttgcctggaacttctttcagagccttacagcttaagcagagaattggagcatcatgttcaaatatggtatagattgtctacaaaatccaaagaaattctttgtattcttttgggaggaccaggcagcagcttgttgcagatcagttctatcagatctcttcccttctggaagagacactcttgatatagctttgctttccttaaatgctgtgattctgccactactaccttccacagacttacattgccatattcactgtcacaacaggccacccaactctgaacaagaaacttttccaaaaaataaaagcactgcagtggtgaatgcccatgggattctctgatttttttgttttaccatgtaaataattaccctgaaggagctggccttaaagaagagtggattgcctttttgaaaactcagttacagcaacagttggaagataacattctgagactaggttactatcccatatgatgctctgatctagtgaataacatatggtacagtttctccataaacagaattcccagggtagaatggcagctctcattattacacctaaatttcacttgtaaatattttatttctcaatcccatggatttggctttcctggtttaaagatctcatgatgcaaaggaaaactatctccactaggggacagaacaatggaatgttgagactgccacctggttactgagctctgtgaaccattgggccaacagggaaaaaaaagtcacttttaggattcatcctgtttatcaaggggaaataaggttggtgctttataataggagttgagaggagtccggggaccttcgtgaatgacacctagtactcccatgtaaggtggtaaaagttaaggcaagagtggagcaattctatggcagattgagatatagtcacatttcccttttcctcgttggcacacagatcgactataattcccggcctactttgcagctagatgtgagtatgacactgtggtctgtcaataggctgtgagggaagcattatatgctacctgcaggcctagcatacaggatagaaggagctagtgtatcagaaggtcaccatcatcagactgaagacaacctctttgggttttattgaaggaggaataaacatctcctggattagaccagtgaaaattccaagttcatctcttagagcaattagcattaccaaactacttacaaaccgcttaaaagcttaattttcccttgagtcaacggcacacttcagaagacagcctgcccatgggcctttatgtctgtattctacccaagaggggtgctttctggatgaggggaatcaaacagcaagagaccacaaggagatccaagcacaaaagctggaagaggttgggctgaagtggatctctcaccttaggaaattgtgcagttggggggcccttgatggatgtcagaaaaactcatctttggttcatatatgagaactttattttgagtgcctgccatacaatgttgatgttcaagggacaccatgaccagtaaggcaagagccacttgatttgtccagatttctcttatctgcaccctgtggtgagtatcagtgactaaaaggttggtgggaaggagccggaggcaaacaacctgtctccagaggagtttatggagctgcaggctgactgaggtcgaggaagtgatacaggtttagcctcagatctgacactggaacttccaactggacaggactacagtggactatgggcttcctaggtggagctagaggtagagaacccatctgtcaatgcaggtagatgtaagagactggggtttgatccctgggttgggaagatcccctggatgagggcatggcaacccagtccagtattcttgcctggagactcccatggactgaaccgtccacagggtcccaaagagtcggacacaactgaagtgacttagcacgcatgcccactcatgcaaccttttgcaaccttgagaggaaggagaactaaaatcctctgaccagtcacatcccttctcagtctgcacgtgtctttgttgtcccactttttttttcaaccagctcagtcttcgaagattgcatccagtcttcagtctttccaggtttctcattgctcctcttgcatattaatgggaggacaaaactgataccctccacggacacatgcatgtcattaggctgttgctgtgggggtgagtctcctctgaattgtcatgagaaagattataaacaagtcaaggacaaataaagctgattggataccaaggaagataacatgagctctggctgaaggacaaggaggaagcacctcaggcctaacagctcagacaggagcaacggcaatacgcctgcgtctgcctccatctgaggaccgggcttttgtgtgccacacttaccaaatagctgtgtatttgtccaccttgtggatcatcatataattaacacttccgagaaaatgacgttttgtcatgtaaatgtatgtatttcactgctgaaaagtggaagtgttagtcactcagtcatgtctgactctttacaaccccaggacgtagccaccaagctcctct

SEQ ID NO: 41066 - DNA, 915 bp, Bovine  19866880470901
  misc_feature (1)..(1): n is a, c, g, or t
ntttttttctgttagtgataaaaagacctttgttacttttgaccttttcataatcagggcatgctgatagaactttgccactaaaagtggagggaaatccacaccgcaccaatgagacttcttataaaattagctgggtgacattagaggcttaaaattaattggcatattggggactgtttctctttgcatctgcatactcagttttgtataagtattgaggaactttaaggcactcaacttgcattctgagagttcttatgttatgagaattactcattattcctgagttactgcttgatcatcagtgtagaaatggacagctgtccaaggaagatttatgcatgatcatttaaattggtgttgatcttgtcattttagaaaagtagagattatgttttttctgtcttcctatgctatttctaaaagtatccagtggtttacagtagtggcaaaccaaatactaaccaagaccattatcccaaacaccctgatattatagggctgaggttagtcaaatatagacatatctcaatttttaggacctccaacagactttagcacacagcaggctgatagtttaatgataaaacattagaaataagttcagattaatatacagacattaacacttttggaggaccttgaatgcaacatattgcaacagttttatattgagagtcataaaatttctttagaagacaggcatttattataaatggattaatttgaagcacataattaaattccttgccaagtggcaaatagccaatcagaggcagagcatgctttctaaccttcttttctttttagtcacccatgagagtgactttcaaacttgtgagtaccacagtttcacattttattagtattatgtgtgagaatacaaattcggtattacagactccagttttc

SEQ ID NO: 41067 - DNA, 880 bp, Bovine  19866880500854
  misc_feature (1)..(1): n is a, c, g, or t
nagtcccttagactgcaggagatccaccgtccttctgaaggagatcagccctgggatttctttggaaggaatgatgctgaagctgaaactccagtactttggccacctcacgcgaagagttgactcattggataagactctgatgctgggagggattgggggcaggaggagaaggggacgacagaggatgagatggctggatgtcatcacggagtcaatggacgtgagtctgagtgaactctgggagttggtgatggacagggaggcctggagggctgcaattcatggggtcgcaaagagctggacacgactgagcaactgaactgaactgaactaaactgaatgcatcaataaaagctactaattactgagaggtaattatataacagatattaaggtaaatgctttacatacattgaaaaaaactttaaagagtataaaattatgcctataaggaaggtcttggtaactccattttgcagattaaggaaattagattttaaagatttaataaatggtccacaataaaacactgttgaagaatgactaattcagggaaaagtcaatataaccactgagtggaaccactgcactccacagcctttctgattctccttattaggaagcaaaaattctctgtgtaaccggttggcagcatttctttgcctgctcctgtgtagtgtggactcagtcttctaaagaaactgtgagtacagccatacgagaggcaggctgctttagaaatactcagccacctggaaaaccataacaaatatgacttggtaatcagctctttcccagagctgtgatgtctcacatgtcaaaagtggtaagcacttcccagagctctgacaaaattacacccaaatgaaatttcttc

SEQ ID NO: 41068 - DNA, 669 bp, Bovine  19866880508041
  misc_feature (1)..(1): n is a, c, g, or t
ngcggctttgcttccagagatgaaatcccaaccattttttccccctattttccacatcatctcaatgaaaagcaaagaagcaaatattattttcgtgctgtaaaaactgattgacaaagtagtaatctacttgctatttcatgtatcattggctaagctaaagtttccttcgattgtttgaaactattgttccagtagtttgaaagctactcattttaatgctaaaagggaaaaaaggattatatatagcttccaaatctttagtctagagaccagatgcaaaacctgacagatgggagttctacctgccattgagaaatgaagattgttttctcttcacaagtctacggggcatattttttctagagctagaagtgaaaaatccataaagaatagattggtcaaaagttaattttgatcccttggggaattgtttaattaacagaacaattcagcattgaacccacaagtacgtgcagagtgtgtgcactgagccagcactgttagatgcaggggagtcggtgaagactcagggctgcctggcaccgaggtggtgaagtttactaacgcagttagccaggcaggtgatggatacgtggtgcatattccacaggaagaaatagcagttttcaaaagttataagcctgggaacctaaatagatgataatg

SEQ ID NO: 41069 - DNA, 1888 bp, Bovine  19866880676416
  misc_feature (1)..(1): n is a, c, g, or t
nttttagccatatcttattaaattcatatgtcaatgctgtctgtgaatacataaaacttatgcttatcagatttgtaaacaactcaaggctgagatggctagctaatatactagatgacagaatcaaaacctgaaaatattttgacaggcttcttctaacaggatgaaatttgttgttcagttgctaagttgtgtacaactttttggggctccatggactgcagcatgccaggcttccctggccttcactatctcccagagtttgctcaaattcatgtccaatgagtcagtgatgccatccaaccatcacatcttctgttgcccccttctccccatgccctcaatctttcccagtatcagggtcttttccaatgagtcggctttaatggagttaaaggtaaaaactttttatctccaacagcaacaacaaaacctatacctgttgagcatctgcatgtagaagattcttagaaaggatcatcagtgattaggagtcatacaagccaatggagtcatagacttatttggagaaaagaaggatggaggtgaaggttgccacactggcaatggtcagaccccatccaaagtcttgtgtgcacttctggattctttattttcagagagatacaaactgaaatgtattagagaatgtcaaagggtcttaaatccttttcttttctttttggtaatgagtctgaagagtagttttctacctaatctggaaaaatgtaattattttgtcaagttaaagaacataagcaagaggagttgtgatcctagttgggataaagatttcttttattctagaattaaaaaatttggaggacaaactatatggcaaacacatgcgtgtgtctctgagtagaatatttattcatgagtgtggcaattttttctcttaagaatgacatggaaacagcatggttaggagtgctgtgaaatgaccaagctgtgcatgtgtgggagtgcatatcttctgcttcttgtggtcctgagtgagatgtgagaggattgagtatgttctgtcctgcaggctttgcaaatacccagaaagctagaacacctaagaggaaagaaagaagtgaggaaacagagagcgtgcagtgtatgatagaacaggataggacagaagagagaggagagagaaaaggacatactgagcgccttataatatgttctggggaagcaaatttataccataaacttactaagaaatgaatgaattactagtgaatgggtcacatatgatgaccagtgcaaagctgcagatgtcttaagtaaggatgcttttaagaaatcagaagtatcatcttctctcctcttcaggtatctgccttttctgcccctgtttctttcctgtgaaaagtcagatactcatcagacttgtgatgtactgtcacctgttcttaaaggtctacctgtgtgtttgaatagtgaccttcaaaatgctttcccactatagttgagatctgctgaaacactgctgtacatgatacaccatacggctttgtgtcactttcagagttcatgattgcaactcatgtcaaacaattttccttagtgtcatacatctgcaaatttaaattcaagaaaactcattcaaaacagtgaaattaagcaataattgaagtggatactagctacttcagcacaaaaggatttattttggtgtatttttaggacttggtacaacatactgatacaaaaatattaaatcagtagaaaaaattgatagtgttttaaaggatgtgaggaaggagaaaagaaaaaaggagttttctccaatcaaatgcaaatgaaaatgacccacaagattctgaaaacagtctctctccgacaagaacattttcatgcagtgaaatccatttttagactcattagcaagcgc

SEQ ID NO: 41070 - DNA, 1423 bp, Bovine  19866880771129
  misc_feature (1)..(1): n is a, c, g, or t
nttctttttgtccaaaagggttaccaccataaggcaggttaaaaaaccccaatattatgtactaagggaaccttggaaaggaaaagttacccttttagatttttattttaattgaattgggtctttgatggagctaacattgcaaaatgatacacaatccatagagaaatagcattgcagatctttgctgtccagtatggtagccatgtggctattgagccctggaaatgtactagtccaaattgagatatactgtaattataaaatagacacgtgatttcaaaaagttactatgaaataaatgatgcaaaataccatagtaataaggtttatattgattatatgttgaattgatattttaatacatgttaagtaaaatatgttattaatattaatgtcacctttaagcttttttaaatatagcttccccccaaatttaaaatatggcacacgttaatatgtttaatggacaacactgccctagttgtaggtttaaataggagctttttatttgttcataaagtgttttttttcagagttgtcttttagggcatgaaagatgttataattttgttttgatggtttattctcactaagacccaaccgagccaaaaaatcactgaatttagaaaagaaaaaagtaagagatggtttcaaatatctcccagataccagataatgaagcaagactgatttctccaagaacaaagattagactgccaagctattttgcataccaaagagatttcccctcctggatgatatttgtgcctctaacctctgaaggtgcaaaaggagagttctctatttctgcatacctttgtaaagcttttgcaatctaaaatgaaaaatcaaagcagaaatcttgcttgccactgcagaaagatttgttttaacatcccaacaagttcatcattttcaagaatgatgaaactggcagatagttcactcacagaccacatcagcttttaaataagcccttagggggtaaggagtcattttttttttgggggggggagttctcaatttacctaattttattacagttatatttgatgagggttcatactcaaaatattaatttgctctaaccagcattattttacagggaggagttgaattggccccaagctatttggttttacattttctattgcctaaatattgatggttcccccaaacctatcactttctctgcattcttttttttttaattttaatttttaattggaggataattgcttaagaaagatgtgttggtttctgccatacaacaatgtaaatcaggcataagtacacacatatatatgtatgtatctcccttttctcatgagcctccctcccagcctccccccaggactctttttgatttatcctttttatagccttttattgactagcacagtccttttgtacttagcaa

SEQ ID NO: 41071 - DNA, 1040 bp, Bovine  19866880782848
  misc_feature (1)..(1): n is a, c, g, or t
ncccagaataggaaaatattgcattagaatataattccaacaaaagaaaactataattaaaacataatcatatgattagaagtaaattcaaaagagcacataaggtttccagcatattttttatatacttagatcttaacttttagagagtttgttttaatccagctttaagcattttgcacaaagattcatgtcaatcttttcatttacacttcatgaaatctcctaccattgtttctttatacaatattcacatacaatatttttacttgggttgtagacagtattgctaagctaccattgtatgcatctcaaatttcccttaagccttatcttgattttgacgaaattgaatggatttgttgtgctacttgagaacagaatcaggattatcctgcaggtggtttttttaaatcatttttgttttgttttggtcatttctatttttcatgtagcatttgtttctttttgctttggccctaagtttcttctttcatttttcattagtacatcacctcatggtctgaaataccttctgttgctttcttaaatgttaaacaagatgatatgcctgttgaagaagcctgctgctaagtcgcttcagtcatgtccgactctgggcgaccccatagatggtagcccaccaggctcccctgtccctgggattctctaggcaagaacactggagtgggttgccatttccttctccaatgcgtgaaagtgaaaagtgaaagtgaagtcgttcagtcgtgtctgactcctagcgagcccatggactggagcctaccaggctcccccccatccatgggattttcaggcaagagtactggagtggggtgccattgccttctccggttgaagaagcctaatgtgtctgtattctctcttaaaaaataaattggaagcatattttaagggtgcttaaaaatcactgcagatggtgattgtagccatgaaattaaaagacacttactccttggaaggaaagttatgaccaacctagatagcatattaaaaagcagagacatcatttgtcaaca

SEQ ID NO: 41072 - DNA, 1497 bp, Bovine  19866880855019
  misc_feature (1)..(1): n is a, c, g, or t
nctcccaaggagaagggttaattcccatctcgtgttttcccaggaagtcttctcctttccttctcctactcttagcctattggcctcttagttgttcctttcaccttgttggaaattctgtgaggttagactatctatattttttcctaccttgttcctgttacagagcacttaattattatttagaagataaagtaatgcacaagagtttcttcctgaatagttttgatggtttcctgttttccacttgggaatacctctcagagagaaactatttctttaagaaggtaaaatgctgtaaatttttttctatcaatgttttgagcttttgaaaattactaccggagtgtgtatttttatctttctcacacctctgttagtatttcagactacacaattgtatgatcactatctttcaaattgtctttcttgtgaaaaataagtgactgtttgacttttatgtgcactgacagggacctcacattgttattttattatgcatagctcatagtgctgtagatgtaattaattggcaaggtctgtatgtgtggtttctaattttgctaatataatgctgttgggccaaagggaggtatagaaaacattcaaaattacttgccatttctattaattaataattggttcaaatattcttagtaaaaatgtagtatcctttttggagaaggcaatggcaccccactccagtactcttgcctggaaaatcccatggacagaggagcctggtaggctgcagtccatgggggtcgctaagagtcagacacgactgagcgacttcactttcacttttcactttcatgcattagagaaggaaatggcaatccactccagtgttcttgcctggagaatcccagggacgggggagcctggtgggctgccgtctctggggtcgcacagagtcggacacgactgaagcgacttagcagcagcagtatccttttaattgtactaagatccctctattgtagagtgaatataaggtaaaaagccatgtgacattctgttttaaagatacaaccttgttcagaagggcttatggaattggtaactggtactttgccagtacgtaaaataattattacctctctaatctaatggataatatttcatatgatgggaaagtgagatgaaataattgccttctcacattcaagtttctgttaaagctaccagtataagggagaagcagagaaggcaatggcaccccactccagtactcttgcctggagaatcccagggatgggggagcctagttggcttccatctatgggatcgcacagagtcggacacgactgaagcaaattagcagcagcagcagcatacggtagaagagaaataggtttaaactaacacagaattaaaggcaataatttagggtaagatgttttttcagagctgtattttattagtaagtttcaaaatccataagaacatgaaataggatacttaccttttataaactcactggctagactaaag

SEQ ID NO: 41073 - DNA, 1065 bp, Bovine  19866880881148
  misc_feature (1)..(1): n is a, c, g, or t
ntgcatgcatgatttggttagctgactcacagagctatcctccctaacctactgaggttagctttcaagacactttttttttttttctttttaatgtgtatgttcttgaggcaatgactttttaaaatttattttctaacctttcttccaagtctttatcttctcatatcaaagaaaaggaatgagactgtcttcttttttcactgcaggctttttcaagatacccagaaatgaaggattctttaatcgattaatcaggctcaaatacatagtgccaaaagcaaataaaacaatggcacctaaatttatatagtgtttgagaagcatcttcacaaacttcattttatttgatcatcacaaaaaaactttgaggtgggccggtccgctatgatcaccattttatgagtagagtaaaatcactatgtgagcacagcacattcaacagcagaattgaaactagaagccagttctcaaatccctgtctccagtgctctccttccctaacacacaaacgcctatgatatgtagagaactgtgtaaatatctctcatctcacttttatatgtttatatattctagtaccaagatagaagtcttctcagtgttactcaaataaattggtaaagattttatgtcttctgaagctaagtgatatataaggaatgaaaactaatttatctttccccaatataattaatgtttcaaaaagcaaaactagtaagaatatttattttcacactataaatatttagtataaggccttgttctcaaaattccagttttgcatttactttcaatacaataagtcaatgttataaaagcttcacatcattgaggaaatagattcagtgaataatttcactggaagacaatttccacacaactttttagtttttgatactttaaataaacactatacataagtatattatatatgttatatatgttactcatctctgatgtcatgaaagttgggtattaataatataggaaaaatgatacttgaataaatactgttggcagattgaagacgagtacaaaggacaatcaccacggaacactgta

SEQ ID NO: 41074 - DNA, 1586 bp, Bovine  19866880885527
  misc_feature (1)..(1): n is a, c, g, or t
ntcaagggaaagaagaaacaacgatttagtttgctcatatttctaaccatagcaacaagaaagattaaatagtaaaaaacaagattaggtagaattgataatccattaatgtggagttccttcatctcattaacactagtcaataaaaaagtggctttgctataaaacagtggcacttgagttccatggaagtcactgtgtatcctagcaatgtccttttttaaaaaaaaagaagtctgaggatcttatctactgtggctaacgtctggaatttctggccttatctcctggctactcacttaggatagtctaggattttatttccccatgggtttaccatcaacatttttccctttaaaatatcagccctgaccttaagtggcacagggctctctctgtgggctctggaaatatttatagcactcaggtataattcttctgattaaaatatgttttgcttctattcttcagtgaaacaataaaggtagattgcagagcaagcccttttattcctcctgaaaggacctgctgtgaactacaaaaacgaaatacaaagtaaattgcttcaaactaacgtgaatgctgctagctcatgctgggtcatactaaaagagacttccgtctgtcccagcaacaacaaaggggggggggggtctaattcttaaccaaacttgacatgtgtctaggacaagatgttagtcatgcctggcttcatcttctcaggaatttcttgtttaatttaactcaatgactttgaactgtgaaggaagagttgatccaaaacatgagttagacaaaggaatctaaataggaacctgaaaccatttctacctctctgggtctgatcttaccataatgaagaaaaacaaataaagttgggagaatgtgatctctttctttgatggaatcacagatttaaagatcaaaaaatggaatggattgtcataagctatttggaatttatgaaatatgtttttgataactatcatatgtactatttttaataaattcaaaacagatttggtttgaaaatgtgcaagatagaaaattgatatatatggtactaacagatagggatggtgggcaaaactactgggttataatgctgggccagctaaaatgatgcagataatatttaatcttcactacctactcatatttttttatttttccatgggtcaattaacaaaatgctttatgtgactactatgttctcagcattacaagacatagaattacatgactacttcaaggagtttaacttctggttgggaaactcaaaacactactaaacaagttatgaattatcaatgggcaaaacaaatgaggctatgtttgaaagaattacgaattacaaagtctaacacattctgttctgtatttcagctgttttttatttcaaggagttcagtgacaatttgaccttgtccttatttggggactagtcctagtacttactcttgggaaaattccctctgtaaattattcttcattttatgtcagatgaacccaatccaactcaatccaatattctttgatgggatgtcacagattttttatcccattcacagctgctgctgctgctg

SEQ ID NO: 41075 - DNA, 1647 bp, Bovine  19866880920711
  misc_feature (1)..(1): n is a, c, g, or t
nacagtttaagagctcagtgccctctttcctcaaaacttcatacataactcatctcctaattaaattcaaagcttttatggtcatggctccttaattctacccctaacttgcttggcaaaaaaggacatttttgtcatagttaaagatttgcagaggtgagtgaactcacacggtggcaaagtcagttctaagggaacacaagaggaaaaaattgtatgatttagactttagattttattacagtatgtttcaggaacatcctgttgtgtggcatacatcacatccacataaatgcatttgttaaaaaagcaaccttagaacctcacttttgccttaaattagccagatagcagagcagcactctgttgagttttcattttatattttgcaattatttctcaaaccgttttgacttggatttagataaacatctgcatttcagcttagttgcctttcaaataaaacctaagaggaaaaaaaaaaaaaaaacaacattcttaaagatttgggatatttttagcaaggcagagaaaagaaaattgttttgtgaggctatttttaaacaatactttttaagatttcttaaagctccagtggttaggacagtgctaaaggcaaaaatgttgcttaagaaaacacttcagaaaaagctagaaaagttaaagcccaggccaagcccctagagagcaaggagagtgctcacatggcttaatgtcctttgaatctcttaaggttattttctaaatgagactatgagaacaaaatgaaattatacttcccttccagctagttaagcctcaactccctagatgaaaaaaatgttttctttttggacagtgatgtatttctagtcagtatattcccaaaacaaatacaccaaaacccacttcatgcacagagtaaaataaaatataggaacagaggtcattaaaatggtttagtatcactctaattgccattttgctgataaccctcatttgatggaacaggtgggttttggtcttattatctactacctgtaaagctatggtttatgaaactgaattcctttgaatccctcacccacttaacacttaagattttttacttagagtaatactgattctcaggctaacttgtagcagacagggtttgttaactagccaatgttcatttcccaacttttttcttcctgatagaatcccagttttgtctagatatatttcctccctctgaccccatgcatggaattaaaatcaagggaagctgatcccaagaatagacctttagtctaaaaagccaattagcacatggaatttcctagcagttaataatatactaagtggtcatatgtcctatactggctcagccaaactgaaggacactacccttaattcttgatagtgagagaggtttttctctctcttttgctagacaagaataaggaaggatgtagctccagtagccactggcaatcatcttaaagtttgaggggaatcattgaatgctgctgcagctgctgctactgctaagtcacgtcagtcatgtctgattctgtgtgacccgatagacggcagcccaccaggctctcccatccctgggattctccaggcaagatcactggagtgggttgccatttccttctccaatgtatgaaagtgaaaagt

SEQ ID NO: 41076 - DNA, 626 bp, Bovine  19866880928524
  misc_feature (1)..(1): n is a, c, g, or t
naattctcatgaagcagatggctactaaccacaatattaatattattttgctttgtacatttagggaaaaaatcatttcacagttgcaaaggaaaacctcgtttggattttataaagaatgatctgcaacagaaataacatgctgtcaggacctgttttatatgctttcattatcagtgacaaattgtgatattaattctatagcaaatttgtgcttgggattttagcatttctctcagccatttcctttctctgcatagctagctgtagaataaaatgctctgaattttaccttggagggatcgacagctggatttaaatgttacctctgtaatttgcttagagataccattgtttataaatttgaagagtggatgttctttgacaggattcggaatgaagtggaggtttgaggtaattgcttagataatccaggtagcagagacacttctgcctggattcccccaataacatagctgaaacaaaagaaatttatttctgtttgaattagtcaggtaattactcctgcactctgctttgttttgctgatgacattctggtttgaatgtattgggagagatgatggtgacagttaagttcatatgatggaatggtggtcctgtgat

SEQ ID NO: 41077 - DNA, 778 bp, Bovine  19866880954938
  misc_feature (1)..(1): n is a, c, g, or t
ntttatctctctttttttatccttatgtggtacaatcactaagttagctctggttagatattcagaacctgttgttccaagttattgatacatttggaaaaaggaagtatcatttgatgtcctggagctacagttatgctttctattgatattagcggttttcaagtatctcagaacaatattttcaagagagatttttgctttaaaatgaagagtgcctcagtaagtttttacttgcaaagctgatggaagtggtgggtggaagaggtaatatacacattttctgatagtaggcaacttagtagaaaatgagtgtgtttctatatattatctttgcagagttagcattaagaaatagaattgcaataaattgatgtaaaagccagatagtaaagggactaaaagtccctgcagagacaccagtctgtcacttacaaaggtagcaaaagataattgcagacaagtacagtagaactaaaccattgctgttttcctttagagatacactgctgcttctcatgtttttctgaaaaaattggttacttcctctgcttctgaagtatgccatgaaccatcaaaacaggtagaaaaagatctgccttttatttctccccaatacctttttaattagaacacaccatagagcaaaacgggcgagatacaatcctgcgtgattgcattttccagtaaattggtggatttcttttttagtttctgagctctgcattgaaaatctggcctctggcataaactttgccctcctcctatgacataatga

SEQ ID NO: 41078 - DNA, 1477 bp, Bovine  19866881060438
  misc_feature (1)..(1): n is a, c, g, or t
ntctatgaaactgtcgagctgacaaaggagcttgtaagaatggtaaaacctcaagccttttccagtctctgacaggtattatacaccattgagttgaaaatgtgttcatattctctaggagattataatctaaaaatgtcaaacctaaagttttgaatgaaatataattggagaagcttaaacagtagtcaatcattttaaaaattaaggataaagaaagagcagagttacagtagtcaaaaagtctattcggggcttcccaggtgctcagtggcaaaaagaatccacctgctaatacaggagatgtaggagacgtgtgtttaatgcctgggtcaggaagataacttagagagagaaatggcaacccactctactattctggcctggaaaatcccatggacagaggagcccgataggctacagtccatggggttgcaaagattaggacatgaccgagtgactgagcatggcacgcatatagtagtcaaaaaatctattcagcaaaaagtaaaacagaatcatggatatatatatataataaggagagatgaagtgtctcttctgtgactgtgaaaggggcatttttattacaattatttaagacaaacttgaagggctttagaaacagcaatgatatttttatccccataagctgtaactaaaaagctcctcaacatcttgccttttatatttgtccataggattctcatgaatcatatcatttttgcttatagggcttccttcagaagccatttcctagaatggatgtggtaaggtggaaatatggcaatagctgattccaatgacttggaagacttaaacggcaatcacgctttgccactgccgagtcatttcccttcttcagccagcacttggggagctcaaatttcttaaattaattgagcacttaatatacagctataaattaatcatattgaaaaggtgctaattatttcattaactccaaaccaatccaatctaaattgtcacttctttagagcacaactgctgaatttcctctgtatttaatctattgatttaaactatgctatgaattatatacacagataaataagatttagtttctgtctacctttttggaaattaagctgaaggaagtgtgtgagtgtttctgatcatttttttccctatagcatatacagcagtaactgtaatttgtatccatgtgaataaaagtgaggtaggaaaaacattttcatcccactagtcccagggcaaagaaaagctctttgctctccattttctccccctttcccatgaacatcttgactggcaggctggtagataatcctgtccagagttaatggtgtagtaacaggattgaggggaacctgacttagaggctttcatctgggctgggacatatcgatgccatatttaaaggtgtttgctctgttcacctccatgaagataaatgtctgaacatccagctttaaaagcaaaaagaaaagaggca

SEQ ID NO: 41079 - DNA, 1996 bp, Bovine  19866881092053
  misc_feature (1)..(1): n is a, c, g, or t
nacttgaacacaagtagcctagttgctcagtgtatactctaaccactataatgtgtaagctcaataaggcacataggaacaaaattaactttaaataatgagaatgttcacattaatcagaaatgaactgaaacttaatagaaatacctcatttgtaaatgaaaatatgaatatataaaaatcaatttaactgaaagtacaagatttatacatggacaaaaatgcaaattttgctctagttcacaagaaatacttcaatgatcaacagtaatgctgtttttgaatgaaaaaaaacatttaaaagtggcaattatattaattaaatataatacatttaaaaatctgtttaatgaaattatatatgttggctctaaatccatgggaaaaaaatgatgagaaagccaaaacaaacgaacaaaaccacaataagaaagaataaagagtagaactgagctcataggttatctgtagtggaaaactcagaaaatccagagtgaaatccaagttcaagaatggactttcagaaaaaaaacccagacatagattcttgcataaacaatgagttttatataaaaagcatggcctttcaaattagtgaaaaaaggctacactattcaaaaaatgatatgaattcaattgtacatgtttagggaaaaaaagtatcttgtcatatgtatacattaattagatatttcctattcatctcaacgaaagggcaatggcaccccactccagtactcctgcctggaaaatcccatggacggggtagcctggtgggctgcagtccatggggtcacgaagagtcaaacatgactgagcgacttcactttcacttttgactctcatgcactgtagaaggaaatggcaacccactccagtgttcttgcctggagaatcccagggatgggggagactggtgggctgccgtctatggggtcgcacagagtcggacacgactgaagtgacttagcagcagcagcagcattcatctcaacaggaaacaaaacaatagagcaaaaattatatgattctttcattttactgttttctacatttttacattttatattggagagaacaaatgtttgactagtgactagtagtacaactagtcactcttcagaattctctagctgcaatatataacagttcatttttatttcatctaatgaagacaagaaaaggatgtaggagtatataaaaaagtctttgactttctacctctgtataagaaaaagatgcttcatagtatttattcatttgcatgggtgtctctgagtgaatttcaatgcaaaattaatgagtgttgaattatctgtcaggtacagaggatcatactgattattttatataaccaaaaactatcagactaaagctgaaaatactataattatatatacctctctactgaagactattcaaaacttattttgcattttaatcaattacacagttgaaggaagtctttcattgttctttcacaacatttttttaacttaaagacatttttattatttgaataaatgtgaagactgactcatatgaatgggtctctggattatagtctgtcatttcctagcctaataaggatctcaatacatttgctacttaaatttttctaaaataatttttctaattatatactgtggccagtccaattattgaatcactctttttttataataaaaaagggtaattgttccattgaatcattttgaatataaatcaaataaataaatatcaaataaataaaaataccctctctctgctaagccacttcagttgtgtctgactctgtgcgaccccatagacagcagcccaccaggctcccccatccctgggattctccaggcaagaacactggagtgggttgccctttctttctccaatggatgaaggtgaaaagtgaaagtgaagccgctcagtcatgtccaactcttagcgacccggtggactgcagcctgtcaggctcctcccatgggattttccaggcaag

SEQ ID NO: 41080 - DNA, 945 bp, Bovine  19866881223674
  misc_feature (1)..(1): n is a, c, g, or t
nattaccagatttgcttctgtaaaaactaccactctagatgcaagacagaaaatatgtggactgaaaggtaaccaaatgtaagtgattaggatgctttcacaagcaagagataatggcagctcagactagagtagcggcaatggggataaaaagaaatgaagaaatccgcggactaagaggtaaaactgacttgtagtatgttgcagacactattttgacattatgaacaacacaacagagtaacttcccttaaggattctagtttggagaaaatgtgatacactgatacacatataaaatataacaccctaatagatatttataagcagagaaaagacaaataacaaaaggtaaagaacaccaggagttagtgagccactcctttagataggatgctcaagtaagagcttctttgaggagatactgttaaaatgagaagtaaataaaggataagatagagtcactggaagtttgagaggcaggacattccaggaagaaggaaaagcaaatgcagaggtcctctgatagaacttgtcttggtttattcaaagaatagcaggcaggccagtgtagctggagcatagcacagaagaaggttgaatgaaatgtagtagaattcactgtgataggaaacacaggaggataatgagtttggaacagaaggcaatggatgcaattttagacatgttgagtttaaggcacctttgaaacatctaaaaagagattttaagtaggcacaatatgtatatgcaaaactggagctaagagaagtctgagatcaaaataccaatttcatagtccttgtcatacagatggtacattaaactgtggatgtgaattatatagcctagagagaatacacagaaaacagaaaggagcaaaggatagagtcatgaggcattttagtatttaattgccagatagaggaaaatagccgtaaagaa

SEQ ID NO: 41081 - DNA, 1162 bp, Bovine  19866881237263
  misc_feature (1)..(1): n is a, c, g, or t
ncactgaaggtctgactgagtaacagagaaggccgtgtgaagggagacaaaacagaagcataagcacagtgaggacaggaaaacagtactctaagctgagtacttgtggcttccaagtacctgtttccaagtctttccagaagccctgcagaatttccactcttgagtttcaaaagaagactctacatgatgataacaaagaccctcttatctgtttaactctctctaattagcttctgttacttgccaacatgtttttgtgtgccagagaatgaactagaaacagtactaatatgacactggataattgtataaccttagtaactctcagttttttatctctgaaatgaaaatgaaataattctggatgtttacataccagataatcatttgaccttaataactctcatttttttatcttcgaaatgagaatgaaataattatggatatttaattgagaacaatgactgcagtaaataatgctagaaatcctcaaatatcacacaaaaatcttttttagtattaaaagtgctgtcctttatgtaatgttgccacttgaaactatcccaaagcaaattgattgcttatccattcttaataacaagtagttgcttcagtcacctttgatgtgtagtttagtggggttagaagagtagtatatttcaaacaattaaagatttcctttgtgagatataaacttgttcaacagggagaacattaatttcactattatcccacttttactataaaaatcagttattctgcacatctttctgcaaaaggcagtcttaaaatgtggtttatttttaatggtatatatatacatatatgtatgtatatacacagacacacacacacacacacacacagccacagttttaccagtaatatttctgactcttctgctttccagttttcattgccttggacatgttatttaacccatgcaatgccatcatcaatctgcttcctttgtcctaacggggaaaaaatcagactacttgttgaaagaagaattcaataaaatgatctgtgaaagtactctgtaagtgataaaggaccgtaaaaacataaggagctagtatttccaattaaatgtatagaattcataatctgaggaatggaagcagctttcttctcgcctaccctttctctacaagat

SEQ ID NO: 41082 - DNA, 653 bp, Bovine  19866881251606
  misc_feature (1)..(1): n is a, c, g, or t
ntttaagtttgaattctgaaaataaaatacataaattgaaagtgtaaactcagaggtgcatcctgtttccaaacacaagaattaaaaaatcaaaatgacagacttctgttaatctgcttaggaaggcataaattgttaatcaggctccaggcaacattgtttaataccaagtttaataaaaatctgcctggaggaagaagaggtctggtggccaattttgaaagctgggcagctctgtttacatgcttagtctctctagctctgaggacaccattgatagggtttcctttgaaattggcttcttttaacagagtcaaaattattaaacactatagcatgggatagaaaacttgaattttttcattggtgtgaatacacttgaaaaggaaataaattggaggagtatttatttaagagaatcttttgcagtttgtatgagaagaatttcacagtaagcatttattgagccttcactatatgcttacatttgctagtgatgccttcatcttaaaactgtgatcttgagatgaaagaagtgatattttaaaatcattttctcctttctctccagcctgtatttgttcattccacaaggcatcttgtaattgtatcatgtgggctttctctgtgcaggggactcaagaaaattttcc

SEQ ID NO: 41083 - DNA, 783 bp, Bovine  19866881276743
  misc_feature (1)..(1): n is a, c, g, or t
ncaccatatgcataactttgaaaaaaagaaacacatgtgtaaactccttgaacatactttaagtgaatggtactacttactgatggccttctgcttccaatttgagaggtaatttcatgggaaagaatgttgtcctgtaactctcctttcagacaggacatctgacagtgtcatccagcttccttcatgtctttcatgtattaagcctgtatctaatatgtgatgatttaacaagagctgaaggcaatggcaccccactccagcactcttgcctgggaaatcccatggatggagaagcctggtaggctgcagtccatggggtcactaagagtcggacacgattgagcgacttcactttcacttttcactttcatgcattggagaaggcaatggcaccccactccagtattcttgcctggagaatcccaggggcgggtgagcctggtgggctgccgtctatgggattgcagagttggacatgactgaactgacttagcagcaactatgatttaattgtcatgagcacagcacatctgaatctcaaaacattaaatcgtagtgtttgtttcaacattccatgtcctgctatattaaggaaatgtttctggtgaaataaattaattaacagtcagtcacgagggccctgtcattcggagtcttgtgccaacatgcaccatacaaacatgattaataaaataacaccctggagtaaaaagaggtcaatcactgcatcatggcattaaaaatgagactatggcatgtcaacaactttaattgagttaa

SEQ ID NO: 41084 - DNA, 1511 bp, Bovine  19866881388080
  misc_feature (1)..(1): n is a, c, g, or t
ncaataactcagtcttacatcccatgattcctttcagtaatttaatattattagtttaatatttacatgaatctaacagaagcccaaagtttttctagtaatcgctctctcctttttattgatagagtagaatataagtacattagtataatcccaaagaaaccaaagattgaattcatgtttttaataagaattaattttgaaaatgttaagctaaagtatcaaagaagttttcaagaatggatttgtattagtaatttttccatatttacgatttataaacatggaaacataataaaaaggaatgacaagaaataagcattaaataagaaaatacacataaaacccagaattagaattttttcagaagttcagccaaaaatagcctagagatgatcaacagaaccaatttttctcaaatacttgagtcaacattccctattttaaattcatgtgcaggtatggtatgctgaaagaagggacaagtgaatgcaattctggcatttacaattggaaaacaggagacctgagacagaaagggagtgcaaatgacaaaaattaaaatgaaataaaagtaattttcaggaaaaaagtcaagaaaccatgtaagaaggaacattaagggaaagcataagtggaagaaaggggaaatttccattagaggtgactatcaactgggaaatctcataaagaaagcagagaataacaacaacaaaatttaagctaatttgaactgctggttttactgccatcagctgaagaagttaaaagttttcattctcattataacaacatgaaaaaatgaacaaataaaacaccatgtatacctgtggcagattcattttgatatttggcaaaactaatacaattatgtaaagtttaaaaataaaataaaattttaaaaaaagaaaaaataaatgaatcagaatgtggcctgaatttagaacaagaaattccatctttaagtactaagacaatgtgtatttaagtgtacacatcccatattgggatttttttaaaaccatttcacattgcttcaaatgttttcactgagtaagtaaatccctgacttagtctaaggtagaattattttattttacacttcagaagtacttatattttagtttacctagagacacacaagtgctgaaatgactcagaatttgtaacagaactaggtgagcctttgcttctaagacagtaatcttcaaacttgaatccagtccagtgtagctgtggggcgtattatccttcagagtctctgcatcatggtgcaggactagagatggtgcatttataactagtttccaggtgctgatgatgctgctggttcatggaccacagtgagaaccatacttcttaagttgtctcgctcatcatctcatcctattccaatcctccatcacttctcagttgggcaactgcagtgacctcctaagttgttttattgcttctagttgtttaattaatttttattggcatacagttgccttacagtgttgtgttagttt

SEQ ID NO: 41085 - DNA, 1704 bp, Bovine  19866881457780
  misc_feature (1)..(1): n is a, c, g, or t
ntgcttctcttaggtccataccatttctctccttttctgtatacaaatctttcagtgtcttgccatcaaatatcacccggacctaggagatccaaaaaactctttgagagtcaaataactgtctagtgaagcgaagagagcagatggtttaccactcttatttactctaagcaacttctttactttaaatatggctgtattctggaactaatgatactttagatggagttaccaagtaaaatgttaaatgattacatcatactacataaagaaaggatgagtattggggaaaaaaaataaagtaaaacatacacttattttttctttttaattaatgtaaaagataattttatgaagtaagaatagtaacaaaatcattgtttatagtatatataaaagctaaacaatgtcatacaaggaaggaactatgagtattctttcataaggaacctatactacatgtgtgattcacttttaaagcttttgtaaacacaggttaagatatttgttgttgttatttagttgctaagtcatgtctgactattttgcaaccccaaggactagcccaccaggctcctctgtctgtaggatttctcagacgagaatactggagctggttatcatttccttctccagggatcttcccaacccagggatcaaacccacatcttctgcattagcaggaggattccttgccactgaaccatcagggaagcccaaaatactatataatccataccaagtatagattgatatataaaaattacaaacccacaaattgcatcttcttaattaaaagatgaatacaagagctcctgtcttcagtgttcacatgaatccaaattatttgtctttaaaatcatcattttacagatgcatttgtgtgactaaaatcttactatattatatcccacatgaatattatgattatttcttacactgaatttataaaagtttatctttctacttttcataaaattttattaacatacagccattagctatggcaatgtatagagaataagcagtccaaaagtagtacctgcctgagaggaaattttcatcaaactgcagccttttaacctagagatatgtatttgagaacattttgtaatatattaccagtaaaagtcatgcatctatagtgttaataagtgctacattttataataaattgtgcagaaagcatgagtaaagagatgaaaaactaaatggcaatgtgttcttagaaaaatttatgatatatgtatatatgtatatattaatcacagaaaaataaacatcaaagataaagtgccatcaccattttaattaccatacatatgtttgtaatcactggaatttctgaagtgaatgaggaatggattatttttaaaagacacttcaaagaacacatgagattttataaattcattaaaattatttaaaattcagtgaaagttttaatccctttccagataaaagttgtattatactgcaaaatgtagcagtataatagagcagtatgtaaaaataatataattcacaaacttaaaatgaaaatttcatcattgattctctaaacatattcaaagttttttaataatttgactgaatctgaggtattgaataagaaaaatcaattactgttcataggcacatcttataaatgcatagcattcacatagcagagagtccacacaaccttatttaagttatgttgca

SEQ ID NO: 41086 - DNA, 720 bp, Bovine  19866881501211
  misc_feature (1)..(1): n is a, c, g, or t
nattctccttacgcttgattcctcttctctgatgaactgtcctagggacccttctctccttccctctgagatttccagagtttaaactctgcctttgagtacttgcttgttgtcatggtagcctcactaattttacttatatttttccccatattttcccacaacctttgaatatatgtgccaaaggctatttctgacttaatgttgtaggcatgaaaatatttcttttcttggtctcttgaaaaatgttaaatggttttctcagcgtcattgattgagactgtttgtttatttccagggctgaaagttaaggccattctattttcatagaactatttatttaaaacaagcctgaaatcaaagacacctcatagagtatgcacggaatgctgtttaacccaagtgatcccaaagtaaataatttattggattactcaatagattgagaaatgaagtgaggatctgggtatacatcatctgccttttattttttaattactcactaaataaatgcatgtgctatgtgagtttagaagaaaacagggtattattgaaaagaagatatcatccttgtagtgatcttaggtggtcctaagaaagaacaggtcctgtccataccgttgtagcagagcaggcctgctatccatggttgtatggaggcagtcacatttgcatgtaacacctagattttcaaaacaacaacaacaacaacaacaaaaa

SEQ ID NO: 41087 - DNA, 988 bp, Bovine  19866881521956
  misc_feature (1)..(1): n is a, c, g, or t
nctcattctctcaggaccttaggggatcttttgctacactgctcaaatcccctctcggctcccctacatttgttaaactgaggcccagcgattacagttaagcctagcactgcatgctgctctaatgctgatcattaactgcctgtccagatggccccggctctcactgacagacagtaagtctaaattgttcatctccagtgtttcttgtagactgcccaatatgtttactgtggtccgttttcaggagggtgacattaagcagatctgatgctagcattctggcactagtcctgaggagcaaagtggcagatctaggcaggactgtggaagactcagtaaatgagaaagttgcatccgaaagcaccggtgttcccgtgtagccgactattttagtcatctgtcaaacaggtaggaattcaagcttagtgctccattcatgctggcctggagaagattagcagtgcagcaactgacacttcaaactactttcctttaagtcatggaagcaacgagcaagcaacaacaaaaaacatcagtctcacacctaccttaaggtcattctcataaatgtcagtcatgctgagaccggtggcgtttctggagacatgtgtcacgagggactagcagctcactcacatgctgcttaacaattgcattccccttttagaagttttgtgttaatgtctacgtgttctcacacttcttttagttccacctttctgctggctcagctatcaacttattcagtgtttatctttattttctgttcctaagggccataaatgctaataccaaaggtaactttctcatttttctttcttttgaagtatcagacagtaagcacctgaagacgctggatagctagttaagaaggcacagtcatgttctgtgtggcgacatcaaatcgcttagatatcagagtgccagttatgtgcaaggcacttggctccatgatatcatggaggctatcggctatcatggatat

SEQ ID NO: 41088 - DNA, 676 bp, Bovine  19866881597123
  misc_feature (1)..(1): n is a, c, g, or t
ntttaattgaaaacttgcattaactataaatgatgtctgataagctcttacattttcacataaataatgaatttatgtggatttattatgtatgatatacatatattatataaattattatataatttatgtataaattccttctgtatttgtaaatttgtcttctaagttttcatttctgaccaagtttcaccttggtcaatcactcattgattcactgatttttttttttaatttgcatcctctgaacagaccatatgtcttttttagttgatgttttcatttatggtaaaacaattttttggtaaataatcttttctagtctgtcatatgcctttgaaagcttcattaactcttttaggccactagcaaattactacttcagtgcaccaaatgttccccttgtcacctaaaatagtttatgcagcttctaaaacagtctaacttggtcttaaaaaattggttaccaccaagaggcttactgtgaggaagaacagcacaatttaaggcacattattacttgcagtcattcagttgggagctgagagaatttgtgtttggatgcatgaaattatccatatcaatagtcaatatacgtgttctatcaaagaacacaatgccatttacctccaagaaaacagggtatgccaggtgtacatagagaactaaggactga

SEQ ID NO: 41089 - DNA, 717 bp, Bovine  19866881655409
  misc_feature (1)..(1): n is a, c, g, or t
ntagacctgctttaaatgctctttttaatagtgggaaaatgatttttaaaaagtacattttactcactgtagcaagtaaatttctatagacattaagagaacttactactaaacttcaactgctatttttaaattttggaaaggaccaaggaattattttgaatatcaaataaatgaaattcagaaatacccaagaattcagaaaactaaaactaacattttcgttgaagaaatacttcttcacactgctaaagaagtctctgtcataggttttgcaaaactggtatagcacttttaccagtactctgtcaacatagagccagaaagtctagactttggtaaattacagtgtaattaaagtgttatgctttctatggtggtgccttacttgatgcaaagtctccacaggcaagaggcatttaactccatctctcagcctgtttttggcagctaccatgaccatctttaagagtctctcagctgctctggttctcctctttctggtctgatggtagaattgcactgccctggtgaaattgcacatgaccatgtgttttactttgaggaaggaaatgtgactggaggggatgtgtcatttctggtggaagctttagaaggcagagtgccattagctatattctctttccttctgccacagtaatagccacctctctgaatggaagagtctttatcagcttggttcccagaaagagggca

SEQ ID NO: 41090 - DNA, 694 bp, Bovine  19866881712311
  misc_feature (1)..(1): n is a, c, g, or t
ntataatctaattggagggcaggtcaccacaatatttttcttttctctgagttctaatgagaaacatgcttttcatttctaggtaggacccagcttttcctcttttgtgccaacttcagctggtgaagtgctgtcttagctgtaatagcagactcttctccaacaggcacagacttatgttagaaggcgtagcatcctgtcgcttttcacttagcatttgcttcaaatagatggaaaaaaaaaaaaaaagaacgttctagcaattggatgttttgcagtagcaacaaaacctgtgtgagagctggtccttcactgtttggcttctctcttaaagatccagtggtatttcagattccctgtccctcataaccaacatcacaactttgtcttctctttctttaatttatgcataaatagttttgaggaataaaataaaataaatagttttgccacgaggaagaaaatgtcctaccatttggccctatcctgaaatttaaaaaattttaaattgaaacatgtataatatcatatatgaaacgagtagccagtccaggttccatgcacgatactggatgcttggggccggtgcactggaatgacccagagggatggtacagggagggaggagggaaggaagggttcaagatggggaacacgtgtatacctgtggtggattcatgttgatatatggcaa

SEQ ID NO: 41091 - DNA, 820 bp, Bovine  19866881734844
  misc_feature (1)..(1): n is a, c, g, or t
natgattttttgcaggcagtctgaaaaatatgcttcatgcaattatgatatgtgcagatatttcaaagattccaatttacagtcttcaaacttaactttagaaagtttttttaatttattatcagtttaaactaaattaatttggactactagtcttaaaaatagatattttcttgtcctttatatacatctagcctattctaccctcagtgaccttagataaaagattctttccattaaatggaacttggttttaaaaaaaagtattttaaaaactaagttagatgaataatagtaaacttcatcctatcatttttactattgaaacttacagctacagagggttgctccagactattctgcttttagagcgtttcatcaagtttggagggctgtgtagaagttgacatcatagagtggtgtaacgaatccccttcctgatgggtggttgtacaggaagcatctttggaaaagtaaattttgttttattcataagtgaagagtgtgtgatttgcttagtagaaaccataaatcttgaactcactagtaaaagatgcaggtttttatttatgtgatgaatgctgtactgttgtagtctatgcattagtaaacattttttaattgacagtcatctggaggggggaagggaagggtgggacaaattgagagagtagcattgccatatatacactaccatgtgtaaaatagatggttagtgaggagctgctgtacagcacagggagcccaactccgtgctgtgacgacctatagggtgggaggaggaggcgggagggaggctaagaggaagggtttatatgtg

SEQ ID NO: 41092 - DNA, 771 bp, Bovine  19866881761632
  misc_feature (1)..(1): n is a, c, g, or t
ngttatcgacatcactgtgaaaaaatactttagatatttctcactgcatttggtcttgggaaaaaaggcaacttttatattttatgttttcattttaaaaaaatctctcttgctattcccagtaagcgtaatccttaagttgtcacatcactttgcctataggaaagttatgttggttatatttatggtgattaaaagcacttggtaatgtctccaagagtgtgtcattaatttgctaatgatgattctaagtctgtctttatccaaaattggtaaagacaacctattctgtatatgtgcacctacacgtgaatgtcagtgggtgtatatttctaacgttgattacagtccagctagtttaacacttgtttgccatcaccaaacataacacaaaataagaggcatttcctaaaacacacatagtacactcaggtaactacaagaaaaaatacacataaataagacaccgtgtgcttccttgagaagagtattgctatgggaaaacatggtttgtactcttgaaagaacactgacaaaataaacttttgaaatacaaatccttccgaggatggggactgcctgaaggtaagattcttatagcatggtgagagtagaagattattcttaaaccccagagctagttattggttctatttggtgtctaggtcacctgccctgtagttcgctgctctttctagtaaattttgctgcttttgttcctggcttctcacctaccaaatcatatttgacaagtaccacttaaggttacca

SEQ ID NO: 41093 - DNA, 1312 bp, Bovine  19866881842970
  misc_feature (1)..(1): n is a, c, g, or t
nttcccaaaatgccattttcattatagcacttctctgacttaaaactatactggtcacctattggatcaagtttaagattccatatcacctaatggatcaagtttaagattctaagtctccattaactagcctcagattgctcatcccttttttaacttccactaggtctcagacttatgccatctgctttattctttcaacaactcttgccaatttcaactctcttgctttatttatgctgcttttccaagtgagaaagacctgcctacttcttcctgaaaaatccagctctatccagtcattgagctcctgctaaggaagttctcatgaggttgattcttccagtccataaaatattctctgtctcaagttctgcagcaattttatttaggaagcagtgaggaaatatatatatatatatatatatatatatatatatatatatatatatatatatttagttagatgagtgaacattaaacttttggttcatctgtgctttttggcattcttcttatctcaataaatagacaaccaacttcagtacccttcagaattaagcctgagctacatggaatcaataaaggcaaatctttaaacaagactctgtttatttcatgtataagctattctctttatattttttttacactttttaaatttcaatgcctaagtactttcatcacaacaactaatgtataacatacacacaattgcaagatttcatataaaatacattacatctaaaataaacctagtgctcgtgctgtcgcttctgtcatgtccaactgtttgccaccctgtgggctgtaccccgccaggcattgctctccatgaggatttcctggcaagaatactggagtgggcgccattccctcctccaggggatcttccccatccaggaatagaacatgcatctcttgggtctcctgtattgccaggcaggttctttaccacaggcgccacccgggaagcccaaaataaacccagagaaggtctatatcacttagtagaaagcctttacaaacacatgccagcagaaattatgtaaattgtaaagctatagaaagttcatgaaaaaacatactttgtatctagctgctctaattctttaatcacatgtaacatattaaaggaatattttgctcctgactcatgattcaacttcacacttgcagtgtaacactgatatgagggaaacagagggaacaaggataaaagaatgttagtagactacaaaagtgtgttaattaaagaatgtatttatttaaaaataccaagaataatcttcccatataaaaaggacatatg

SEQ ID NO: 41094 - DNA, 881 bp, Bovine  19866881883117
  misc_feature (1)..(1): n is a, c, g, or t
nttctaattgtttcctccaattacagtacaaaggaatacttttgcatcttcctaactgaatcaggaattttaacttatttactttcacagactatgacctaggagtacaaatgctcacctaactaaaagcctagtggaccacttagcagaaagcttttccctctcctagcgcttacttatagaaatccaatagggctttgctcccctagctatcacgagctgctctgagctttcaaaggttgtcttcgtctgtctgataacatctgctccacactctggtcatatggtagcccttaggaaacagttctctaaggcagaagcatatttcataagattcatatgatttacaaacaagaattttaagttctaattagtactttcagggtgattcatgcaaaagaaagatttctgtttgcatgtcaatggaaacctgctgccttagaaacccttgctaaactatatgattaatctttgtacatgaggaaggatttattttttcttattcccagtcctcaggaacagattcaacaactttagtgtcttagacatttaaatatccatgagtcttgcactatgttttaggtttggtatgtggtatgaggagacaaaaactcctagtaagagttccttttctttaactataatatcccaactgtttctctccttgtgtgttcctttcctactttcctctctcttgtctttacctcctgtccctttctccttcctctgcctttccttctgcagtattatatttcttttagaaatatttatggccagtacttgttgtatggtaactttgattttgttagctcttaagctagggtgacttattttcacactgtgtaattattaattaaaaagatttattttaaagttcttta

SEQ ID NO: 41095 - DNA, 1621 bp, Bovine  19866880473676
  misc_feature (1)..(1): n is a, c, g, or t
nttggctttccacttccatttggttatagaatctattttagtgtttcactatatagaattcatctctctctctgtctctctctgcctctgtctctctcacacacacacaatacatgtatagataaacttttcactttttcctgaatatgttctctttatttccattttattgtattttcctgttttgtttcattcgttcaaaatacctctttattttaccctgccaactccttttttagaatctgtttcatccttacttataatccaaacaagtttttttcatgaacatttctcacttgtttccagctggatgttaatgtgagatgaatcagcgtagtgtagttgtcaagaaagcttattggatccattctgcttaagttcatctctcactttggcatttcttacctgtaagaggtagcacaagttgcttaacctcttttccagtttccttatcagtaaaatcaggacagtaaatagtatattctataagaataaaattaaaagaacatgtaaatttcctaacatggtgactggtaggtaacaaatgccccaaagctatatttattaacttctgcaacacaaaactctctctatccaaaacactatttgtggagaaaatatttgaagcctgagactacaaaaagaaaaaataatcacttttatgataatctccaccaaatagaattaataaagagatacaacattccattcagtagcttccagtctcaacataaatattcaccctcttgttcctgacacagagtcacaaagtggtaatttggtatactctgggtgacttagattgggtaaaagtggttttttgtttcattgtttggttggttggtttttgtgtttgtttgttttagctgttttgtcactctgctaaccctgttattagctaatatctcattgcacaaagctttccttcatatttcctgggtataacttctaagcaaatacttaatatatacactcctgacattattcacatggtaagatgtacaataatagaaattaatcagatgtagacaacattattagtacaattagcaacaatcattagtgttatacaaatcccttccagaactaacaccccaaaaggatgtccttttcattatagaggactggaatacgaaagaaggaaatcaagaaacacctggagtaacaggcaaatttggccttggaatacagaatgaggcagggcaaaggcaaacaaagttttgccaagagaatgcactggtcatagcaaacaccctcttccaacaacacaagagaagactttgcacatggacatgaccagatggtcaataccaaaatcagattgattatcttctttgcagccaaagatggagaagctctataccatcagcaaaaacaagactgggagctgactgtggctcagatcatgaacttcttgtcaccaaattcagacttaaattgaataaagtagagaaaaccactagaccattcaggtatgaactaaatcaaatctcttacgactatacagcggaagtgacaaatagattcaagggataagatctgatagcatgcctaaagaacaatgggcagaggtctgtgacattgtacaggaggcaatatcaagatatccccaaaaaaagga

SEQ ID NO: 41096 - DNA, 3316 bp, Bovine  19866880800883
  misc_feature (1)..(1): n is a, c, g, or t
ncgtccggatgtttcttcctcttctttgggggtcatgaatgaatcctgtggccccacggtgaaactcctgtgcttctaacccttcaggtgtgcaccttataaccatgtccagctgatctgggataaaagccttaatctcaccatctctaagtgaagaggattttgaagttgatttgaatctagcttttcattagaatgttaactgattatatactcaaaaagaataatgatactaaagcagaaattcccacatctctatagggtttttgttggtagtggcattaatgccaccctaatgagcagccataaaattaaaaggcgcctactccttggaaggaaagttatgaccaacctagacagcatattaaaaagcagagacatcactttgtcaacaaaggtccatctagtcaaggctatggtttttccagtggtcatgtatggatgtgagagttggactataaagagggctgagcgctgaagaattgatgcttttgaactgtggtgttggagaagactcttgagagtcccttggactacaaggagatccaaccagtccatcctaaaggggatcagtcctgggtgttcattggaagggatgatgttgaagctacaactccaatactttggccacctgatgtgaagagctgactcactggaaaagaccctgagtctgggaaagattgagggcagaaggagaaggggacgacagaggatgagatggttggatggcatcaccgactcaatggacatgggtttgggtggactccgggagttggtgatggacagggaggcctggcatgctgtgtggttcatggggtcacaaagagttggacatgactgagcgactgaactgaaatgaactgaatgaatggttgccctttgaggctgttttcatccattattgaaatcttgaaatgctgacttgcttcataggattctaatgatcaccaagcaaattatgtaattaacagggaaaaaattctccagttgtatggaccattcatattttaccaccatgatcctttttttttaaatttatttattttttaatttgaaggttcaagagagaggggacatacatacacctatggctgattcacgttgatgtttgaccactgtgattctcaatgggaacttttcataataggctggtgttcaacccggagacatggattttggtttatattttttcaattctgggccacttaatctttaagaaacaaggtgggtgggtgatggggaaaaatgaaattccccttcaatatttggttatggggagtggcaataaaaaagctaacatgagctctggaatggcactggggcctgcccttcaatatcccatggccttggattcctgggaaggtgggcaatggctttgtgagactgagcaaacagctgccagcctcagatagccgcaaatttatagcttttgaatgcaataacattaacacactactgccgaaatatttatgttggctttttaaatatcccagaggaaatccatccagaagcctatgaaccatgtatattctccttccttagaaatttccatgaaaaaaaaatgataaattacatttacactgaggacccctccctgctcctgagtaaattccacacatataaatcaggcatcattttcctaacttctcttcctcaaaggcacttgaaatttacagggtagaaaaataaaggcttcctttcatcctcagagcagagacagaccagagctccctgaagtctctctgccaggacaaccactctcagtccctgccgctctccccctcatcgcttctctgtgtgataagagcatttatgaggggggaaggcagccaaaaaggtcacagctggtgtgataatgtcaccttccttatcagtagcttctccagaatgacagaaccttgacttgcacagtcaggttaagggaagcaggagtgaaaatctcagggttgatccatgctaaaggtgaagcagaaggtagcttatctctttggtaatgccctttggtttctgcacttttggtaatgccctttggtttctgcactttaaggacacatagggagacgcctgccccaggtgagccccaaggcttcctccgtggtaaaaatggtttatagtttggaggtacaaggatcagcagcaccaaataattcatggggcaaataatctactcctagattggcgagaaaatgtcctgtctaaatatctaagacataggttggctctcaaagtactttgcatttaattacatctattacagaaatttcccgagctctcggaataaagtaatcgatattaagtgtgataactctaacatctaacaaatattaggcatacagcttttctcatagctaagcagttagtgggtttcccttgtggctcagctggtaaagaatctacctgcaatgtgggagacctgggtttgaccccagggttgggaagattcccctggagaagggaaaggctacccactccagtattctggcctggagaattccatggactgtatcgtccatggggttgccaagagtcacacacaactgagcgactttcacttcacttcacttcaagcagttagtatttccttaaaaacatagattgcaggacctcgtgctggctggggaattggcacttttaacaagcgcttcagataatttttatgattagtcaagtttgggaaaaactgaacttctttatgtctaggttaaagtggtattcaactgcatgcatccttaggccctaaaagaatcagtgctcctcaaacagcaaatacccaaataaacaaatcaagatggataattcgatccactttgatagacagtgtgattaattgtgatccaggaaggctaaagaatcttgctgagacatggctagggagacagccccaatatcatgattttcaatctaagtgctctttttgttgaaaattaatgatttaatgggttaaaaaaaaaaaaaaaacaaacctgcacagttcttaaagaacttgtacacattagcatctcccaagattcaaaggcctcagtacttcgcagtatagccagctcccccttccctggtgggtactcacgctggtggaggcaactgcttcctgcacactctccataatgaattccttggtgatccggcgagagggcagctcgttgaagagggagttgattagggccactttagctgcatcccgtctggcctcagctctacttaagcagcacttaagaagggaaggagaaaaggagtcgttaaagaatctggcatctcatcattttgccccaactcaatgggtctctggacatttatttctatttatacatttactgtc

SEQ ID NO: 41097 - DNA, 962 bp, Bovine  19866880810059
  misc_feature (1)..(1): n is a, c, g, or t
nttttcagtaaagatacatttggcagagtttaaatactaatagtgtcagaggaaaatttttcaaaatggaaaaaaaggaagaggctttttgatcacttaatggcaacatctgtcttaatacatttatttcttaatatataaataagatttaacaaatcaaaaagaatattgattgacaccaaatcctgtgatcaagtctgttgcttctccatggtctgcagtctcatctcaccataggcttttttttttaacagttaagatttgttagcctgagctcaactttaacaacctctgaaactcatgtgttaagttacagcccataataggatacagctgcacaagggtgagtttctaagttacgatttttctgtttaaatgatacggttttactgattatgtgctacagattgatttaagaaatgtaagacaactttagaagcctttcataaaagaatcttctttattgaatacatttcatattgacattttaaccccaaaggctcttattccctttcttccatgttcaaatgctcacatcagtttaatctgtcaaggtagtttttaaaactcctattttaaaagaaaaaggggggaaaaagaatcctactgaaagtttaataatgataaaacaggcaattattacagtccctgtcgttttctacattctctttctggtgtccttggaatcctgtttgcactatggtttcgctttgtttttcccttcctctgcgatgataatcagttgatccctattttgatccatcccattacacagctgtgggaacccatcatttagtcaccactcctttggcacttacgggctgcatagtgtagtttccgtttttctcacagggctctgccccatgagttatggttttgctggcatgttttttccacatctcagttgcgactcccaggagggcaaagccatacgttgcacttctgtgtagccaccagaggcg

SEQ ID NO: 41098 - DNA, 646 bp, Bovine  19866880855997
  misc_feature (1)..(1): n is a, c, g, or t
ntctttggttccgggctctatgctttccctgaaacagttgacagttttgcttttggtattaaataacataggattagtctgcctaagggaccatctgttgttccatgcctgccatgacaattctgggtcctttagaattgcagcttgtggtttcttattaaggggagcagaagagcattctctatcaagagtctaagcctcagaaatgttgtccattctgaatgaatcaacatataactatgacatgtgtcaagtaagacaggatgtttttctttcattttatgtaaataaacttgaggttttaacagatgggaatgtaagtttgtttgtttgttgttctttcattaggctgtgctttataatgtggatatattattaaatgcttcaaggcagtttctcagttttgttttataagttactgctgatatttctgataaagctacaagtaaaaatgaagtcctacttgttatatgctaactagtttcaagcaaatcagcaatacttatatccttttaaagctataaaagaaaaaggctgtcttcaacttcaaaaatcctttaacagagttttaaaaagctcgaaagtataataagtgcatacaataaggacgttacaaataagcaaaacaaattcatactgattcagt

SEQ ID NO: 41099 - DNA, 1667 bp, Bovine  19866880881123
  misc_feature (1)..(1): n is a, c, g, or t
nggcagaatcgatttatatactgtggtaatcttatttctcacattacttgaccatctaaacaagcccaattgtgaaatatgacagaacattttcctttatgtgtttgtattccatgatgcaattgagcataatcaaattaaggttgagtattttttctcctgttctgtcaattccatgtcatcctgtctctcaattctccctttctggacaccttctagagaatttaatctgttcctgctattttatggttacctaaaaagcaccctgatactcagaggtccttctactcccagagtaacgtgtcttcgaattattatttataagccatagcattattaatctcttgtagatgtttactgcatattagctaatgggtaataaagataatataaccataacattcattagtccccaaactttttcttctgagtcactagtctgtttttgtcttcaactttcccagttgactagaggttctagtgaacatagctgatgggaactataactagacagactgaaaagtagaaattggtccccaaactgcaggcctgtatcttttccttgtttcgtatgtgtatctgtcacagtatgggggaaccttgggtttattctaaccgtaggaactgggtgcccttgacagcttatagtccttgttagttcctctgcttttagttttagtttttcagatactgacaactgatttatttttcttttgagtaacatccttttctctttcatgtaaggataagagtgttataacaaatagcagagatgttgtcattggctaataaggaaaaagatgagcaacaaagtctgtataaaaaaaatgattcttgcttttgcaggtattttgacagagatgtgaaatgcattagagatttcttcatgaaacgtttcaactatgaaagtgagcttttcccaacctttagtgatataaggtttgtacactgtattggataaaatgatagaattctgttaaaatacctgatttatttacttagaagttaatgctttaatctaaaagtttttcaaatagtgacctgtggtacattataatcattgttcagtatcactgctggtaatatacaaatgaaacttaaaaactatgcttccctgtggtccattaaccttactgaatttggaagaggaacatagtttcttataaattcaagaactcttattcaatagtggatgctctgtgaagaacgcgtttttaaggaatatagtcaagtgtttatcagaaatgtgtttttcctttattcactatagaaactatctttaattgattcatggaacataattctcacagccaaattttctcattttatatgctcaattaagatgctgttttctgatttgggatgattgacctaacttaaaattgttagccccctctgaaagttaatttattaagtcagtatgcactgaaatttctctaatttttctaatatctgttgctcttcgcagtccttttattcttaaatgacaagtaacatatgtcttttatatttgtgtacttaagtgatttaagtattaccttttagccagagaaaaacctttaaaatctataaactgttaaactcatttgagagtcatgattcatccgaatactaaatacacttgcccatgtcaggggatttttttctctctcctaaatgcgtaacat

SEQ ID NO: 41100 - DNA, 1953 bp, Bovine  19866880928161
  misc_feature (1)..(1): n is a, c, g, or t
nccatgcaacatgaaaatggcacaaattctgctagtggcataaacttataggttcttaaaaaatatttttaaaaagtaaccagggaatgacgaaatattcatagggatttttgttacagtgttatatgtaaaagtgaacatttggaagcaatatgaaagtccagtgctggaggactagttaaatcaattatagaatacccaattaaggaaatactgcatatttgttcaaaataatgtgtttatacatatgtgtatgtatatatacacatgaaaagatattcataatgtactgctaagtaataaaagcatattgcaaaataaataattgtaatgtgaccacatacttggtatacatgaacagatcacagaattaatgttaatgtatacacatgtacacacaaccaatagcattagtagcttatattgccattctctaaatttttctataagtgtatattttgctgataaaaaaaacatcaaaaaagctgtatagatgtttttggaagatctgtattgacaagaaaatgtttatgatataatgcataaaaaagaatacaaagttatacacacacaatgatagcaagttgatagaaaaaaatattttgacatagagaaaggctgttaggaaatatactaaaatattcacaatggcgatctctaggtaattttttccttaagatttataagaatcctatgtcaagcatatattatctttagcatacaaaagctattttaaggctttttatctgtattgttctacctatccccctagctgaattggttcataaactcaaagctggtaagacaattgattttttgttttttgtttcccctttccacatcctccactgctatcattgtgaaaaagcttgcagctaattgatttcccacttcgtctttgcgtgtctccaaagcccacagtcttatcttcaccccagcccttgttaccacttgtttctctgtctcctctgtttcaccctgggatggttgttataaaatatgatttattatcctgaaatatgagcactaatcacaacagagaaaacacgatgcaggcagaagtagaaaagtctggactttaataatgcaaagtcgaacactgatataccaaagggatttctatgtagaaaggatattatccaagaaaaaaggcaaagatgccgtctttgactttctgatgggagggggtggggaacaggagccataattattaagacctggcaggagggagatacagttctgagtcacaaaactagattaggtcctcaaggaaatctgtaaaattaagtctataaaagctggcccagctggttaattagcacactgtacagcagattatgttttatagtttgatttttatattctaagctacaacctaataagtcaagccaattaccttacctgtgacttgacttctttctcttatgagctcactaccaatcgctaaacttgcatttatttacaattagggccacctttgttatacgcgtagctcctcaaacctctgtgcgaaaaagcatcagcagacaaggaaatgcttctagaatggctaacccacaaatgctacgctcagaactccactagtgccagccaaaggaaatgattcatttattaaggttgtaattacagctatgaaacagcttgtcatgggttctttctgctggcctgagctactttctaacatctgctagtatgagcgagaaaggcactgacttattcgtttcactatccttcgactggaaaaatgttatatttcagagggtttaggatatttgttcagaataaacaagagatcaaatgttggggggagggcaagatttgaccagtatgagaacttgaacaggactatactttaagatcttgtgacatattttgattaagaccaaaaaatgcatgccattctagaacaggctccattgcccacgagtttcaagctgatgatgatggtggtgg

SEQ ID NO: 41101 - DNA, 851 bp, Bovine  19866881048393
  misc_feature (1)..(1): n is a, c, g, or t
ncagctaaaatagtttatagagagaaataactttaaaacttgtattcaaataaaaacatttaaaaacagtggtctaaatttttacttttaaaagctagagaaataaaaagaaattaaaccctaaggatgtaaaagaaaataagaaagacaagagcatgaataagtgaaacagaaagcaaacagaattaacaaagtccatctaaaaatttcattgcatgttctgcacattcagactatcagaatgaattgctcctcatgtggtatattgtgaggttacatatacccagaattacaggaatgatttattcatactacttttgaaagataacattgtattaaaaaatgataatgatttcagttatagtttactgaatccctacaatgggcagatatatttgaacacatttattgttaatagaaatactgtaaagcatatatattttcattttccaaatgaggaagccacattttggagacctgaagtagttttctcaaagttacccaataagtgatagaaataagattcaaaatagacacctttggtccccaaaccagcaccactttttctataaagctaagttatattatctattgatctggtttgtctgtctctttttatcacaattctttttatagttcttttctcatatgatatcttagactctcttggacattttatttccagtctatagttcagttctttttttcagtttattattttttggtgatatcactgaagttaaatatacttaatatgaactactttggaaatatctacagaatttcattattggacagttaatggttactttcatatctccataccttcaaaatgtcaaaacctaccttga

SEQ ID NO: 41102 - DNA, 808 bp, Bovine  19866881131281
  misc_feature (1)..(1): n is a, c, g, or t
natgattttttttaaatgcagtgggttagtctgccaaatataaggaaggcaaaaaatttttttttaatttttaaattctgtccaagtactatgaaaggctgtactcaaccaccttttagtaatacttttttttttttaattgccttacgatgggctgcatgtcttctgtgtggtctgcgtagtaaggtatttaagaatgtgaaataataatttgactcatattgtggaaatgcttcataaattcttgtaaaggaggctgggtgccggatgagagacagaggtagaggaagacatgacagcaggaaaaatccgaactccctcctcccagtagggatgctggcaacccacagggagggccatgaagtacatccctcttccttcctccagccccagcttgcctgctggtttcctacacattcctccgtggcctgggttaaatgcttcaacttgtttctgctcataatgggaattgaccacaggcctgggctgtctgcagtcaacacagcaattcagtccccctggtgggtaatagatgtgtgtttgtatctagctacggatgactatacagtctaaaaacaagcctggtgtctcctgactgccctcaggctttccaggggggcctttaaggaggcagagctcggaagaaacctgatcggcttctgcttaccttcacttcagggcgggaggctggggtgcctgcttaaggtagccttgcctctctccgtagagaaactgcctcatgtttgcaggggtggggatggtggcagctctagccactgggtcttgtcaaggtcagattcaaggcaga

SEQ ID NO: 41103 - DNA, 1179 bp, Bovine  19866881194176
  misc_feature (1)..(1): n is a, c, g, or t
naaatatacttcaaggatcatgacacatttccttccagtattgcacactatttcatcatgcttcctaatttcacatctattgcatcttgatacataattaaaactttcattttaattcccttcagtttaaatatctcatcacacacacatacaaacacacaaaggataactgtgaatagagagaagattacaattcactaggttgaaggaacactattggagaatgctgaatttaggtacaattttaatattgataggaagttttttgaagagtgtataattctaggatgaactgaaaaaatcccagctatatttaataatattaatgttcctatataatctattatgcctatttaagaacatttaatgaataacatttatactggctgagtaacataagcatattaggttttacagtgaacataacagaaggctaagctctattcttgggtctatttaataaatattgacttcttgcttaggcatttgacaagatttattgacatggcaatttcatattttctgagaaggattaaaattttattaggtcccaaaactagaaggcaatgtcaatactggtcttggttacatgcatttatcatgaaattcattcaaacagcagattccataaaacttttagccctgtttcttttcatagaaagaagagagacagccccattcaagcatctcttttcaaaccagaaataagcaaaggatgtccaagtctggatgcaataccgaatctaataacagggccctgaaggaaccagacctctcgaaacagcaagggcaagaaaggggaaggacaacagcagtgcagtcactgctctgccaagtgagaacaggggcccatcactctggcccactgtcacgggtgttgcagaggaaaacactaaactgatttatacccatgaacatcctctctgagctcacatgcagttgtcatctaagggggataaggaacatattagaatattttgtttgtctttaatctcctacttcacatagaaaaagaaggaaaaaaatctaaggagtacttgaaatgttatatcaaacaataatcaacaagtagattaccagcagaaaataaaagcccacaggtgagagtacctgaaaagaacggagccacctggggctttgatttatttgcctatttgcctgggatgatatacacaaaga

SEQ ID NO: 41104 - DNA, 927 bp, Bovine  19866881343169
  misc_feature (1)..(1): n is a, c, g, or t
nattaagagctctgttagcaataggttgtttctcaaactgggccacatgggatacaaggacgatgccaggagggttactgaagtcacagaataaactcaatacctctttctgggttgtcgacattatgtgaagattgcaggatgaggaaaggagtggagtggcattcgttgtcttctttaaggaaacagacatatacaataaaatgcaaaatttaagaggagtcttacaataaaacatttgtcaatattgtccctcctgtaacaccacggagactgcttcatatcagaacctaaacagcgttcctatccatttctttttatgtctgcaaagcattcggtgagtaggcctgagggtatagcaaggagggcaacacaagtttgccttcctcagccactggggttatcttggtaaaaggcacagtggtgggagccagatagattatggatttggttgggaacaaaagattctcactttcccaaagcagcacagtgctgtgacagagtggaaatctggaagggggcagagagaagtggagaggagccataagaggggtgagttcccctggcctggacccaggaccctgggcatgcagacatggggtcagtatgtggctcagctggtgtccatgtcagattctaattaatggaaacacatggttctgcccttaccaaggtctctgtctgttcttgggcttccctgatggctcagacagtatctgcctgcagtgtgggagacccgagtttgatccctgggtcaggaacatcccctggagaagggaatggcaaccctctcctgtgttcttgcccggagaattccatggacagaggaatggtgggctacggtccatagggtcacaaagagtcagatacaactgagcgactaacaaagtgtgttcttgtggtgcttactgtgtagtaatacataca

SEQ ID NO: 41105 - DNA, 982 bp, Bovine  19866881343457
  misc_feature (1)..(1): n is a, c, g, or t
naggatccttaaagtttaaacttcattatttaaaccataaattcacccctattttggacataagttgtcaaatggctttgaaatatatatacattttattgaaatataataatgactacacatagcttcttactatgattgtggtttttaactaagatattcccttcaagtccttcaaacaaacttcttcttgccttaagaattcaattccagattcaagtttttcacactaaatcatttccatttccattccatgggaacctttaaagcgtaatatattccgatcactgacgtcataccatgctaaggtttccaattctcatcctgaaaggaaaagcaaatgtggagctttttacttctccttttcttaaaagtatgatagatctttcaaacaaaaaagcctctgaatcacaaatctttataattactgcagaaaaggcactttttatatattgtgttatattccaataatggtaccaatggaaataggtaaggaaatgtgtctaagtttaatttttctctaaacatcaatttcctgaaatatcttagttatgcaatgagcttaaaggtaagttcatcaactgtagttcttacacagaataaaatattacacacaaatttcttcagaggtcttgaatacattgttatcatcagtataattttagatttattttatgtttatattattaaattttatataattttatttttattcagtaacaatagctaccaacattcccttcaaataactcacctctttgtttttaattttaagagaaaattatacatatatttaattaaggcaaaaaatatgaaatttaattatcactgaaaatgtcatttaaaattctaatttttcagttttaatggaagactaaaatacccatccatgcccagatgtctatcaaaggtacatttctcattccttctaataggtagtcaccaaaaatacgtaaaaaacatttttagaaagggaaaacag

SEQ ID NO: 41106 - DNA, 1756 bp, Bovine  19866881537455
  misc_feature (1)..(1): n is a, c, g, or t
ncagattctcataggttacctttttagaaaaatctttggaggttgaagacaggttttaataaaggcttacccttccttctagttagcattaatggtgcctttgatttcaccctatgaatatgcgtccctttttattgatgaagggatacgaagttgactatggaaacaaaagtgatctgtttgaaaacaatctagcttttaggaaataaatctatgactttccagaagtttagaaaatgtgtgttaatatttgtgctcatttgcagtgtagccatagagtcacagatgttggatctaaaagagagcgtctggcacacacccctaattttttagatgaggattccaagtcccaagaagatgagtgactttctcaaagttacacaggtcacaaaaatcaaatcccagatcatagtaataccaaatgcagtgttccttccaccactgtacacatctagagtactactggaatttaatcccattgaaaagtccattattgattgaaatcccagcgttaatcatttctaatttttctacttttagattatcagtcttctccgagaattctgtactttttgttgttcttgttcttgttcttccaatgggaatgtttccaattcagttatcacactgaaaatattatgcattcatttatacttcatgtccaatcaatatattaatagtttttcatctacaagccatctagtttctcttaaattataaactagatggcagagacatggaagattttgtattacagcacatgtaaagtacacctgtgtcttaacgtgaagtgtgatttctttcaattgattttctttataatatctttgcactctgaggcagcccttgtggaatatacatattcctgtggggatttactaagtgacagtccttataataggaattactattctagtctcattccttctgtttccttttattaagcccacgtcttctaccaactagctgaagaaactgatcacatggaaaacattgtatatagtctttaaaggactgcattcagttaatcgtatggtacaacatgatgatggaatctggaaattggaaagcaacctcttgtgcctaccctggaaaaatactttaaataaaagtaaagaagtcctaaataatccttcaactaacgtaggttacagccactgaaatcagttcttttatatctggtgtaaaaccttattactgcagtggaattctatgacatgtctcctgtgaaaagactatttaatattgttgtgagcagtgtaggacctcaatagaaaagcatctttgttttcttcacatgttttcataaccacctatattctttgaaacatatacttttacttctccggaaatttttagtataaaaagttatcatgaagagaagtgaatgatatcagaattcattaaaatcaatcttgagaatgatttgcctcgaaggataaagagggaaacaaatgttcccaggcaaagccaaaagacagactatgaaattttacttgccactgcccatcaaaagtgactataatttgggtggatgaaaaaattaaacactttgctcccaaagagatgctcctgaattcaaactgaaagcatgatctagagcctggctacatccacaatctttatagtgctttttctttaccaaagaagagtttagattatatggattctaagctggaaattcctttgctactaaggaaactttcttgagaaatcatctcccgattctatttacccgaagacagcacatcagaag

SEQ ID NO: 41107 - DNA, 1024 bp, Bovine  19866881803347
  misc_feature (1)..(1): n is a, c, g, or t
ntgtttcttttatctattggacatgtgtagcaaattatttctctggtgtctgtccatataatagttatattttaatacacgggcttctgttttatttacattatagatcttcattcatcaattctttattcatttttaatcattccttcatttattcaatagtaattatgaataatgaagtggatctctacctttaagaggttcagtgttagtagaaaagatacatatgtaaatttagagttacattgcatttggataagtgctatgatagatttatgcccagagagctttggaatcttaaatgtgagacacctaacaaagccaggtttcagaggattgtcagtaaagactctccagggaaagcttcactggagggtgtcttgaaaaaataagttaggtacatgataaggagaagggggttatgacaaggagaaggggggtattttaatatgcataaaggcaggaagcaacatgtcatgttcaggaaactgcttgcagcatgccaatggggttatggtgggaaatatgatcacaggtcagattatatagaccctggtacatgtgaactcttgtctttgatgcgctggtcagccattgaaggactttaagctggcagatcatgatgagaattgtaatcttaaaaggtcattctagagtcagtcagttagattggaggagagatttaaagtaggaaattattatagtaatcaaaattggatatcataattccccaaatcagatcaacagcaggaaggaaaatgaggaggggacagatttgaaacttatttggaagcagaactaacaagacataatgacaaattggatttatgagataaagggtcttagaatgacgtagaactgtttagcaaggtggacagtaatttcaagatgagatatacagaaggaggaatatacaatagctttttttggtaaagcagttgggttgtaccataaaataacagtgaaatcatcaacaaataagagggaaagaatgttgcattttaaaagaacggaaaattttcct

SEQ ID NO: 41108 - DNA, 1998 bp, Bovine  19866880449930
  misc_feature (1)..(1): n is a, c, g, or t
ntgaaaagtgcctagcatagcactttgtaccaagcagactttcaaaaatacttgtttccttcgtatgtgatgtgggtaaagtgccatacaggcccattaatgctgggtgagacctaaataaggtttctcagttggcacagcaaaacggcttctcctctctgattccctcgcaggccatcaccctattccaagacgactttagctctgcctcttctgtgttatcctagcatttatgtgacctagcctctgctagaacacttaccatactcactgtactcagctctatataactgtgaccttcttgagggcagggccttgttcttcacacctctccaggctccacacttcagtaattatctgaatgaatgaatggtctcaggcctcttctctgttccccagcttttcatgttgagaaatatgcttacttattttgagcatgggttttgaaatctgaccatccagaacttgaacccagggtcaactaattactatttaggtgactttaggcaatttcttatctgctccacacctccactcccttgtatgtaatgtgaggttaataatatctaaatttcagagaggtttgtggaattcagttagataatgtatgacatgtggttaaaaaatattggtcatttattaagtgcttcatcagttggaacttacttttagttggcatactaatgtatacttagctgtgaatggtaaatgagttctcaatttgctcttagtcctagggtatctataaagctcaccttgggtctcataaattaaacacatttgccttagtctttacaaataaatcagaaatactgaaattataggtacttagagtattttggaactcagtgaccttggagaaacatcaccccatgaatgtcatcaacgtttcttgaggctgccaatagcattaatatacccaccaacaaatatttccagagtccctaccacaccagtgtaggtggagctgagaggaggggacagatggacaccaagctgagggcagcatgatttgcaccttcaagaaggcttaagggaaaataaaagaccaacgcagatagtcatttcacaattcagaaatactctgcactccctgctctgagctcccatagtgccaggacatacatttctcacgatgtactctgcatataagttaaataagcagggtgacaatatacagccttgacgtactccttttcctatttggaaccagtctgttgtcccatgtccagttctaactgttgcttcctgacctgcatacagatttctcaagaggtgggtcaggtgatctggtattcccatctctttcagaattttccacagtttattgtgatcctttagatattatggttgtaaaattctggaggagttattcaagctgaacctttagcagtgttttttctgagaccctacttggctggtgacctaaatacatgtttggtgcctcccagcccaaagcacagggtccaggcctgatgcttctactttagtgtccaggagagggcatgttccctctccatggaggtttgttgaatgaatgcttaactgtgtgtttcccagtctcattgggttgctagataaaatgcaagatgcctaataaaacttgaatttcagataaatgatgactttttagtacaagtatgtcccatgtaatatttaaatgacatcctgtgtttttgttagctaaatctggcaactctgccctataggttaggaattcacagaaaggaaactgagtgtggcttgtagccaaagaagggactaacctggaagagatagaagttgagcagactcaggagggaagcataaatattcatggcaccccctggagttctacaaccccacgaccctgagagatggagagcattcccaggtggtactagtggtaaaaattcctcttgccaactcaagattcacaagagacacgggttcaatccctgggtcgggaagatcccctggagaaaggaaaggtaacccactccagtattcttgcctgga

SEQ ID NO: 41109 - DNA, 1811 bp, Bovine  19866880495466
  misc_feature (1)..(1): n is a, c, g, or t
ntgtattggttatttaagattttctccttatattggtttgaagcaatttaattttgatgggccttgatgtagtactttgtgttcattgagcttcttagatctgtgagtttatagttttcatcaaatttggaaaatttgggggtattattcaaatatcctccccatgtcttcaagtcaattaatcttttcttctgcagtatctgatttgcttgttaattactctccagtgatttctttttcatcttgtacatatttttcatttctaaaagttttatatgggtcttttttttttcttccatgtccctatttaacacgcccaagctttcctctggccccttgaacagacagtactgttttaatgtgcttatctactaattccgtcacctgtgtcattttgacattttcattgatttctctcattttgttatattttcctgcttctttgcatgcttggtaagttcttttaatgtttatttttatttatttggctgtgctgggtcttcagtgcggcacgagagatcttctagtttgaagcatgcaggatctttggttgtgtcttgcaaacgcttggttgcagcacgtgcgatctagtttgaacccagcccccctgcactgagggcgcagattcctatccattgaaccaccagggacacttgcttgataagttttgattggatatcagggactgtgagtcttgcctggttaactgctggatatttttctatttgtgtgaatattcttgagctttgctctaggatgcccgttgttgcatgggaaatagattgagtctttcgagtctcgcttcaagctttgttgagggggaccaggacagcatctggtctagggctctctctacctaacaggctttcccaggactgaggcaagcctctcttgagtattcctctcagtaccccagaagtaagaggttttccagtcatgttggtgggaacaggaactattctcaattctattatgagctctgaggattgttccttttgatcatttcaagtggttctctcctggccttgagtaatttcttcacaagcatatgccagtcattactcaagggagctctcacggggagctcggcaagtctccagctcactttctctgtgcagccctcttttctggtaccctgccctatgaagtctaaccaccttggcctccctggacttgcagctccatctcctcaattcagagagaacgctgggggccgcctgggtccccctccctggacgatccccacacgggagacaatcttacagatcaccacctgtttcctctctttcaagcattatggtctttctttccttgggcttttggttgtttttttttttacctttctaatcactgacctatttatttattttttgaactctttattgttggagtatagccaattaacaatgttgtgaaagtatcaggtggacggcaaagggactcaaccatacatatacatgtagccattctcccccagactcccctcccatccaggctggcacataacattgagcagagttccctactacagtaggaggtccttgttggttatccattttaaatagagcagtgtgtattagtcgaaggcatcattgtctttcattatctcatgcccaatgtcttggcaatctagtttttaaaccgtttcctgtgagagggagaccaggccctgggtctcagtcttgaccagaactgggaggtactgctgccctgattcgtcggcactttttcccatcacacgtaacagcagctgaacacgaaatacttaaccccgggtaaagacaataaaccttgtaggaataattctgcct

SEQ ID NO: 41110 - DNA, 695 bp, Bovine  19866880561652
  misc_feature (1)..(1): n is a, c, g, or t
ntgctctggtgagaagaggttgatggtcatgacctttcggaaacacgaagtcatttatctgagagaaaaaaaagcaaatgactttgttcccaggttgtcgtggaatatttgttgcccaggatgcacagagatataaggagaggattatcctctcatgtgaggatagattttccccatctgtaagatttcttccttctctaccatcatttacatccccaccttccctcttcaaactagttgccaatctctctagaaagaagaaatttggccttcttgctgaatgtctttggtcagttcaggatctagaagaccctgttgttccatttgctctccatcttgggtgtggcaaacagtgatgactgcaagccaatgtgcgactgaggatgcaggaatgctcttggcctcgtgggcaggcgagatgcttattagtgccacgtttccaatgcgctgcacagtgaaagcaggggcaatctcctgctagagctgaggttgcgatattgaaaatgatggtgagccctgctgacagtattcccacaggagagtctgagctggatgagggtgaagggggacgttgtctaccacagtctccctggaaacacaaagtcagtcaccactttgtctcagtctaaagccccatggttcacattcccttctccctgcagccctttccttgagggtaacctcagtttggtccc

SEQ ID NO: 41111 - DNA, 2091 bp, Bovine  19866880609822
  misc_feature (1)..(1): n is a, c, g, or t
ntaccttctgggtgatttgaaggattttccgtagacattttgattacgtgtagtttcattttgggcttccctggtgtctcagtcggtaaagaatctgcctgcaattcaggagactggggtttgatccctgggttgggaaaatcgcctggaggagggcatggcaacccactccagtgttcttgcctggagaatcccatggacggcggagcctggtgggctacagtccacagggttgcaaagagtcggacacaactgagcgactaggtagcaacagcagtttcattttatgtggctggtttcagtcactgctctgtacggaagatatcgcactgtgtgtgaaagtctcatgcgttctgacttcctctgtcaccagagctgagaagccactaaccgcgtctggtcttatgctgcagagtccatgcgggcggagaagcaacaaggctgcagcctccggaggaagcaagagcctcacagttagtgactgattctgacgatgcagatcccctgcttcaacatccctttgctcacataatggactcgtgggctcagaacccctgcagcgcagggtctgtcagccggcttgccttgtcgggtcccacaccaggccttctacagtcagcctgacgccctggtgacccctcctctccactcagcacaggacggacccaggctctccctcttacaatgtgatgggcagccagacaactgtgggctctggtgcaaggaagacccatagactctgggctggtgaggggggcaacaggcagagggtggcagagagaactagggtgaggagatctggggtgagccactaaggcagtcggcagctgcccctgccttccttgcctgtgccttgcaccgcccagcctctctcactgagctggcccactccatcctatctcctgcatgcaagcaaggctttaggggccctggcttcacactgactcctggggggctccaaggcctgcagagaagagacagtctaactgttgaatgattcacttcagagttttcatcacttgtgacctctggtcacccaaaaggcaaacttctaagcattcagacggtctcagcaagtttatgtgtccctttcgtacaggtcagctctttttactgggttctgtgtaaagtgcccactctgagccaaaaccttccttttctgatggtttcttagtgttacaggcaccacttttcagcagtgggcacgagtttttcctactatgtatcacttgagccatgaaaataatcacaatggttttcaaattttcagcacatactttttttttagtgtgacttgagacccccatgccgaagaggtgtaagcctagttagctctgggcttcttctctctgtgccccacgccccactctcggccacaggcgctcctaaaacccaagggccctgggaacaaacatagggtgcacagttcaaggcggcagcttgtttcatccttatctcaggcaaacatcaaggagcacctgttaacattacagatgtactctagcctgccctgagctctgggaatgctctggaaacatagcaaagtgagagacgcgtccctgacacaaaggaaaggcaggaagataagatgccagaagccatcaaccctgcccagtccaagggggtcacaagtacacttaaggctaggggctcagagatgggtggagaggccaggtgagacttgggcagggcttctgtagatttacataagaagagacagtaaaacctgaaaggtgagtgtggtgggtacagcctgacaagagaagcgtgggcaaggttggaaaagtctgtgcggcgtccaggggaagagttagctgatgaatttgttttgagaacagggtgttcagaatgggaaaatgggaaggagccagaattcgaatggaaggctaggaaaattcaactcatttcagaggccatgaaaagacttgaatgattcaatttaggggaaaaaaaattaggacaaaggaaaacaagataagaacaagaatcagacactgcacgctgctgagatgcgctgtctgacaccgtctgcaggaaaagagaggggtgagcaaaggggagacgttgatgacacatttccccactgctgac

SEQ ID NO: 41112 - DNA, 2460 bp, Bovine  19866880623078
  misc_feature (1)..(1): n is a, c, g, or t
nattattattatataagttctacctaagatatccggcattagatcctggaagttggggacacttggcattttgaatttcaaatccacttggtcattgctaatatataggaaatctattgacttctgcatgttaaccatatattttgcaatctgactattgttgcttattagtttcaggaagggcttttttattgagtcttttgggttttctacatagataatcatgctatctggaaataaaacctgttttatttcttcttcctctatttgtatacctgtttaccttttcttgtcttattggtgagctagaacttccagtgtgatgttgaaaaggagtcataagtggcgctatccttgaccctttccttgtcttagtaggaaagctttgcatttcttaccattaagtatgatgttagtgtaggttttttgtaggtttaattaaatattataggttttaattaggcttaattaattttgtaggttttattaggtttaattaggtcctatttctttatttatgtttttattttcatcactatgggagatagattgaaaaagatattgctgctattgtcagagagtgttctgcctatgtctttctctgagagttttatagtatctgatctttaatctattttgtgtttatttttgtgtgtgctgttaaagagttttctaattccatttttttaacatatagttgttcagttttcctggcaccacttattgaagagaatgtctttcctccattgtatagccttgcctcctttgtcatagattcatttaaccataggtgcatggcttcaaatctgtgccttctatccagttccattgatcagtatctctgattttgtgccagtaccatactgttttgatgactagttttgtagtatggtctgaagtcagggagctggattcctcttcttctagctctatttttttttctttttcaaggttgctttggctatttagggtctttgtgtctccacagattttttaagatttttttttgttctagttctgtgaaaaatgtcattggtaatttgatagggatttcattgaacctgcaggttgcttctggtagtatagtcatttttcacaatattgatccatccaatccaagaacatggtccatatttccatttgtttgtgttgtctttgatttctttcattagcatcttatcggagaagacaatggcaccccactccagtactcttggctggaaaatccatggatggaggagcctggtaggctgcagtctatggggtcgcaaagagtcagacacgactgagcaacttcactttcacttttctctttcatgcattggagaaggaaatgacaacccactccagtgttcttgcctggagaatcccagggacgggagagcctggtgggctgccgtctatggggtcgcacagagtcggacacgactgaagtgacttagcagcagcagcagcagcagtgttaatatctgtatgcagtcatgggtatgcacacacacacacacacacactcattctcacaggttgtatcttcctcagcactattttgtagcccactttttcacttaataatgtattgtgataatctttccctaccaatatgtgttcatcaacaacatagtttctgatagctgcatattcttccactatggataggccatgatgtatgtaaccagtcccatattcttagatacttaagacgaaacagctaaaaggttttagtgcccagatctgagggacatgcatatggtagagccccaccacacatggagcctgcaagtgtgttcctcacaaaagccatctcttcctctgcggccctgctcatactactgtgcagccagtacactgtcagcataggttggtgagttaactgtgggttggcacgagaaagaactggtgcccccgagaggttccagcttcctgtcttcagtctgagacctcagaggacctttgtgtggtcactggtctttctggaggaatcaggatgaccatattttgtttcttgatccaccagcatcttaggacctcagctttgatggaaagaaggtccatcaaaccccattggtttccccatgttttgaaaactattattattggggagaatgatggtaaatgaccaagtggggcaagatgaaggctctggaggactagccttgcacaaggagttttgtcaaaagcttttgctaattagttccacatgtgcaagctctgcattagtttaaagcaggagtcctgggatttcccttgcggtccatggctaagaccctgtgctcccaatgcagggggcccgggttcagtccctgaaccgggaactctatcccacatgccacaactgaagatcttgtatgctgcatctaagacctggagcagccaaatgaataaatattttaaaaacaaataaaaatagaggagtccttctcctaccagaaccagagcccccttttattaacaagtattttt

SEQ ID NO: 41113 - DNA, 1952 bp, Bovine  19866880653282
  misc_feature (1)..(1): n is a, c, g, or t
natcatcagtgcaagttcaatgcatgaagcagggcactcaaagctggtgccctgggacaacccagagggatggggtggggagggaggtgggaggggggttcaggatggggggacacggtggcccccatggctgattcatgcctatgtatggccaaaaccacaatattgtaaagtaagtagcccccaattaaaataaatacatttttaaaaagtcacccccccaaaaaacaaaagaacacaggacattgacctgtcaagtttcccagtctggatttcattaactgtgcactcacattctggagaaggcaatggcaccccactccagtactcttgcctggaaaatcccacggatggaggagccttgtgggctgcagtccatggggttgctgagggtcagacacgactgagcgacttcactttcacttttcactttcatgtattggagaaggagatggcaacccactccagtgttcttgcctggagaatcacagggatgggggagcctggtgggctgccgtctgtggggtcatacacagtcagacacaactgaagtgacttagcagcagcagcatcagcactcacattcagctctgtcccagtatttcctgtaaacaggcaactggatccagatttgtattgttcattttctgccccaagcctggaattagctatttcttcaagaaaagctaggtttctttcatcacaaatgatatgctaagaccataatctggataatgagagcagagacctatcaaagttgttttcaccagacagtgcctggcatgaagaagctgctaagacagcatgtgttaaatgcttatgtatttagaagtaggagagtgcttattctacatcatcatcatttatcttccatttatctatctatctcccttcccaggttactcagtggtaaaagacctgcctgcctgtgcagaagatgtgggtttgatccctggattgggaagaccctccagagaaggacatgcaacccactccagtattcttgcctgggaaatcctatggacagaggagtccggtgggctacagtccatggggtcaaaaaagaatcagacatagcttaacatgcttgcatctatctacctaattatttatccatgtgtatatatattatggcagtgctggccctgtacaacacttacatggatctgatctgaatgttctgctgccactccttcattgattttcctttacagtcattatatcatttaatcttcacaaacaacctcaaggtgtttacaactaaccttatttcacagatgaggaaactaaggctcagagtggtgaagtgcctcattcagatctcacagctaataagagcagagctcaaccacaaactcaaatctgatagactccaaagcctgcctgctttccacggttccttcatgagcatttgcccctgaaatattttgtatgttcatttgaaaatttaatctcaatttaaatttgttataaatgagtgattgaataagcctaaattcatggggccgagtacaggcagtcaagctttgcactcggcccatgaaagaatctttccttccttattttatttttagttcccattgtgacatattttggccagatatggcagagggatatttttagtattctggaataaacctgaaggtatattttcactcttggcttgtaaggctcatttttattcatatgtttacagatataaaaataagtgaatgatatctttaagtcattcatgtctcaattctcatgtatgcactatttatgagttctctttttatttgagtctaaataatagttataagaggttctttttgctttgtgaccccatagccaaagcctcactgtccccttatatttgtgatggtaatggaaccttttgagaaggttgtttgatggaaagggtgtgtgacccttctaatagaagcagaccacattacaaagctgatacaaag

SEQ ID NO: 41114 - DNA, 898 bp, Bovine  19866880693282
  misc_feature (1)..(1): n is a, c, g, or t
nggtaaggaagaggtttatttaatcacataaagaaaatatgaaaacttcacagctttttatgaacacagaaaaaaaatatttatactggcatttgaaaaacaaaattgaaccagaaaacaaacttcctccgtaggccaaatatagtgactgtagacacaaacgctagtctcgaaccctgaactagaacagctgcagaagcaagaaaaccattaaaggaaaagatgcaaaacgaatcacaagatcaaaagagctattttctggtcaatgagatgtttgggccatggcagtgtcatgctgggctcacctaacaaagataagggctttggcaactggtctatgatttacctgcttcccacagaagcagaacagggcttcaaggagaccccccatgacctgtcagggaaggtaaaaaaagcagaaacatcttgcctgaatcacaaattcaatttttttgcattcaagggcttctcaacttaacatctgctcatgaatgcgaaagagtggcagcccttatggaggtcacctggcaaggcaggcagaccagcttggagcagggcatccagacatacggtggcttattaggagccaagacatttcaggaaggtgaccgaggataagacacagagtcccggggaagaaccatccttgccatcggttgcaatgcccccaaagtgaaggctgacctccaggaaacagtataaaaggccactaagagaatagcatgccattcattcatttctttctgaaacagagagggcgtacaagtgtacctgtccatacaatgccctagctttgtacacaaacctggacatgagcttcctagggagttttatgtcacatttccattctgtttggggggcagtggtctctgtcacataggagatgctcaacaaatat

SEQ ID NO: 41115 - DNA, 1470 bp, Bovine  19866880743374
  misc_feature (1)..(1): n is a, c, g, or t
nacccacagaaatccaacttactgtggatccaggaccatgttaccaaccaagatttggtcatccccacggccgagtaaaatctggaaaggattatagcccatcaatttactgcagagtcaccctttcctggagaggaccttacctctagaataggccacagaaggttaacctgtattcaaattgctgtcaaacgcctaaaaccctgtaaagccaatgaagttgccatttcacagacagaggtgggccacatgctcaccctgccctggcatcctctgcactgcagcatcattgggtttgtgcattcctggggcatcagtggtctctcatactcatatctatatccttagagcttagaaaagtatatgatgtggaataggtgtcccataaatagttgttgaacagttgagtggacttaaaatccaaatgccatgtcaaggctgcaggatgaacttggttttccttgacttgtaacagcagaccctttctggaaaggaactgggaggtggggtaggcaagacagggagtccagttgaacccaagagagtcaaagcccccagcagaggaaaaggacatgtcaaagagaagccacagtgaaggggaactttgctaatttgccactattgtctagggctgggttttggtgaatgagacaaagcaatatttagaagtagtcatcagaagttttttttcttctcccacccctgcaaaagcttaggctttcacatagggaaaatccaccactttgtgacatcacctcttctcaagtccaacttgctaacaggtaaagttgagtgaaaactaatatcaagggtggccttgaacttccacctttagacccaaggctataagaattattagatagaagtattccagggaaggctggctgtcatacccaagggaaatattagacaaagaggaagagaagggtgtgtggagaggggccagagtcactttataaacctatactagcatctttcagcccagcaacaagtggttttcctcccttttcacctacttccttggagcccaagttagtttgccactggctttgatatctggggaactgaaaaatttaactgaagtaactaacttgattgttttgcagtccgctatgaaattgataatgacctcatggaattcaatattttaaaaaacagctttaaagctgacaaggaggtaaagcgaaaagagatcagaaatggatttctcaagctgcgcagcattctccaggagaaagagaaaaccatcatggagcagatagagaatctggaggtatccaggcagaaggaaattgaaaagtatgtgtacgtcactaccatgaaggtgaacgaaatggatggcctgattgcctactccaaggaggcgctgaaggagacaggccaagtggcattcctgcagtcagccaagatcctggggaccagatcgaggatggcatccagagcacttacaggcccgacccacagctccgg

SEQ ID NO: 41116 - DNA, 1160 bp, Bovine  19866880804077
  misc_feature (1)..(1): n is a, c, g, or t
ngaagaaaggaagtattagccaaagtggcttgctacagttgagggcgcttagaggacagtctactaatgcattcccctcctggagttcccctcctggagtgatacagtcaatctgaatttgcagtcagcagaagaaagggttttaggcaaaggttcaggaaagatattacaagtaatgaccaacataaatcacttaaagagggaggtataaattacttccccgtttcgatgcagtgattgtgagtatttcttttacagtaactactaccagataattcctctgtgatgttattgctggaagtcagtgagtacatcagctcaagaatgaatgtgagctatttctgcaaaatacaaaagagtggcaattctattatgaatgacaatcattcgtgggctcatgatgcactatttccattacatttatcctatgaatgtattgagtaaaactaggccactgctttcaagtccaagatagtagaattcacaaccatttatgatatttaagtattttaaaattttactggtaagtaataataatttccatagattctgagaggcccttaaaagaaataattacagaatataatatattggtacctacaaccttaattaaagaatttccaaaggcttcagaggagcctggaaaatcccatggatggaggagcctggtgggctgcgatctatggggtcgcacagagtcggacacaactgaagtgacttagcagcagcagcatggaggagcctggtaggctgcagtccatggggttgctaggagtcagacacgactgagcaacttcactttcacttttcactttcatgcattggagaaggaaatggcagcccactccagtgttcttgcctggagaatcccagggacgggggagcctggtgggctgccgtctatggggttgcacagagttggacacgactgaagcgacttagcagcagcagcagcagcttttgttaagggcttccctggtggctcagtggtaagcaatccgcccgccagtgcaggagatgtgagttcaatccctgggccaggaagatgccctggagcagaaaatggcaacccactccagtatacttgcctgggaaatcccacgtataggggagcctgacgggctatagtccatgagttgcaaagagtcggatacaactta

SEQ ID NO: 41117 - DNA, 1921 bp, Bovine  19866880856187
  misc_feature (1)..(1): n is a, c, g, or t
nttttattgttttggtattggctgattcttaccaaaattgttgatccctttctagttttatatgtatgtatgtagcattaaaagcacttaagaagaaatggagactatataatcattaaaaaattattaaaggagttattaaaccaaacttttgcttcatttatcttagttgataatagattcaatttgagcatctctttgtgaaacatctgggctatttctgcagtattaatatagtggtttaaaggagtacaatttgagttagctaatgatctgacattatagaaggggaaagaacctgtgagactaaattccaattagtaaacaatgtagtaccacagcatttttgttcctgaaagtactttactaatattagtgtgctgattatatttcaaagcctttctaaaaataatgtacttgacctgctagtatttgatagaaagtattaacagttaagatccttagacatttttgcatgtaagttttcactgaatttaaaggccaattgaataaatgtaggttgatgaaaggtaattctatgaaatttgtgtagcagctaatcttaaatatttcagaagcattatattatgaaaaccctgttttgtatagatgaggcaatcttcataaatttccatcatcaagattgcatttcatgtgctatttttccgtagctctaggaagatagcaagtaaaagatacgcactagcctagaaacatagaagagatcttaatttactacctgaaatgagccaccttaggggaccacccttccacactgatagttaatacatagtactttagttttaaagtataataaagctaccttctaccttcagtttctctcttcagtgtctcaaagtgaaagggaagttctgatttgtaactttttgtatgtttaagtttttgtatgtttttaagtggatgaaaaaatagatctgccctttttaattctttaacagaaaccatatctgtgtgataccattatgttaacagtattaataagtgtatggttacataaagtattcataaggccaaacaataattctttcgtcatatagtcaacttaagatcaaatattggtaaatgctgacgtttatgtagactccattttgaacatagtgatttgtgatgttagttggaccccaagtagctgttgtagagtttgcatgctaaaaagccctagaatacacaaaatttctatgtgtctgcaaaaatgggtttctaaatttagagagtagagggtgcccagagggtattctgaatgtattggaagatgaattacatataatcagattttgttcttaaaaatttttttagttatgagtcagaatttgagactaaattgaaaataaagtataaatgttcatggttgtgaatggatttgtaaaacaaaagtgtaaagcatacatcagtttataggtaaatatttatatgcattttttaaaatatagacttacataaagttttaaaaaaccttgaggttaatagtgtgttcttcatttttaccagagttcattttaaacatgtttgtttaggttttaccgcaatcacagcgaccaaccccatttggcttataaagactcgattacagctcgatgcaaggtatgttaattcattaaagttggcttcaacaaaattttttctataaatttatatcagtgagatttcagtgccaggtatccaaccatgtttttgccctcatttgctgctgaatttgttttatttggttttgaaacttaggtgtaccatcagatgcaaaagtgatgttaattgcaggtatgagaatttctaggaaagaaagtatattatgcattgtgtttttcagtaaaagaagaaaaaggacctcttgatctagcttgagcagtgatactttcattcaccccatgttgattataatcaacccttctaaatacctaaatta

SEQ ID NO: 41118 - DNA, 1070 bp, Bovine  19866880924833
  misc_feature (1)..(1): n is a, c, g, or t
ncctcacaactagaaaaaaatttttaatgcatgaaaatttatagctcaagttgagagtttacaaattcttacattatttccttgaaacactaaaacaaatgaaaataagacagcctttaaataaactgtcctttaaattaaataggcttagtattcaatttctatgaatagaatgcaaaaggcaacttaacgcaagaggttacttggaataaaaattatgtacatgattacgtaaacccttaaggcatatgctatgtgatgtggcaaaatcttgcaggcattatcaacagtggtacatttttgatactaaagtgacaaggttagcatttttttgaatagtaagaaaacaaattttcaaatggctgcctctaagcactttgcaccccaagttcatattttgaagacctctaaaaatgatcctgaagaaaaaccagtctagattattacaagagtgaagggggccaaaggctaccttaacaagtctgcacgggaccattcagtttcaccaaccatgtagctacctataaaaactgcaaagctaaatattattgctcatgaacaggtgcaaagaagctctgaaggtgtaattctcagaaaaaatctaactgcaaacaaatggaagaagtattttcaaattacacaagtgtatagtacaatattctctgaacaatgtaagtctttcaatttaccaaaattcaagaaattcaagttgggaaatagtatcaatgcatagatagaacaagttaatatttgtacacatttgagaaaaaaagtacaaaatggcaattccactgaaaatctttgcaatatgatacaaatacagtaataaattttgatgagatagtctaatgaaagatgttccagtgggaattggttttctgaaaccctaaatttgcaatactcaatatattaacaactatcctcaacttaaaataattgcttacctactttcttggcatcaagtctttcaaaaaagaaagattaacatttctttacaattttctggggttaaaaaaacaaaaacatgaacactgataatccagaaatatattcttaaagaccctaacata

SEQ ID NO: 41119 - DNA, 973 bp, Bovine  19866881029912
  misc_feature (1)..(1): n is a, c, g, or t
nctacctccttcagctcctttgtagattcaattgactactaagttgagaagttctaaccccaaaatgttgaaaatattataaatttttgtagatttagatggaaaatgattactaataggcacaaagaaagcagtgagagttaaacacacacatacactgtcagccactccaaagaaatcttcagctaaaattaactaacaattgttatataatcttcaaaaatacttcataataaacagccttgtgtatgaaagagagagagagagagaatggttagttaatattgaaatattctgaacaggaatccacactccagggagggttgcttaaattctttagatatcattattaaaatctatacagcaggtttgtttaccagctaaagagagataagaaatatttttaagaacccaagaggaaatggacaaagaatgtgaacagacaattcaaaaaggaggaaactcggggggctaaatggcatacaacaatattctcaaacccattaaaaatgatagaaatgcaaattcaaaccaaattcaaacatcacaggcccattggaatggcagaaattagagagctatataactttgagttgatgaagccccaaaacccttgtgcaccactggtggggatataggcccccagcaccatcacccgggactccattcgacaatccccgggaaacatcttggatccacctgataagtagggaggtttgttgcaacatcatttctggtaccagggagctgaggccatctgaagccatgcaagtaaccatggtgggatgtgaagcacggcttagaaagaacagcctggacttagcgtgtggcagatagcagagtgtgttctgtggcctctgtcagaacagaagcattcagaactgaacaggtcctccagcccctagaactgttggccactgatactcttaccctcaaacctctctaacaattctgtcagccagtgcaagcccct

SEQ ID NO: 41120 - DNA, 1218 bp, Bovine  19866881121872
  misc_feature (1)..(1): n is a, c, g, or t
ngtcctttttgctaaggaagaaaataagctggaacgaacactgtcatatcttcttcttgaagaaagctttcaatacagtatgtatctggctcgggatgcattttatagactgttgatttcatagaattgctagcaaacaacaacaacaaaaacaaaccttttaaagctattgtaaagtaaagagtcgtagcatttctagactatttttcagaatcctaactggtgccggcaggcttgtagaagaatgcatgatcagctgtctgtatccgtgctataacctctaaccacaagtcgtgtaaatgtattcagctaaatgtatctgcagtacagaacagcagatagctcctcatcagaatggtatgaaaatgtgaatgaatttgcttaaacttagaagcagaataaaagcagttacagaaagataaattaatgctgagttcctttggatgtctagctgaccatcatgaacaataaaagctgtccttaggacactgacctaaataatgttaagtcttgcaacagcatactgtacttgctcagaatctaggaaatgtaaaatgatttttctcctttttcccccctccaaaagctaaattgtcgagtaacaagccattcacaggaatgccaagaggctttgtgtgtatgtatcatgcaaactgtaagggaagaaatggtgttgagctgacattcgatgtttctttgttttactttgaggcttatcttagctatgctcccacgatgacattgacatcatggaggtcagagctgacactggggtgctatccgttttatgagtgaaatgttttccgaaaattaaatctcatctactcaaacaccgaatttcatgtcttcttcaatatcccctccctaaccccgctgctcaagattgatgggctttactttggctgtatgtaataaatcggaatcaccttccgtagaggctctgatacataatcgtaggaattaaatttttaaagaaaaaaaccttcaagaatccttaggcattccctttcagtctttcatatcaacacacacacacaattgaagctcaaattgcagtgaaatgtttaacatgtggaacaaaaaatgtggaaagagctgcttattcaggattttgaagaaatgcctaataagcaaagactgttttgctacaaaaccagtgtcaccatgttcccaaagaggagaaaacagcatagcctgctagaaaaatttcctccagat

SEQ ID NO: 41121 - DNA, 2434 bp, Bovine  19866881172859
  misc_feature (1)..(1): n is a, c, g, or t
nactgtcctcaggcaggatacattattgttatataatcctaaggaatgtagagaaggaaaaaatgtttgtccttctttctccttgagaattccagacccctctctccttggggacccctagactccttatcaacctgcctaggaaatgattctctcaaaagaatcttcctgacccaaggatagaaactgcgtctcctacattggtaggcagattctttactgctgagccaccaggggagcccatggtctccttacataggtcaaaagtgtatgcatatgactgatgaggctgtagccttgaccatttagtagttttctgagttacttttatagcttgactctgaacttggttggctttgatgacttcagaaagtcctctaagagatccagccctgaggacttcccttggcagtccagtggttaagactctgtgcttctgctgcaggggacatgagttctatgatcctgcaagccatgtcgcacagccaaaaaaattagtaattaaaaaagaagatatccagccctaatccctgaaatctgtgaatgtcaccctaaatggcaaaagggttctgcagttatgattccttttaggatcttaggatgggggagatgatcctggattattcatgtggcccctatatgtagtcacaagtttccgtagaaggtgaagggagggggagacatggctatagacaaagaggagaaggccacgtggcagaagccgaggaggcaggtcagagagtcagagagaaggtactggccttgaagatggaggaggggccacgagccaaggaatgcagtcatagaggctggaaaagacaagagcagagcctctctagagtctcatggcccagccaacacctggagtttggctagtggaatcgttttggacttctcacctctggagctataagcaaatacatatatgtggctttaggccaccacgtttgtggcattttgttacagtgtcacaggaaactaatacatgggctgaggtgggaatttcatccttgggatcctggcccttaaggggcttccactttaggaggtgagatgaaacccgcggggatctttggatactaaatgtgcgccatcgtgtttcccaccacccttagcagtggagtggagcagggctgaggctcaagggcaaaggctttaggttcagagaggccagttcaaggctggtgctgccatctgtcatctgattgactttaagagtgtcatgtgaacccttgaaacccggctgcagaaaatgcagctaagagtgcaggctgctgtcaacatgaaatgaactaagggctgcgatggagtcatggtgagctcagtgcctgatccatttattgtaaatccctcatccctctccccacagacacacaaagtattgatgatctgagtaactggggaggtgattgtgaattagtcaaaaaaatctgaattctaggcttttggttaaaaaaaaaaagaaacccattattttacagatagggaaacaggctcagagaaatttctgactgtatcttcagccctaccagtcaagtgatagtaagatctgtaaataaggtatgatcaaatgctccttcctaccttgtgaatcaccaaatccatgactatactttgattttagttctcctcctgagaagaggagttctcttttcctgagaaggaaaaaagggttgttcttaaatgaacattgcatgggttctgctgacatttgaagtggactcggatttttagtgatgtaatctactgtcgcataagaaataatggcatctaaaatcaggccctgatgaggctgaaaaggacaaatgcttcatttttttttttttgactatagttgagttcctctgtgcagataaaaatccctgaaggatctaaaagtgtgtgcagtgtacatgtgcacacatgaccaagggaggtgcaagtgagaatgggtgtgctgcatctgagtgagctggtgcgagtaccatatcctctgttagcttggactggaagcctcagaaagcaaggtaaggtttgcgtgcaggtagcttattttggcaggtgattccagggagcaggagtggggaactcagagaagtgaaacaaagaaggtgggaaggccagtccaagggtgtgtcatcgagctggtcactactgtgggcagtggcctcaagggcccctgggtggatgtgcctggggctggtccctgtgggcggtgggagagaggattgttggtaaccatgtcaatagccttcacccatctcatctggttcatgctaccaagggcctgactgcttcttcacaggcaggttcacaggcagggacagagcatctgggggcagggaagggagtcacatagctggggaggcaggtgtttacagctggtggctgcagtaacaggggcagaaaaggcaggcaaagggtatgtgagacagggctcaaggcgtgtgcacca

SEQ ID NO: 41122 - DNA, 1025 bp, Bovine  19866881199835
  misc_feature (1)..(1): n is a, c, g, or t
ncccctgaaaatttgtgacattcacattttaggaaaatctgggctatgcctgagggcctggtaaatttccaaccattaaacatggagggaaatgaagaatgattttatagtcttctgtgatgctagggaacaaattaaatgtgatttgaataaatatattcaccattaggtatttgtcctctaagaaaaatacaatttgggactggttatatatgtccaaatatgggctacatattaataattttatgatttaacagtataatttagccagaatacaattattaagttgaaaacagcagctgggtgctcctcgaatctctacccataggggaatagtctgcaaaatattgacattgtatctttaaaacaatttgattctaattgcagagttgataaatgccatctttttatctcaatctagcccctctccttttggggcgtgggatttcatgctgacttgagggggcattaaatacattgcaatgtcacacaggaaatcaaggatttaaagtaatattgtgtttattggtgtaatttcctctttgttcccaaagggtttcccctttaaagcaggtgggacaaggagaagagccagtgactgacgtcggcctgtcctggctgctccctcagcccccatcatcgagaacgtgttctcagtctatggaagcacagaacacacactcatcagttttctcgtttatttgtttattcatattcagcaatgtttactgagttacaaagaaatcctggcagagcttgctagaatttagaacttcctcccacagttcatcactgctgatgaaagaccagtataattgtacttggtgatatttgtgggagagacagagctagaagagagctgctttctgaaggacatggtaggtagaatctgcgtttacaattgtgcctctggagtttccgacttggagatggagacagagtccaagagcagaaagtccagccttgttgtgctgcacacaaaattgtgcctaatgggcagtgaacaccctgccccgggtgaggag

SEQ ID NO: 41123 - DNA, 2562 bp, Bovine  19866881217077
  misc_feature (1)..(1): n is a, c, g, or t
ntgagctcacagccgcttcaggtcctagtgctgactcaccctcgcgcccacagtgtctcacccgaggccccgctgcttgcgtctaccacacacaggagtgggtggaagagtaagtggaagaatggtcgatgtactgacctgtctgcgtgagctctcccatctcacacagctggtgactggagtaaagaggcagcgagtgcaaggggctttcgaaagcggctccaggtccttttgacatgtgattcacaaaagcctccagtttagagtgatacggcttcctaaagaaacaacagagagttggcggtcaacgtgctctgaaaaagtccacaacgatttcacctgcaacaagcagtatcccaagtgagccatgccctttctcacccgcaataatagtacattcccagctcacgattactcgcctgctgacacctacatataaacccccgactcagtaaggccagcctgagcccctgccatctccgagtgcccatcttctcaagccctgtgggggttagtgctgacctcacgcactctgttccccagcccgcaccacttcctgtctccctctccaggaggccactgaccttaccgggcagccaagcctaggttgggggtcgtcctcgatttctccttcccctgcccttgcccatgtgccgtcctgggctgctctgctcctctctcctatccctgcatccctgagtaggttttggctccgttccaaggagcctcatgcgcccattagcctactctggccctgcctgactctgaggcccagggctccccagtgctgttctctggccacacatagcatctgccttctgtaccccacacttgttcttgcacccttccaagactttccacatgctgcctcttcctcctagaaaaggccacccaactttcactggggtaacctttaatccttaacttacatgacctctggaaaatctcttgtgaagaaaattaactgatcaggataacccatatctctacagctcactatgcattttgcacatatggtatctcactgcatgtggggtgataatgaagagtgggaaaaaaacaggttatgtatgagatcttatgaaatttatattatttatatttctgccatgaagtcacacgtggtaaatcaagatttatcagtctaatcacaaatacacaatttccctgaataatgaaattacctatgaatatatacatacattttctctgaataatgagatgatctatgaatatacacacctttcccttgaataatgaaatggcctatgactgtttatacattgtccagctaaacagaggtggacagatagagtagttcccaactaaactaaagcagcatgaaaagaagcaaagataaattgtttaatggcagacccctgctgtctgaaaacctaattaactttggcaatgcttttacaatggctgcaaaaatgggtttattatctttcgaaaacataaagctaaaaaaaaaaaaccattacaaaaatatgttttagagaatgctaattctgacatatagtatatagtctaataaatcaccctgtattgctacaagacattatggctttccataaaaacagaggatgttattttccctgaggctgaaacacatatatatttgcaaactgggaaataaaatgtccagactgataatgaggctgccgaaacgaatccacataaacaaaggctatctatcaacaggagtcagatattctgctccaggccattatttcaggttggtgatgtctgaggatccaagaaagctttgctaccaattttagaaatgaaatttccccactcaaagtgtttgctgggaggtcccaggttttcagggaatctgattgcttaatgatgctttaatatctaactgtattcatggaaacctgtttctgatatggaaaaatgacaattcatggaagaaaaactttacttatggataatataacaaaagactgagtcttttaatcaggaagaggaccaggtaacctgagtccttgggcctgtcctggatctgaatgatcaggtcctgaggcaggagatatatgggccccagactgagtggctgtaatctgtctcctgaagacagatatttcaagataaagataaagcaggagcaagaggaagcggagtcctgcttggataaacgataaagagaccacatatttctctttcttgaggtcagagacccccaaactatgcatgcaaagaacggatccttaggagagggggtgctagaccataatatgttctgtcaacttccctgagacctctgcactggaatctatcctggctaaaagatgcacgtgcacacacgggagggcctttagccagaccaattatggacttaaagccagacaaagcaagatgaccggccagaggaaacccggaagaactgcctccaaaagcacaggactctctctctgagccagcccatgcttcctctgcacatatatgctctcttaataaacattttagttatctcactacttttcatctctttgctgaattctttcttcaaagcagacaagaactagggagcacagcagcctaggttcaaac

SEQ ID NO: 41124 - DNA, 936 bp, Bovine  19866881238578
  misc_feature (1)..(1): n is a, c, g, or t
naggccaagggactgcctgcttccactgggatctgctatgatagagcacaggctgtgatgatgtttacccctctatttgctcaggaccctgaggcctgaggctggcatgtgctccctgatccaggtgaggccagagctatccctgcccattggggctgaggggcttgatgaggacagtcagccatatcctgccccctcaggaggaccttttctcaaaatgtagctgggattccctgggatcactttagttatatcgtgtatggatgacaaaaatcgtaaatctgctagtattctctctgatgggagacattgcctggagcccaatctgggcttcaacttaataatggaggacccaatgacctcagcatctgctttctaatcccaccccacaccaggatgactttctgtgctaattcatattgtccatggtccaaacttttaattctacttttttttttttttgtatttctgaaaggtatgattgcatgatccctcagttcctttgggcaaataaacaacaaagcagcccaccactcaggtaaacagtgaaatatgataattcccttcaggtagacattgaacatgtgcctgcttttatgcatcaaactgattatcctcaggcttcatcaaggaatttcaggagatggcacaaagtctgttgtgtagtcatggtcatgattctccccactgtggccacacgttcaccaggcaccgtctctgtgtcacgtggcaaggaaccactcggcttccaggagtgcactggtgctgggtgcctcccctcacaaagcaccatctgaccgggggctaggctggctcctttcttacctttattccttggcccaggctttccagggaattgatatccagcccttccttgcaggcctgcaggcaggaaatcaccttctgactgtccattttgccagggcgaatggtgag

SEQ ID NO: 41125 - DNA, 450 bp, Bovine  19866881299160
  misc_feature (1)..(1): n is a, c, g, or t
nacctgagaacctggggtgggtcgcctgccccttggcttcggagccaccctccctgctgctgccctgtctccttcacggcctctcctcctccatctacccacatttcacctttgccttgtccttcccctctgcaggtacatggagtacaaactccggagctgacagggctcagcacagtgctctcgccacccctactcagattgcagccggctgcagctgaggtccctgcaaaggactgtgggccacagcttgtggacagtctggttcttaaaagaggggctagaagtttatgtgaaattgcctagtttaaaaacattggtaaataaattttccaaagtgaaaacgttccttgggccaaaaaatacaagccagcaggctgtgggactggagtagcctccatgggctccagggagatcagggaatgctggacacaagtctgcaaacagggg

SEQ ID NO: 41126 - DNA, 1543 bp, Bovine  19866881310080
  misc_feature (1)..(1): n is a, c, g, or t
nttttttgttgttgtggtttttagatttaccaaataagctgattgttaaaaaacagaaaattttgtgatttcagctctgagcatggtaaataataatggtaggaaaatgggatatgacagtctgctctgaatattttcttagatttccactttgacaaggttagcattttttcattaaggcagaattgatcttcttttgggtaagtatttagactctcaaaactgctacagatggcagaattttcagtactcggtactttaaaaacaaaaaaattatggcccattctgatattcctttttcttttttaacttaaaattttcaaaagttagatctcacagtaaatatttctcaaatccttccaatgggattcattttgtacacgtgtttctgatgaggtcactgcttgttgttatgatacagaaaagcctgtgtctattttaggcatttactgtacatttctcccgagaaaagagtgagatcgtgtcatctcatgctccccatccgcaggtcacttcctgtagaaatatggactaacttaaacctcgtgagtactgatctgagcatctcttgcagcctctagttataagaaacacaccctgggaatttataatagctgttgaatagaaggcgggaaatgaatttttatttcctgaatttgtgtgtgcattatctgagtatttcataaaactttaattctgattccttgataatactccttctagaaggaagaatggagtaacttttcagttattgttaataaaagcctggggtctttagcttggccataatagccttgacctccaaagaattccttaatagtatttaagatttacatagctgtaaatggtatcataccatctgacaacttttagaaaatagtagttctctttgtttagtataacatgttttaaaagcctaatacagtgctttccattcttatctgttgatacttggctttctactttcttgcaaaaacattgatcttaatacctaccattactttccaaatatgggataagaatatatgggatcttattttagttttaattagttttttgtgttttttttgttttgttttgtttttaatatatttctcttcaaaggttaggtgggctttgttcttacagaagttaataaaaagtactgcaaatgcaatactacaggtatcactcacttaatgaaatagacattttcagcaagtttattatgtggatttctgttgttctggtttttaattggtttacattatcaaatagaatcttaaatgaaacaaaactttaaaaattacatttaaaaggtttcttaaactttctaataaaatattaaccatattactaatagtatggccagtatattgccattttgcttttattgactggagcaatattgattctttttaacctacaaatagataagtcagttttaatatttaacagggtactcagaatattaatatgaaatagcatattatcaaaatgtcacaaaattttaatgccaaaataaaagtaataggaaatgtctaaatttcaggggaaccattcc

SEQ ID NO: 41127 - DNA, 1188 bp, Bovine  19866881326678
  misc_feature (1)..(1): n is a, c, g, or t
ncgctcacagctgctccttcttcctgggtgtggtgaggggccactcaagggacacaacatgcaccttaggtggctcgctgggggccctggggagcccaggtgaggtgttgtggggtggaggtaaccagtgcagcagagatgggcaggatgaaaggctgccaggaaaggagcttcgaggtggagagaacatggctcaggcagtgggtgatggatttctaggatgttggtaccatctctaaagaaaacggaatgactgggataaccatgccagcactttccagagagcaggaaatgcgatcactgcacagtcctgacccaagaggaccaaggctgtctgaggactgttctctgccaacaccatgaaatcacagatgccccctctcccgaaatgtttctagaagttcttggagatgagaagaggcagggagagggacactgaaaaaaagtgagggcttataaagggaccttatgtactacagaaaaataaagaagtaagactcactgtgtttgtgactctccccaactccttatccattctgaacaaccctgcaagttggcatcttaagggaagtcatttgggattctgcctaaaggagagacaaaagaggttctggacattcttcctccccatccgattaggacacatgttcctaaagggaagcaggtctcaccaaaggccagtgtgctaggtggggtgttgagtgggctatgtcactgcattaaaggaagcatggccaatgcacccaagaaatcagtctttaactgtggaattagagcactgacaatgcccaattattttgctcattaagacgactggtctggactggattgaccattctccaattaactccttggcacttggctataataatgattgaactaactcatttgactcctagggtggctgaaaaagcagatgcgagtaaactcattttacatcattcaaacacactttcctcaccaagaataaaagatttctcctctcccaggagctttggatttctaagcaagtagaatagacttaatgggcaaaggcgatggtctgacaaatgtgagtatttgactcaaatcctggctctgtcatttttttccagagtaacttgggcctgtgcttcttctctcctttatgtgggaagaaagaagaccccctgggtctgagggaccctgccccactcacagctgcccctt

SEQ ID NO: 41128 - DNA, 4970 bp, Bovine  19866881388251
  misc_feature (1)..(1): n is a, c, g, or t
ntaaggtaatatatgtgaaatggtttggacaacttaggaaaatatgtggcaagttagggtgttgatgaaaacaattaccgtctttgtgatcagtattggtgttaggattttgatattgctaataatacctgcaagcatatttatttattgatctttctaaattgacttgaacctgaaatccttagcaccatttcctaactagccaaagcatgtggtgtaaaaatttcaaggacatttggaaaggttaggccccctaggccaggggcctaaccaagaatcttctactcttactcaggtttgactcatggatcactgagatccatgagagaaagtaaagttgagccatctgtctgccaaaaaaggatgcttcctggcactcaatggggctcccagtgcattggccagaagaggctttgaaagcctccatggaagaaggctggaagctccatggaagctctggccctgggtggagtctcccaagctggaatgaagcctatcatctgtccaggagcccctaagcagagtgtagtcagtctgcatggtgctctagggtgaggccacggggattatacacagaggcaacaagcatgagatcaactcaagagcagtaaagatgttgttcacactgaattccctcccatgtccctgttcctatagtctgttatcttcgagtgtagcaagaaattagtatctagtgaaaaggattttctcgttgacccaaattcctgggcattgactataccaaggtactttgcaaaagagaatgtagcttaaaattcaccccagcaccagactcagtctgtcttccaagtcctcttacagcagcaaggccatggctggaccaggctcctaagaggtctctcttccctctcttttcattcctcatgagtcaaattctttttctttacttaaaaaaaaaaattttagcattgtttttcaaataaaaagagccataactagtcactatgcaaaatctggaaaataaagaaaagaagaaaccaacaatctgcagtaatctaacagccaaccaacaattcaatattaacatgttgatgtatttcttgtcagttttttcatatatattcttttcttcttttgaacattattgaaatgctattttatatgcctctttttaaattttatatatgttataaacatttttccaagtcactaaatgatttcaccccacttaacattatgttgtaaacatttttccaagtcactagatgatcttttgaaatttttatttttaatggctgtgtttccattgcatggatatgtcttaatttatccattcttttttatgtacatttttattgcctctagtgttctgctattataaacgtaaaaacattcttataaataaatcttggtggacatctaagggaaaattcctagaattgaatcagtaggtcaaatggcctatttttaaagttcctaatgcgtaagtcagcccctgaaaagtcaccaatgtctatttcaaaatctaagtccccttcagtttctcatgttaaaatgcatgttcctaggccccagtggcatggaaagctctgaggacagggtctaggaatatgtattttaatataccctctcagtccctatgcacattaaggcctgaggattattgataatattgtgttcaatttaataaacactcatttttcagcaatacttactagacagaaaaaagtcaaggaactgtaagctagtacatccaaactagaatttaacttaaaggtgttttttggcttctgaattttagatttctccttaatcgtgatatgatacagttgaaagtttatcagctagggagtttggaaactttactgtaagtataagataactgagccacagaatagttgattcactcacttgtggttgttacgaagagatctagtggcagaggaagaactagaacttgagtgacaaagggcctggatccacccaacctctgagtagcatcactaagtcctagcttgtactgcttactgcgcaacaggacaataaattgagagacaagttgttgggtcaaaaaataccaactttatgcagaaagccagcaaccatcttacccaagttagagttcaggcttcttttatactaaaacaggaacagatttgactggttgttgcaaacatctagatgttggaatcctttgttcttacagccttctacatagatctggtcacaatgttccgataaacctccagcaagacaaatgttatgctctgttatgcaactttttatctctatatgaatggagaagtgttatacttttaaaggtcacagtcttgagaatgggatatcatgaacattttggactactggcagcattctttttcacaaagtgttgagccagcatgcctaagcacaggcaacagagtgcaagggttagagctggaggaatagctccaatatggagtcagatttgttcttctctggtacattagtagagacaaggcactgtgagaagactgactcctaaagtgagcccctggttctaccagagaatgtgtatctgccttctgataggcagggcatatctcaggatacgtgtgggcagcccagaccctgtgagggacaccgtaagagactaccctgtgctctgagcactgagataataacacttagtccgaggaagacatagggcagccatgtggatccaggccgtaagagccaagtaggaggtggggtccagagtcagaagccaagagaacagagcagggacagagcaagatttacactgtgggcaaatgttaggtcacgggagtcatgagtggaaaagccaaagccagagctgaggggcgctgccgtggttcagccttaaggatggagtctcattacccaaattcatggtcaggcgaggtactgcccccgtctccacctacctcattgtatctgaaaggtgctatgtgcttggctgccttctgatgggaggtaagtaagagcacatggccaaatggagcagtgagttagagaaaaggtccccaagaatggaaacctggaaaataagagaacatagtgaataaacaacaaccaaattctaaaattctcaccaccttctaagaggaagtgtgactatccatcccatctgcataactcttctcaaagtcatcagaccaccatctcatcatttggctttcaggttcagcctcaagttcagcttccagagactgttcagcccccaacagtccccagttcatgatcaggttctgtaagacaccatctagattcctccatgcccaagttcacatgcatctcctgtgaatgcatcaggtgaagcacaagagccagaaccaagaggaacccagaggagaaccttcacagcatccatcttccatacagaagcatgagggaatctacctaagatcaccgagcttccctgcttctgtgcagggtctccattatctcttggctgtcctgatgcaggatcactaccctcctgattcttgacctcctggccaaacctgtggaagcagggtcttgatgggtatgggttctgggaaggttcacagcctcccttgaatcaggggtacaacagatggaggatgactttccagacatggctggggctgtttgagtcatccccatggggttggcccttttcaaagcccgattccctggtcatctgaacaccttccttggctgaggcaccttctgctactcagatggaattctacttgctggcaggacctggatccctaggttgcgaagctccctgtggtggtgacacattgcctcacatctaactcccaggaggtagaaatcagaggtccatgccatccagacaaggtgtccacatgctgcaggagagtcttgagcagtcaacagagtagaggggccaagggcaagaagtgttcagtggggcctctgacatctgacaggtgccactggtgatcccgtccttacctgtctgtgctgacttcatgtcccacccaccatcccaccaccccgtgctaataaggtactaactttaggaataaaaagcacttacacagtctctggctaaagcttcaggaagaccccagtccaggcaaagtctgtccccacctcatggctgttatatcatggccttcatattactccacgggagtgaatgtcaccggtatcaagtctgcctgctgggccaagaaatactgccttaaagaaacccaacattcccagatggtgaagtcctactactgatgtcaggagcaactggacaaacctgaggcctcaccctatatcaagagcctcattttccatcatcaaaatgccaaacagcacattgctatgtagacagtatttggaaagctggaacagtgagagaaacctgaagccacaccagtcaagctttggaggccccacaagtgactgccatcttgactggggaccatcaaaatgagccccaatgagtctatcaggatggctaaaattaaaaaaaaaaaaaaaaaaactgatgttaccaaatgctggtgaggatatagagaaaatggatcactcatacattgctggtgggagtataaatggtacaacactctgaaagagtttgatagtttttaataaaggttagcatatatataccatatattcccactcttggatatttacagaagagaaatgataacttaggtttacacaaatgaacctaagtaccttcacaaatggggcttccaggtggcaataatggtcaagaacctgcctgccaattcaggagacatgagacttgggtttgatccctgagtcaggaaggtcccctggaggaggaggcatggcaacccactctagtatttttgtctggagaattccattgacagaggagccatggggtcacaaagaattggacttcactgaatcgacttagcagtcacatgaatattcatagcctttttatttgttctagcttaaaactggatacccgccaaatgcccttcagtgggtgaaggataacaaactgatacattcatatcaggaatactattcagcaataa

SEQ ID NO: 41129 - DNA, 954 bp, Bovine  19866881471232
  misc_feature (1)..(1): n is a, c, g, or t
naccggagaagctctgacttactaattttatatgatatcagagctagagttgttttaatgaaatggctaaacgtgtttgaagaagcatagctgtaaacacacatttaagaaggtaccaccatgccccctgcctgagccttatctgctcttggcagagctcatcactgtcgtccctgcttgtggctctgtccccagcgaccacctcatctctgcctctgctggggactctcctccactgctctggaccttggccttcctagagcgtccagctttgcctcttcctaacgatagcaccccctggtgttggatgaggagggccttctaccctagctcctggtctggctgagtcctacccgctacttaacaaacaaagcagcaggagatagagaaggggctagttctaaaaattagactctgttaaggaaaagacacagaaccccacttacttgtggcttttgggaggggctgaggcaaagaatacgaatggccaaaaaaagtaataaaaaggcagaaatgatgctgaaagttgcagtaatcaatagcatctgttcctcagacagaggggaattggagccacatgtggtcctgagatctggtgtacattttcaggtcattatttttgccagacactaaaattagtacatacctggagcgcatgtcatcacttaataaacttggtctaatttaatacaaattctcttaataaagtctgtgttgaaattattctgcatccctggaggtctctgctgctgagagagaggcacgtgctagcatagtctgccttacattcaagtggaatttccccagggcttcatgaagcttgggtcccccaggttccacaaggaggccaaggtctagtttgggaaaacatataagccatccccacggcccacactgaagagtcacaatgcacctttgtttattcaaagctctcagaaactcaccaagaaacta

SEQ ID NO: 41130 - DNA, 706 bp, Bovine  19866881854252
  misc_feature (1)..(1): n is a, c, g, or t
natcagaaagacctgtcactaaaggacactgatggtggtcccccttcataagttctctctgagttggtaacacagcaagtagagtgaatagattctgaactttcttttgatcctgaatgccctgtgcctgtggaccagctctactgctgtgccaagccaatatgagatggttgggggatgggtgtggggagagttcggcgatagatcatacatactaaggacaaaaagcccaagacatttgaaacatagacattcgcagagcctcgtggaagtcctgtaacagctctagttcttgcctgctatcttcttggccacaaaagatcacagaccagttactatagcaacaactctcctccaaaagtgtccacgttaagatggagatggaaaagattttcttatttaaaaaaagcagaaagaaagaaactaggtttttggatatatctgccatccacctaaagcactgctccctttctgagaagaaaaaagaagctgttattacggcaaacatgcttctaattcctagcagtttaatctccaaactcttgttttagactcaaagcagtccatgcttgttccaatacatccaagaggaatgtatcttctcaagaggcagaactgtgaactaggggatgagggaccctaagactagacggtgagagccttgtccacttccgggccaccttctggcctgggagggcccagccac

SEQ ID NO: 41131 - DNA, 1139 bp, Bovine  19866880086884
  misc_feature (1)..(1): n is a, c, g, or t
nccattttagttactgattcctagaatgtaacgttcacacttgccatctcctgtttgaccacttccaatttgccttgattcatggacctgacattccaggttcctatgctttattgctctttatagcatcagaccttgcttctatcaccagtcacatccacaactgggtattgtttttgctttggctccatcccttcattctttctggagttatttctccagtgatctccagtagcatattgggcacctactgacctggggagttcctctttcagtatcctatcattttgccttttcatactgttcatggggttcttaaggcaagaatactgaagtagtttgccattcccttcttcagtggaccacattctgtcagacctctccaccatgacccacctgtcttgggttgccccacgggcatggcttagtttcattgagttagacaagactgtggtccgtgtggtcagattggctagttttctgtgattatggtttcagtgtgtctgccctctgatgccctctcgcaaaacctaccatcttacttgggtttctcttaccttggacgtggggtatctcttcacggctgctccagcaaagcgcagctgttgctccttaccttggacaaggcgtatctcctcatggctgcccctcctggcctcaaacgtggagtagctcctcttggccctcctgtgccctccaggagacttaggaatcatatagtccaaccctttatttcacacagtagggcccatggcttagaggatcccacaaactgcagcatcctttcaagttctcttagcctttcacctacacctccaccccatcctgccaactctgccacccacctgagaggaagggaggcctcgcgtaggatgcagctgggtgggacgcctcctcttcccctggaggcgggtgacgtccgtcactcctaggagatgattaaaatgctgctattgttaaattttggcgagtagattctgatattctcccacagggctggtcatgagtcactacagcacatcctcaggaagaaactggctggactcccaatacggccagatcctgctgtgaacttgggacccagtgaactcgggtgtgaacttcaggctctcatggctgctcctatcaccagctggggg

SEQ ID NO: 41132 - DNA, 1200 bp, Bovine  19866880340260
  misc_feature (1)..(1): n is a, c, g, or t
naattaagctgtacaagaatttaaaggaataaaaaacacccagtgtatgtataaaccagaggcttctgctctaggctttatcccctgaagctgctccaggcctctctactgcacctctccacacagccacctagtctccgaggcaggtgactccagtgagataagcacttgggagccagctacgcttcttacccaaatgctgagaggaggtcctattcaaggataacaggtcatcttcagcaatggttctcttgatctttaggcaaagacggcaatccactaccctcatgtgaccatcaatactggacggtccagtcaccattctcatcatgtcatcctcaaccaccagtcagaacacacacccctctaaccccatgcttgatcattttttaacattaatttctccttccaatggtgacctcctacccaatgttcccacttaatatgggaacttactcaccatgatgttaactggtctcttccctgatgagagactgagtttctcgaatttgacatgacagataaccacagatactttttagagcttaattttaaaaccgtggcacattttgaacttccctgttgaattcaactgacccttccacactgctcctgggatatctgcctttgggttaaaaacagctccctatgactttaggaagattggcaaaacacccccaagtagacttacttgtatctagtcagcaaagacagaaacgtgttggaggcactcagcaacaacttaccagctacaaactctgttcctgcaagttctgcagtggcaaggaagtcatccagggaactctgttcagtcacggactgaagattaagtcgaccccaatcatagccatcgttgagctcacttgtgtgtagctatgagtaaaacatacagctgctttcttctgctcttcacatccaaataaacgctatgttctcaaaaaaccattctatggccttgagggtggtgttagctcttttagtcaacactagtaacagttaacatttaaatgggtactttcttacctcgtaatagttattttccttttactttcttgtttaattttcaaaatcttttgaaataaacttcatatctccatcaggattaaactggagagaataaattgcctatagtcataagctaataagtggcagagctaatatgtgggttataaatccataaaccatatacttctggttctg

SEQ ID NO: 41133 - DNA, 751 bp, Bovine  19866880399449
  misc_feature (1)..(1): n is a, c, g, or t
nttctactttttctttactgggacccaagtacatggggaaaaacccaaatttttgtttgataggagacgctgaaaacaatgaaataagctcttttcaaaagagtgaactttaggcacctggatgctaagtaatatgttttttcctatctgtacagatattaaactcattcttcctgaacctattttcatgattgaaacagaaactataaatcaaaatttctacagaatttttaaaaaacatttttctgccaaagaatgtggcttgtatactggcagtatttggagttggtatgttttcagctacaagaagcagaagactccaactcaaattggcttaaggaataaggatagttatcatttcttctaactggaagttcagaggaaggggaagcccaagcttggatcaaccagcagctcaataaagcaaattgttttcttcttctattctgcagttctcaattttggttggatcaaagactgccttgcttggaggctgaggcagccccaggtatagcatccagaaacagatactgagagaactgacagaagctatctcttccttgtatttttcttttcagaagcaagaaaagttcttccagcagactcctggcagacttccagccaatgctttgctgtacttgcgtatatgtgtgcgtgctagatcacttcagttgtgcctgactatttgtgaccccatgggactgtagcctgccaggctcctctgtccatgggatttctccaggcaagaata

SEQ ID NO: 41134 - DNA, 1973 bp, Bovine  19866880529492
  misc_feature (1)..(1): n is a, c, g, or t
naatgtagagtcttattcccctacccttaagtgtaggttgtactacctgacttgctgctgatgaatagaatgtgccagaagtggtggtatttgacttccaagactgggtcacagtgtagcttcaactgctctgtcctgggttgtttgctctgtggaacccagctgtgaaggggccctgctgggagggggtcctcccatcctggaagggggtccttccatcctggaggggggtcctcccagcctgcaaggggatcgtcctgtcctggaagggggtcctcctggcctggaagggggatcctaccatcctggaggggggtcctcccagcctgcaagggggtcctcccagcctggaggggggtcctcccagcctggaaggaggtcctcctgtcctgtacactctgcagaggaccacagcctgcctggtgtcctgactgtagtcttgtgggaggctgagccagaaccatagctcagtagctcctggaccttcctttttgaaatcatattccattgcatgcatataaagacttctctggtggcccagacggtaaagcgtctgtctgcaatgcgggagacctgggtttgatccctgggttgggaagatcggctggagaaggaaaaggcaatccactccagtactatattgcctgggaagtcccatggacagaggagcctggtaagctacactccatggggtcgcaaagagtcaaacacgactgagcgacttcacttacttactatatactacattgtgcttatctgttcactcactgatggacacctgagtttgtgctgctatgaacatgggtgtaaaaatatcttttggggaccctgctttcagttcttctggatatatacccacaagtggaattgctgtgtcatgtagtacactatttttaattttttgaggaactgccacttgaaccacctgggaagcctatgttgatgcagaagataagataaatggttttcaggtcaaacctcattacacatttttgcccttctacttaaaagattttacactttggttagtctctcttatcttccatattgctgtctatgaaatggggttaaaatgtattttagttgctctggatcccagctctcagagcttcaggagactctgccctttgagggtattcccctcatagggtcaccatggccaacaggaaagggtgctggaagtgggccattgttggcggcatcagtacagttctagtgtttgccattgcaatgatcatgggcttctcactgcagaagcgcaccgtcctgccaggccatgcacaggatgggacctgctgctctgacgcagacatgctgggctgcctgctaagtttgggtcagattatccaaaggacggcctgctggtcacctggtaccatgctgccaacagcaaagagcagatgaaggctgccctcagcaacagcatcacagtcctggaatcagacgtcacaatagaagggcttgacacagtcaacgagacaggggtccccatcacggtgcaccccccagccatctacagtgacaacacctgagagcagtggctggaggctgtgctgacctcttccgagaagggcatcaaactggacttcaagaccatctaggctgtgggccccaccctggacctcctgaggcagctgacagaggaggggaaagttcaaaggcctgtgtggatcaatgccaacatcctgaggggtcccaacatggtcaaaccaatagagatcaatgcccccacagttcctggccttggtccaggagaagtatcttgagataaccctgtctccaggctggactaccgtctacctgcccttgttcccaaatgggacatacacccagaccatggtggagaagatgcaggagctggtggggagcagtgccacagaaggtgaccttctccatgtgggttgtcatggccagggccgcccggccccacttcagccggctgctgggccaatctgacaggtacagcctgacaa

SEQ ID NO: 41135 - DNA, 1995 bp, Bovine  19866880588230
  misc_feature (1)..(1): n is a, c, g, or t
natctctaccccatttcagcctctgaaatgtctgtccctcctggggccgtgaaggacctggttcagaggagaaccgaagagggtgtgtcctctgcagcccacatctcctcagatcatactttgcttctcagtcgcctcttatttatacgtttttttttttttttttgcagggaagttgagagagagactagaactgcaattagctgcctgcatttactgtctgggcccacacccagctcatcagaactgtgctcacagcattcccatgccaaatgtgtcaccagagcctaattgtagcctccgagacagagagtgggagaggaaaactgggtcataagaaagtcaggggaaaaaagcagtttttgaaaaagaagtggctacttaaaaattaggattctcaagctggaaagaagcctggaaatagaatcaaagagttggcaggcacctcaggagttgtctgctcaggaatccctgctatagcagcctgtggacttcacccaccctatgactcccccttcttcctggctgatagcaccccaattttgtccagatactgagtgcccgtgtagttcatggacactccccaggcacactgatcaatttaagctaattaagctaattctttttgccaaggactggaggaggcacacgatgtgaccccacctcaccaatgaggtataaagggaagcctatgagggcttctgggaatattttctccattccaaaaagaaactcagtactgactccttcctatatttgggtgtatttgtatgagaaagtgtgacaccccaactgtgctgccatcttagaccttgaggggaaacccaaagagaagcccagagatgctgccccagatgcctgactccctagatatgctgtatcatctaccctattatgttagatagcagaacctctttaccaggctagatagcaaattctttattgtccaaatgacctttaatctgtgattcttttagttgcaggcttaagcctcctaactgacaggctagcccacgctcccttcacaggcctctactagaacacctccaggaacggagccctcactacattcctacctcaggcagagactattattaggatgtcttctctgataccaaactgaaattggatcctggcaactaaccccatgatggagactgatttctgccttctagaatcagaagcaataagtcatcagcctctttcctaagacttctctgtagcccttagagggcagcttccatgtctatctgcatctcggtttttgcagtcttttcaggtcaccaagagcctctacatccaaggctggttcaaactactaagtccatcaccctatagatgagaaaaccaagactgagagaggggacaggccctgctcaaagccacccagcaatccagaggcagagcctcttaataatggtaggcagatgatgataatgccatggaaatagtacaggcaatgaattattgatcttttttaactagggagagatcaagcagcttcatgaagggagagaacatttgagcctgattttgaactataagtagtacttttttaaaaaaagaaaagagagaggagaagccataagtaaatctaagaacggcctctgcagcagtgtcagcattccctatctgagtgatcttctggcctagaactgggcaccctgtgagatagcacatccctcctaattcttagaaagttgtttattaagctgtactgaggcctgcttctgtatatctcatccttttctcctaattctgccttccaggcccctagagaacaggaccactgcctcatccccacgttaaacctttgttgtggggcaggtcctaaactccatttctccaggctgagtaccccagttcttctggtcattttccaaaggacattgcttcactgtccggtcattgactttgggacaggccccaacttgttaatgtcccttcaagttggttgccgagaacgagcaagaccaggaggtcttcctagtagaa

SEQ ID NO: 41136 - DNA, 1370 bp, Bovine  19866880678557
  misc_feature (1)..(1): n is a, c, g, or t
ntgtaacacattgaacttgaagcccaactctgtcacttaactaattcatgagcacattagcgttagagcaatgtggctttagagcatttagcacagtgcctggctggtggcagaagttgaagaaatgctattcccttcctcatttacttcttcaaatagtctttcccaggtttgagattctttggcaggaatgtttctcctgtgcctctccatttctctcctgtctgtaaagcatctgattaatcacactctttgatctttcccttctctggtcctatcagaactgcaccatcaagtcagtcttcctagtactgtcttaaatgatggttcctggtctcccttgtaaaatttaatagcaaaatgcttttgatatgcaagcttctttgaagtcaacccaatctatattccaaagttaaaaagctgttctgcaccatggatccttcttatgtgaacccggagtgtcagttgaaaagacagctgcactctctgctctactagttccattttccctggttccatttggagtttcctggagaaacatgggaaattgtcaggagatgaggaccccgcatcctgtggttaggactcatgtcaagggcactttttattcaccaccaactttatggagttcatgacactccacaggactttctaatttttcctcaccattcaacccccaccatcaccacccaaagcctaggttagaggtagggatgtctgtctgttccacaaacaaggaaacaaatgcagagaggctgggacaatttccagagagcacacagtctcgatcctacgtcttcttaaccagatgcagtgtcccaagaaaactagaggaaatcctgcctccagtagctgctaaccattaaatctggagttaattaaccagccagcatcccttccccaaagagtcaggcactttagaaatcaccatctgtagttggttaaagcaaactatcaggcgccccccacccccaccccaggaaaagctattactctccccccatttctctctctctccctctgctctcctcctcgcactacctcagggacatgccctttctcaacccatgcacctgagagcttggctcatagagggggaaccagagcctagggatgctgaaaaggtttacgcacatgtatgctcatctcaggcctgctctctgttgacctctgtctctgtctttctcttgtatacacacagaggaataccctagaacttctctccgtggctcttgggtgggactagagggcttccctattggcagaagtgaaattacaagaagccattgcactgctgtattggagccatgttcttaagacttgcagggtcatacacatctccgggagggtctcgttaaataaatgtcaga

SEQ ID NO: 41137 - DNA, 1244 bp, Bovine  19866880715686
  misc_feature (1)..(1): n is a, c, g, or t
nctttagaatttccacttcacttttttttctgggtctctaagacaaagcacacaacatattagcaccacctccgggggtccttgccagggtgttaagtctggcgtcactgcagagtgcttccattgcaataaattcttccttcaccaactttacgttctgtccctgttgatctggaatccagtcccagggcaggttctctaggcttctattgggacatgctggggaggctgtgtgcttcctttgttatatagtcctattctccccttaataggccccacgcttcccccacccagggtttgtgtgttttggggatgtgaattaaccctcattattggtctggtgacctggacgggaagtgggactagatcctggggtagaagaaaagaaccagggacttgttctcttgcaaagcagaggttcctatatttttaagcaaaggagggtagtagccttcaggtagggaggagtggttgcttcagcaggtgcaggaagttcatgattctcaggtatgttggcccagatgtccctgtcctgtgtcaaggtctcattccttcccaaccatgacaactatgacattgtagtattgttgaggtcaagaattccaccatctctgaagctcagctgcctttaagattaagctctgagcctgctcctaagcaatttctgccctgcagatgcaggagatgaaaattctttacatgctgccgagaagccctctcgctctcatactttgccttaaattggtaattagtcattctcagtctttccttatatttctccaatgcaggcatggctctttgggacagccctttgatcccagtcctcataattaaggggctgacttccttagccccttaaacaccagggagaccatacctgctgggacatcccttccaccagtcctctatcccgtttcaccaccagtaacagtcttagcaactgaactgtcccagcatgccaggggctccccaaatccacacgtcagccagcaggtaggggatctggccccacattctcattttagagtcaacttcctcaggcaacttgtggtaccaactgttttaggttgggttccccaggaaatacactctgacatgaagagctgtgagtaggttaatggagagttcttgcagccagaacaccatgagggatgaaggaagctgattaggcagaaggagacactgaagggcaatgagtcacaacaaggcctcagccaatcccacggtgagctctggggctagag

SEQ ID NO: 41138 - DNA, 2129 bp, Bovine  19866880745567
  misc_feature (1)..(1): n is a, c, g, or t
ngggaaaagattatgcagaagcctgtgtcaccatatgtgccaggcgctctcctaactgcttttaatacacatttaaattcatttatttttcatgacagtgctatgaggtaaggacttgctatggtgtgacagtttgagttctccaccccacacctagaattcatatgctgaaatcctaacctccaaggtaatggtattaggagctggggcatttgggaggtgattaggccaggagggtggagccctcatgattgggattagtgcctttataagacagagagctctctggcccctctaccatctgaagacacagcaagaagacagctatctatgtatcaggaagtgggttttcaccagacactgactctgccagcactgtgatcttggatttcccagcctctagaaactgtgagaaataaacttctgctgtttacaagctaccaagtttatggaatttggttataatggcccaagctaagacggtacagttatcaccccattatgaggaagagaaaaggaggcatagacaagtaagcaggcaggattccaacccaggcagtctggcttctgagctcaggtcatacatacgggctctccatgtgacacagcagcacagtgctgcctggagaagtaaggcttctggcctagaagccgccagaagacctcttcacaagtgcttgagaaccacacttgaatgccagcaccttccgtgtttctccttacagtggaaaacatgcaggatagtgcatgtggtgctgctggaacagctgtggggcatcacattgtgagatggtgtgagcctacagacaagcagttgtagggtcttgcacccagtcacactggaaatgtcacacccatcgcaccgaaactgtcaaagtgagctgatccagcatgaagcagtgtccactccccatccgctacaaggcctgctttcagccacaggaattcctagaactttagttacagcaacgcctctctggagggtccctactaccctgatggataaaagaatggtcctgtttgacatgtcattggcccccagtcctagggcatctcccagtgtatcaatatgctttgctgtgtttgtgaggaaaccatgccagactggccaaggaagctgagaaaagtatggtgtgtgtgttgctaagatacaatgcatctcttttgggattgaccagactgcacttccatgaggaccacaatctgaggaacactgctcaggggaaggagcacaggctcttggatagagcccaggactgtgaccttggagccttgagttcaatcttgctctctacttactaatgtaatctagacaagtcaggcatctactctgggactcatctataaaatggagggaaaactccagcgctcacctgtgtcacagggttgtcatgggaatcagttgaaataatgtacaacaaagagtgtatttgtctacagaagaaggtggatgtctgtgagaggtcacagcccagccacacgggatctttaccaaacccaggtcatttgctggttctagaataataactgaaaattcttggacccctcccagctgctaaagctacccacaaggtcacctgaataatagactatgacttacagtctttctgccagcctcactcaaaacattatcaatagaccaaagatccattgagtaactggcttccttttgggggaggctgtcccactaagggacactaagagatgtggaaagggatatggagccacttttattagattgcctaatggactcacatgtaggaatagctctgctggaaccctgagtaatctttcctctacttccaactcaacttatctagttgacttctaacttcacttctacccctaaaagtctctgaatctatgaagctgattcactccactactgttgccaattcaatttacctctgtaaatgccgtttcccgtctgcaaaaaccaaattgcttttccttcctgccagctgcagggtgctgctgtgcagtttaattagacagtcactctaaacccaatgatctccttggaggacgcctgcctcactcagtcactcagttgtaatgagatcattgttggaactagcagtttacacagccttggaattcaagcaaagcacaccagacttgacaccaaa

SEQ ID NO: 41139 - DNA, 2620 bp, Bovine  19866880858122
  misc_feature (1)..(1): n is a, c, g, or t
natgagtgcattgtgcggtagtttgagcttctttggcattgcctttctttgggattggaatgaaaactgaccttttccagtcctgtggccactgctgagtttttcaaatttgctgacatattgagtgcagcactttcacagcatcatctttcaggatttgaaagagctcaactggaattccatcacctccactagctttgttcgtagtgatgctttctaatagggcccacttgacttttagatacgtttgtgttttagatagttcactctggaggctgagtggaggatgaatttgtctgaagagattgttaggaggctactgtaatagttcaggttggaaaggatgactggaatgtttgccagtggaaatggaggtagagatttgaggcttattaaggaggtgaaatagaaatgactagatgattggataagacaaggggctgaatcaataatgactcacacttggacttttctaatggttcagtgggtaagactttgccttccactgcagggggaagaagcaggatgggtgggcaggttccatccctggtcaggccacatgccctgctgcaaggccaaaataaaataaaaacactcacattcattctcaactttctaattctgatggctgtggatgctggtgccaacagctgagggaagggctgctttgaaggcagagggcaagtttagttttggacaagctgagtttgaggcacccctatgatatctagagcttcctggcaggcagttggatatttgggtctaactcttgtggaagaggtctgggctgcaactgctgattgggtaattgcaacgtgaggttggaggtgatctcctaaaagtagaatgagaagaactgtgggtttggagtcttgcatataaggtggagactcacaattagtggcacttaaggatgccacccaaggaggcagaggccttatttactgagatgtgagaactggaagagtatactcttccgcaaaccaagagaatgttgagattccagaaggtgggggtcatctgaattgtcaaatgtaacagagagacccagaaagagaatgcctgcagaatgcctactaagatttgggagaatgaaactcaggggttatcttacccaagcaggatgaggaagggtgtgtgttggggagaagaggggaagctggaatgcccagtgaggagaaatgaggaagtggagacagcagagagaccactgtttaagaggtcatgagagggagtggagcccttggaagctaactggagagggtacttggagcggaggttgggcgccatagttttgtttttaggagctaagcttgtttaatggccgagggaaaacagcgaggatccaagtagcagtgagaggtgaggaaggaagctttatgggctcaaccccaccaagacagcttcttatagtttgcccaacaacgaccacgctccttatctcatttactcatttgagggaggaaacagacagtgagactgatcccatgggctagagagagggctacagatccatctgggtacagtgtgcgccacacgacgcggtacgaggaagtgcgcgtaaactgtcccgctccaggtgacatagaggcccaggagcgtgttcctggctcctggtgaggcgacatcgatgtcatgggtgtgtgctgtctcagatgaggtgtcaccacgtgtcgtggatcaagggtagcaacccccaacttgtaggatcatgtgccaggaaccagagcctgacagctcccaagggcggtgcaccagaggtccggagcctcttccgtacttccgcccctgcagatgggagttctgttggccgcgaggtgaatgacactaacagtgatggcggggcctaaagggcacgggcgagagtcttatggcgaaaagatggccggagcccgaggcagcaggtggctgagtgcgctccttgtgcgggtcgcccaagggacgccgcgaaaatcgagcccgaggcaacaggtggctgagtgcgctccttgtgcgggtcgcccaagggacgccgcgaaaatcgaatttgcgatttgctcacgcggccggaagatttgttcatctctgtaccccgagataaatcttctgctaggggaagtatttaatttgcatccagcgctgtcggaagaaaatccctatcactggaggaggtgtagtgggcgcgtgggagctttctcttgggtacgccttccagtcctcctcgcaaggctgggcaccgctgagtcggttgttaaatgcgatctatagtttttggtttctgcaagggggagtgtaatgttaaggaaccgcgagccgagccaggatctgacctcctctccatcattcttgtacaagctacctctgtgaccttgactctgggcaagtcaggctaggcccctcactacaactcggtttccctgttcataaaatgaggatttggactgtaaactggtctttgcacggcggccaagatggcaaatatcacctcctcccgccaaaaaaaaaaaaaatgccgtcctgcgttagtaacctacccaacacacagctcctcagcagcgttcttactccctctttctcttctgctctggcctggggaaaggggactgaaggggaagatgtgggcggggcctggccatcgccc

SEQ ID NO: 41140 - DNA, 1190 bp, Bovine  19866880965377
  misc_feature (1)..(1): n is a, c, g, or t
ntagagacttactttcccttttcactttctgcattggagaaggaaatggcaacccactccagtgttcttgcctggagaatcccagggacgggggagcctggtgggctgccgtctatggagtcgcacagagttggacacgactgaagcgacttagcagcagcagcagagctaggtaggaacgactccaaccctaggactagcagaattggttttatcaggtggagtgaggagtgggtgttttgtaaggtgatcaatgaataaataaacaaaccagtgtctaacagattgcctttataggaaggcatcactgtggttctctagcatcaagaaaaagtcaaggactccaggtggataggtcatttccctgaatcttgcaaagtgctgcctgagaaggcagcatagttcttatgtctacaagaggaccttgagacgaggaatctggatgtgagcagctgtcgcagaggcaaattctctgaaagataaaagaggaatttgtatttgacacactattttgagatcacaaaaggtcaatcagagaacacagcatttcacagtgtgttaatgttataggcctagagagtccctaagtcaaggactcccagagacagaactgttctccctggcaaacaccattgtgagatttgggcaagtgatttaatctctctgggcctggtcccccttttataagtgataatactattagtactgactgcacagcattgttaagaagaaaaaagcagtttttatattacaagcaatcaaagcagggcctggcatattgtaaacactcaagaagttatagttactattacgatgaaggggactgtcttaactaaacagtggatacaggtaaagactttgagttttctagatgttgccttaaaccatttccttttcagttttgtccctgttagatccaagtgtgcctactcctaggacacattcttcaagacataccccagaaactgggaagaagagagatcaatagttgggggactgaaaggaagaaaagggtactatctattgaaatacccttgctaaaagaaagaaagaaagaaagaatggaatcaggcagccctctagatgaaactaccaatttactgaaaatctaggggacagaggagccatagccataaacaaaccataggggtacattcagcaaaccacactgggcgaactccacagggcaa

SEQ ID NO: 41141 - DNA, 1577 bp, Bovine  19866880989791
  misc_feature (1)..(1): n is a, c, g, or t
nagctgggtgaggcggcagtgctcctcccagcccagccccttcctctctctgcccagtgccagggtaagacatttccctccatccacctgtggacccggctcctgtcagccctggctggtctcctctacgcctcagccatcgtggcccatgaccggcggcctgagtacctgctgcgggccacgccctggttgctgacctcgctcggccgtgcagcgctggacctgtctgtatccaccccgggtcccggggctggactgcctgtgtctcctctcccctctgccccaccacgccctcctacccgcttggtagaaagaattctttctcagtggccagggtggtggtttgaagcctagggcaggcagacacaattgcagcgtgcaattatgtgtttttttcttttttcttttttttaaataagaagaaggatctcttgactggagctctgtgaaattgcagagagggaatgtgaacttcttggccctgagctcagagaagagccagctcctgtctccatgctgctcccctctgctctggccccaacaaccctctgtgaatctgttttctcacctttgccttgtctttctcgtgggctggaatgggctttgagagctgacttggcctgcacagctgatcctgcacgtcctgtcctatttggtgctggagcctggggtggggaagcagggagaaaagctgtccccctttcttgtccccagggggatgttgcccaatgtgctgacaccccggtgaccttgctgtgagggcctcaagggcacactaagctcagacagtggcgggtggagatgctgacagtggataagcctcggctggcgagggagtgtgtgaaaaaaccctgtggatttagcataaaagttacgaaaaagattttctcacctacattgccacaaactcgatggcttaagccaaaggaatttattctctcaggtttggagaccagaagccccaagtccagacagggccacactccctccaaaggttccgagagagagtctcgccctgccttttccggcttcaggtgggctcctggggtgccttggttcctggcagcataattcccatttctgcctctaccgtcacatggcccttttccttttgtgcatctctgcctgtcttctcttcctctgaagttcctgttgtgggacttaccttatccgccctaggccactgccaacctcatcttaactaactcttgatatcagcaaagaccctgtttccaaataaagtcacattctgaggttctgggtggatatgaatctggagaggacgctgttcaacccactacgtgtaccgtccctcctaagccgaggaagatggttttcacaatcctttggtttaacaagtattcaccaggtgcttgttggagcacctggctgggtggtgggccctggggggacagagagaattggacctggctctgtccttagatggtcttgtgtctgctctgaggcctaccctggaaggatgattctggggagagagggcgtcactccagggtggagccctcggggtgccaaggtaaaggcagcatcaggcaactaaattctctgcttccttaacc

SEQ ID NO: 41142 - DNA, 1321 bp, Bovine  19866881000026
  misc_feature (1)..(1): n is a, c, g, or t
natctctccttttcctgatcccttagactgttaattagaccttcttagaagggacacttttaaagatgttacatttaaattaaattaattttattaattgaccaagggagagacgttaaacagtaacatagtattgttgggttatgagtggatttaattttcaagggtgtcctccaatgccatgagcacagctttaaaatacattagatttctctcaagcttgttgcctgattttttttccacagctttgctgctaagacgcttcagtcgtgtccgactctgtgcgaccccatagacagcagcccaccaggctcccctgtccctgggatcctccaggcaagaacactggagtgggttgccatttccttctccaatgcatgaaagtgaaaaatgaaagtgaagtcgctcattcgtgtccaactcttactgaccccatggactgcagcctaccaggctcatccgtccatgggattttccaggcaagagtactggagtggggtgccattgccttctctttattgagatacaattcacaggctatacaagtcatcgatttcaattgcatattttttgtatattcacagagttgtgcaaccatcaccaaagtcaatttcagaacactttcatcatctttaaaagaaatcctatacctctcggccattactccccatttcctgctagccctaggcaatcagtagttcactttatgtcatgatagatctgcctatcggaacatttcatataaagaagcataccatctatagtctttggtgactaggatttttcacttaacagttttcaaggttcacctatattgtagatgtgtgtgcccgcttgccacatctcttcagttgtgtctgactccttgagacccttatggactagcccaccaggctcctctgtccattgaattctccaggcaagaatactggagtgtgttgccatgtcctcctccaggggatcttcctgacccagggatggaaccctcatctcttacatctcttgcattggcaggcaggttctttacctctaagccaccagggaagccccatattgtagatgtatcggtactttattcctttttgtggctgaataatattccatggcatggatatatcatgttttctttatccattcacaaatttgtaaagtgttaatacaaagccagcaaaaagggggaaaacagtaagtaaatctcaaggaagtaacagctcctacagggttcagagtcatagagaatcagaatggaaaagaaaagactgagtgatttccatgtgggaaaacctgaaacccaaggtaggaaagccatttgcccagggtc

SEQ ID NO: 41143 - DNA, 867 bp, Bovine  19866881233502
  misc_feature (1)..(1): n is a, c, g, or t
ncctttgtatagatggcaatgtgaatgattcccaccctgcctgagttatacattgcacaaccaggcccagcagttgacacagcccctttgatcccaggtatccttccaacaaattcccttttctgttttacttacattagccagagtctttttattgttgttgctttcaacctaaggaaatttaaatattaagtcttctcctgtcccagtggcctacttcaagtgtctactctatatgagacctggttctggagtttgactttccccatggtatgattcatccattttgccgccttgttagttctcatagaaagaaagcagcttagcacatactgcttgggaggacgccaaacattctactccaccaaacctggcagtctgtggctgggcacgctagcacttaaagattctctttccttccacttctgagcccaagtggaacaaactctcacaattaccgtgggtgaaggcaggccagctgagcattctgaacactttttcagtggacttgtaacatgggtgtctttctagaacagttttgcaatatataaagctttaaaaatgccctttgcctttctgagaattgcacttctaagatcctctcttaaggatctgaaaggtcattaaagacttatgcccaaaatggccactgtgttttgattgtaaacacagagcttaagaataaccagaatatccaatatatagttgacccttgaacaaaacaggtttgaacacagggcccacatataccagattttttttcccaataaatatataaggaatatggatattccttatttgtgggctttaacatctgcaggtatggagggccatatgcactcattgccatccgctgtttcatataag

SEQ ID NO: 41144 - DNA, 1525 bp, Bovine  19866881263036
  misc_feature (1)..(1): n is a, c, g, or t
ntacaggattcgtgacttacaagatataccagaatgcaaacttttaaggttgtcttctgccctctgatccagtgttctttcctttaggtagggtaggctttgggcatcctgtgaagattgccaacttttactgtagacattccatctgactcccttctaggtgggctatccaaacgttggtaagagttcaacaatcaacaccatcctaggcaacaagaaggtatctgtgtctgctacgcctggccacaccaagcattttcaggtatttccacagcatcagcctctgcatttactcctcagacagttcctccctctgagtattttctggagttctttgccgctcgtgtgctgctcttcttccccttcctgtgccgtgtgcccagcctaacccccttacttgtccttcagactctctatgtagaacctggcctctgcctgtgtgactgcccaggcctggtgatgccctcctttgtctctaccaaagccgagatgatttgcagtggaatcctcccgattgaccagatgagagaccatgtcccacctgtatcactaatatccttggtgctgtgccaaaattgtggttgttctgtgtatattggagcttcagaaaaatctgggtaattaaacaggggaggtaaaaatcatccctccttacataattgtaaggattagaaacaaagattgtgtgacttatctctgaattaggattatctcacaaatctgtagtgtatttaggtaaaaatttgtcatcttgaagtctgtttcagagataatatttttaaaggatacatttgtaggtgcatacatttggtgcataaggctttttttaaaagagggactgaaagtcttttaaaattaagaataatcatacttcttaggagaggtggaaagttttttgtcaccatggtgctgaaatacagtgttcttagaagatgccatggggaggaggaggagggtcagttcagagaagtagattccttgacaagcttatgtttgccagaatattccaagacatgttttagaagctacatatggcattgacatcataaagcctagagaggatgaagatccccggcgacctccaacatcagaggaactgctgacggcttatggatgtgagtggtgatttattttaaaatgtgaacaaaaaataacaatataattactgatagaagtaccctgcaaagatacaaattcagaattttcccttagcattttgtcatctttcagggttgatatttctgtggtcctgttggtctttcctgcggagtagcctccaggtagctgacttggtagtggttttggggtctggcagtaaaggagggggagccggctgctgcctgagtggtattttatttcatgttaggtgctttttagagttagagaaggaggtgtgctatattccttgcctcttccccaggttttaattgcagaaatcagtgcctgggagacgtgtcttcccaggctttggtggtttcaggccctttccagtaggaggccttggacccaagtgtagacgtagggg

SEQ ID NO: 41145 - DNA, 875 bp, Bovine  19866881307079
  misc_feature (1)..(1): n is a, c, g, or t
ntgggaaaagtatgatgacaaaaatccggaaaatatctccttgtgtcttcccagatgctgggtctggaagacatccatgagaacctgagatgacctgaggttgtcagagagatataaaatgcaagaaaaacataaacaactaacaggccgaatgcagcagatcctagaaccgaagtgagcagtccgggcttatatcacaggcctggagggcgtgtggtccctgatggcctgagaatagaaccggctgccaccgggatgggagtggcccggacttcctgccttttggttagacagactgccttcctgaattactaggtctaggaagtggtggtgacagggtgggggtggggtggagaagtcacacgtgtcacggacaacccccattgcagccctcttcctcgctgccacctcacttcccctcttatagaccagttacctaatctgcagcacgcccagatggtatctgggagctctaacggctctgaaatcacacagttctagaattcagacacaagagcagcagctaagagacaggcaaaagcccagccccaaaaaccagtgctggatgtcacaggtgagacaccgagtgtggggtcgaggactcgaacaatagccaggccacgtgcccttacgtgcgcagtcactgttcttgcccatgtgggcattgctggcaccggtgggaagacacaggttacacaggttggtctaccgggcatctaatccataaccctggtctctctccatcacacaacactagacactggcttacatgggacttataagcctgggcgcacctaaccttcatccctccacccctcctgattctggtagcactgggagaaacacacccctgcctcccttctctcctgaggagg

SEQ ID NO: 41146 - DNA, 1304 bp, Bovine  19866881671362
  misc_feature (1)..(1): n is a, c, g, or t
ntgaatttttgtcccttaagactgattggaaagagtaatgggcgtcagtttttcatgatgatttaagatagtgattcttaatcatgggcaattttgccctccaggggacatttggcaatgtctgaatacatttttggttgtctaactgaagacttgttactggcatctcgtgggtggaggccaagatgctgttgaatatattacaatgcacaggacagcctcccctcaccaaagaattatcttgctcagaatagcaatagtatcaatacagagaaatcctgatttaatgtaaggtacaattaaatattgaaacttagtccagagtcctgcacctgcacttcaaatattgggatctgaagtaacttaaattccatgccataacatagcaaattatgaatagaaaaagaaaaacaaagaaaaaaatagagatacaaatatgttaattattttaatcaacataattgctacagttcaactgagctttctccaaggctaaaaagaaattacaatcagttgtataattttggtaattaaaaagaataattcctaaaggacattgcttttccaaatataaattgtaaaatgttattttcataaagtattttataatatggtagcaataaatgacctgataatgcgaagggcaatgttttcagtgttcatgcaaaaaatgcaaaagttagttccatatggctatttataacaggaacttagataaaagctatgcagaaaatattcagatgaaatgccttcagggtaattctgagaggcactggattaatatcactccatttggagccttctgttggtctaatttgattactgaattagattatgatacctggagagatataccgtctaaggaaaggcacaactgaaccatggcctggagcccttattatctttttaaaaactttctgtaaatatactatttaaaaaaatatctttattgagatatttttcacataccataaaaatcactgttttaaagcatgcaagtcagtggcttgtggcatattcatagaactctccaactgtcatcatcatctaacttcagaatatcttcattactccaaaaggaaaccctgtactcattagcagttacttcttcatacccctgaatctccgtcacccctgaaaaacattagtctacattcctgtctctgtggatttgcttattcaatctttctattgccaaacaatattccatcatatggaatgctcattcatcaattgatgggcatttggattgtttccactttatgattgttatgaatgatgctatgaactttggcaaattttta

SEQ ID NO: 41147 - DNA, 2447 bp, Bovine  19866880360706
  misc_feature (1)..(1): n is a, c, g, or t
nctaggtgtggtgagagttgggcctaaaggaggctgagcaccgcagaattgatgcttttgaactgtggtgttggaaaagactcttgagagtcccttggactgcaaaagagacccaaccagtcatcctaaaggaaatcagtcctgaatattcactggaaggactgatgctgaagctgaagctccaatactttggctacctgatacagggagctgactcattagaaaagactctgatgctgggaaagattgaaggcaggaggagaaggggatgacggaggacaagatggttggatggcatcaccaactgaatggacatgagtttgagcaaactccaggagatagtgaaggacagggaggcctggcgtgcctgcagttcatggggttgcaaagagtcagacacgactgagcaactgaacaacaacaagaggtgcaggcccacgtttaaccactgctgggaggagcgtcataaaccaccgtgaaagagaggcagctgcttctgcccggccggagctctgccactggccagcacctctggccggtgaatacaaaatcgtctctgttcttgagttacctttgggagggtctcgccaaacttcaccaccaactccccttcgcttccttcttcattttctccttcctgactcttgacaaaacctgtcggggggacaagaaggcaggttttcagaagaacagcacaagaacgagacagagaagactgctggggtcgctccagcaggaccagggaggacacccatcctcctctttatctgttggggccacagcatcgttgaggagcagagcttgctggagattctgttttggttcaggggatggtcatttgccaacatggtctaattatttttaagacactcagagattcccctccctctcggctcctctttgccacaaaccaggcaatggaggactcatcacatcataggcaaggaggagattaggaaacaggacggctctggctcgtcccacgccactcaagataacagccttttgaaatgctaatttaagcttcctaacattctgtttccatagaaatgtatgcaaatgtctcgatagtttattaaaaacacccgcacaaaaatcctagtcatttttggaagtgctatgcccttgctcggtgaactgggacccggggagacttcagggagaaggcggatctgtcaccaggaggggagcccaggcggagtctgcggaggaagggaggtgggacggcactgcagcaggtggcccatgtcttgttcccagtttctggaagcatctgtcaccccgtgacacagggcctgctgttgtggggctgactccccacttcccactccgggccatctctgcaagaagagctagaaaccgcacagactgcctcaccgtggcacggctttagacagtatgcctagaaacgccccctagaaagactatctcctaaacccagctgtgtgcgaaccgctcctggctgacgggaggctgtccatctctagctcgctttcagatgctcagaccagctgagaaagattgtctgtgatgcaagaaagaggaggcgaccctggggaagaacaggtgatgaccagcagctgctccatcctggcgctggcctccatgagctctggacctttgcccaggactctctggtcattccagagccccggcctgggggacccaggagtgggccaaactccgcccagaggggcaggcagaggatccagttgccccgctgcccacctggtacgtctgtgccccagggaccaccccgaccctggagcagcagcatcgcaggtcactgggggccccgcagtaaccgggtctcctcttacactgtccacccgcagccccactctctgaccctgtccccaccaaggcccatcaggaaagccttcccagagacagaagagaagcgtcaccagggaccaggcattggtgaaggggccctgcctgtgccccccccaaaaggcagttagttgagcgagcacgtacttctccaagcagctggagtggaactccaggtagaatttggtctgggacttggtcttcagtgtggcgtagcacccgagaaactcgatctgcccttggctgtcagtggtcccggggcctggaatagaggagagcagaggttcggttccacagtgtgtctggagacagagcgcttcgatccagcccccctcctcccctgtaacaccgagctccctccttgcgtccaaggtctaagtggagggagtgtgtcccctgaaatcccaccacccacgccggtaacagcctctctgatgagtccaagctggtgcagggcagagggaagagttctacgctcagctttgccaccaaagctgtgtgggccccaggtgacgcccttaacgccgtggcctctccaggggttccggcaaagagggctggtggatgcccaaacctatcttgttcctaagttcacatggggaggcaggcctgct

SEQ ID NO: 41148 - DNA, 2006 bp, Bovine  19866880361123
  misc_feature (1)..(1): n is a, c, g, or t
nccccgccagcccccttcctcagccccacgccccgggtccgctccttcacctgctccacctccgagggccgcccgccgggcggggacaagagccaagggaagcccaagaccccggccggctcgcaggtcccggtccccgtgccggtcccggtgccggtcaagaggcccatcaagccttccagatcgggaactcagccagcagccccttgcccgcccaggggcagcggccgcccctcccggtcaagagcccggccgtcctgcacctgcagcactccaagagccgcgactaccgcgacaacgccgagctgcctcaccacgccaagcaccggccggaggacgcgccgctcagccggaccgccatgcaaggtgcgctctgggagcgggcaggcgggtgtgcgtgcgtgggtgtgccctacaggtgcacgtgggtgcatgggagtgctacccagccatgtcgggagtatgctcggtgcacctgtgtgggcggtgcctgcgtggtcggagggtgcctgtgtgtgcatgcgtctgctagaacccaccaggctaggaaccgtgctctggtgcatgtgggccctcatccatggccatgtatgcgatagaccaaccctacccaggagtgggttccgagaaaccctgccctgggaactgcaaaggagaaaggaggtgaagacaggattcgaacccagcctataccccaaaatccctgctcctacagttgaaaggttaaaggaggggctgtgggtaaactgagtcctctatgtcaggcccagaagaatcaattcagtcactcagtcctgtctgactctttgccaccccttggactgcagcatgccaggcttccctgtgcatcaccaattcctggagcttgctcaaattcatgtccattgagttggtgatgccatccaaccatctcatcctctgtcatccccttctcctcctgccctcaatctttcccagcatcaaggccttttctagtaagtcagttctttgcatcaggtggccaaagtattggagtttcagcttcagcatcagtccttccaatgaatattcgggactgatttccattaggatggactggttggatctccttgcagtccaagggactctaaagagtcttctccaacaccacagaagaataaggcttcataaatataaaagagcccagatcatttctatttcatcatcatcattagtgttagttctttaaaatttcctagcgctctagagacttcatactcaatgtcctcttccttcctagaaacagatttctttttcagcaaaacaaataatggttaagagcagattctggtgctgtcctgggcttgaatcccagctctctcccctaccccagtctctgatgctgggccttgggcctcagtttgtgcatcagtcagtggatgagcaatcagtggaacctgcctcataggtttatagggaggactaaatttggttatatatcattgttgtatgttacaatttacatgtaaagtatgtattatctattacatattatttcatatatattacatattactgtgtatgcatataacatatatacatatgtaatagattatgtgtaagttctgagaacagtgtgctggccctcttcaacactatgtcaggggaagcctgctctagcttggggcatgaaaagacatggggaccttgagttagttgtggcctggcaatgacgcagtgctgaatcttctgttcttgtcctgcagtgaagcccctggtgagccgccaatgagataggagcccagaggagcaacacgaagccactaggaccctctcccaggacccctgttcactcctcctacccagcttcctgcacagggcttcgtgtttttctggagagggccttgcttctgtgtggtcagcaaggcgcactggctgtgaaacctgatcgtcagtgctgaagctggaagaagcagcacaccggatgggcacccaacaacccgcacacctgggcccccagcttgatcttggtacttgggacccaagag

SEQ ID NO: 41149 - DNA, 1646 bp, Bovine  19866880500277
  misc_feature (1)..(1): n is a, c, g, or t
ngctgttcgttgtggtgttccggcttttcattgtgttgtcttctctcgttgggggagcgtgggctctaggtgctccagtttcagtagttgtggctcctgggccccagatcaggggctcagaaattctggcacacaggcttagttgctctgtagcatgtggaatcttccagactggaggtcagcccctgtcccctgcattggcaggtgaattcttacccactatgccaccagggaagtctgctaacttaatttttaaggtagaagagtcctttctcgtattgttcattttctttataatatagatattgaggtaaagcatgttcagggctttgtgaggcttaaaaagtgtaaaacttttcgcaggctctggggagccctctctggaaaagattggcttgtggtgagattatcagataacatggtcatgtttatggcattgtaatttttcttgactagtttattagttgctaattttattctcctttcaccaaaagggggaaaaaagaaacatttatatattattcagaagtacaaggtggggaaaatgacagtaacagtaatagctttttgtgtggtgatactgtgcctagagtgttctttgagaacaaggctctttttgttctagttgttctgaacctcgaggaagtcttgggagctctagcctcttcagtattggtcctttggttgcagagactgacagaattgtcagaggtattgttttggtacctaataattggtaaatcttggttcaatccttaaagagatggttacatccaggggatttcatggttagccccttaggaattgagatggtttttgcccaaaccatggctaattgagtgactggatgaagccatcttgcgagatcggtaggtcagagagccttaattcatgttctagaatctgacactttttaatctattagttctgctgttgttaatgaaatttctgatagtgtactatgagaatatgtattcttccccagccacagggcttggggcttccccagtagctcagtggtaaaacatccacctgccagtgtaggagatgcaggaaaaatggattcaacccctgagttgggaagatcacctggagaagaaaatggcaacccactccaatattctttcctgggaaatcccatggacagaggagcttggcaggctacaggatatgaggtctcaaagagtccgacaccactgcgcatgtacgcattcaagcagagggcagaggggctcactgtattgcttgagtgacaagaaggaaggatagtggaggatagtgatagtgggacagagtgggagattggggaaaggagaaaaagttacttccacaactctgaaaattgcaaggaaatgggaggaagaaagtaactataagcagtattgaacactgtcagtatgcagagaaaaagcttgtggccattaaacagaaatgtgggtttaattttctgtcgcttactacttgtagctatagataaagaagctaacttcttggaaccttgttttccttactggaaaatatatcccgtagtgatttgggaattaaaagtctaaaatgcgcaatacagtgcctggcatgtggtgttgataaataggctttcagtgattggtagtgggtataattgttattactatgcagatatataa

SEQ ID NO: 41150 - DNA, 1903 bp, Bovine  19866880544426
  misc_feature (1)..(1): n is a, c, g, or t
naatcatcagcccccaccactgatcatggtggcatggggggtgttgactgtcagacacaactgagcacttagcagcagcagcagggggcactgaccgtaggctccatgaaagctggaccatgccaagtttcgttccccatgagcacttagcacatggatgaccaccagaagcactcaatatttgcagaggcagggaggctccccgggcagaggttgcagtctgggaacttgacaaagccttaaaggcacgcttgtgcagtactgctgcagcaggggcccaggactgctccaaccaaggttctcacaaagtcaggtcatgatgtcaccgggataggtaaatacaaccccggtgggaagacagcagctctaatgtggaagggtttgcctccccagatgccttttagagataacccacttttccagctcccccagaagaacaggagacccagtaccctcagtaataagagtgcaaacagagcatcgcaggtaactgcccctccagcacccctccacctgggcactgccaaagccctggtagtaccatgaatgtgaacatcagctgtgcaacagaaacacaggagagggacacactctaaaggatctcaggccacttggacacggtgactggagaggtttagatgctctatctccgaaatcgtttctattcttacactatctcagaacaaatataactgtgacttatgtttcacagtttatgcagctaatttcatatacttctgacagctctatcttattttcagccttttgcaccattttttctctctgggaggttgaaggagcttatttctcacctccctaccaggccttgacatgggctgtggggccagtggctcttttaaggtgaccttggggcggggtgtgacccctagctctccccactcctgctcaacctgctgctgctaagtcgcttcagtcgtgtccaactctgtgcgaccccacagacggaagcccaccaggctccctcgtccctgggattctccaggcaagagtactggagtgggttgccatttccttctccaatgcatgaaagtgaaaattgaaactgaagtcgctcagtcatgtccgactcttaacgatcccatggactgcagcccaccaggctcctccgtccatgggattttccaggcaagagtactggagtggggtgccattgcctgctcagcctagaggagactagatacaggcttgagaacttgcaagaactcagatcttaaggggttaaaaggacagtctcttagacttgttaactcctttaacatttgaattaatagtaataataataatatgcattggactgagcttgatgcatgggttttacctacgtaattatatcttcggtgtttttaactgttgttattcagttgccaagttgtgtcctcctctttgcaaccccatggacttgcaaccccacaccaggattccctgtcccttaccatctcccagagtttgcccaagttcatgtccattgaatgagtgatgccatccaaccatctcatcctctgttgtccccttctcctcctgctctcaatctttcccagcatcagggccttttccaatgagccagctcttcgcatcaggtggccaaaatataggagcttcagcttcagcatcagtccttccgatcagtattcaggactgatttccttcaggatggactgctttgatctccttgcagtccaagggactctcaagagtcttctccagcaccacagtttgaaagtaaccattaaactgttgacatcttcccatttgttaaattgtcctcttagggttatttggccttaatttagttattgctggcttatttccccatcattcttctgatgtttgggcttccttactttgccctcctgccttgggtgcatgtgtggtctcttcagtc

SEQ ID NO: 41151 - DNA, 2935 bp, Bovine  19866880546420
  misc_feature (1)..(1): n is a, c, g, or t
ntttgtttctgagctattctctcaagagctatggtaaaggaaacagaacatttctgtacccaatcttaatgttatttctattagagccttcatatttgctagtgaccatcatacaggctaaagagctgaaaaataaatatctaattcagatacacagcaactctgacaagtagccactaatccagaatgcacactggctattctgaatcaccgattgtctagatcacttttaaaatttacctcctctcgaagctgccgttctcgttcctcttctagtttttggatttcagccaatgatagcgttgcctgggactgacatgctgtcgtattggactgctggccccacgttgaagaagaaggaagctagcaaaaaaagaaggcagaagagttcatgcagacacatggctaggaaacggaggggcaacaatgcattgtgtacagccagaaccttcatgcttccctccgctccatttataacattcaatttaaactgccttcttcgatccttttacatgactactctaccaatcagttttgcttcttttacttaattttctcttgtcacaagattattttaaaacaacttaaaacacatcaatattattgttgttttagtcataagtggtgtcctactcttttgcaatcccatagactgtagcccgccaggcttctttgtccatgggattctccaggcaagaatatggaattgggttgccatgtcctcttccaggggtttttcctgacccggggattgaaaccgcatctcctgcattggcaggcaagttctttaccactgagccaccagggaagcccaaaatacatcaatacacttttatctgatttactctcatgaaattgcaaatttgttatacctgccactgatatatactccaatatacagccataaagagagagaatgaaacaaaagaatcactaagtttttaatccaaggaggtaataaggacacgataccctgttctgaagggaaagctgaggtgggcagctgatgccaggcacggttttcaatcagcctttcccagtagggagttaaccaggctgtggcttctagtcatgagcacaaaatcggttttaatcgataattctgtttttcctatcccttaaaattatcgactaaaatcaagtgtacacatgagtcctgtatactttagtgttctcaaaattttgattatttctaagggaattccttggtctttctgggccagaaaaagattcactcaattttcacacatcttatggctcttaaaaacaaaaacaacaaaaaccaaattgaaaccagataataaaaacagcacgtgtgtgtggatcaaaacaaaatgccaaaatagaaaggttcttcagtaggaatctctaaaattggaactgatgggataagggtaaaagcagcttaaactgtcaatgatgttactggacagctctccaaacgagagccctcaacactactgaacatcctcaacatactgagcacccctcaacatgttctgcccagtggtgggtagtaagggcacttctcttacacgcacctgtgttctgggaggagagaggtacagaagggagctaggagagaaagacggggtaccaagtaggaaaagtggggcacaaataaactcttcctctccataggaaatgacacatttggaaagtcctgtcaaaactgcagcaagcatcactcagaaggcctgtaaaaacggagacatcctggtccccatgttcaatgaatagtcaaagataaaggcagagaatttgcatatttttgtaattctgatgcaatcagtcagcaaccactgttgtctaaaatcccagtggctatatcaccccaccatacccaggaaccaatcgccagtcctctgcagcagaaactcagccagcaccaagaatagattcactgcctcctgaaatggcctgttccccttacaggcacctctgaaaccctcctttattttgtgccaaaatatacttcactgtactttctgctcatgattcacaagactcttctctggagtaatgcagaacaaatctaagtctccttcacatgacagatctctatcatttcccttaagtcttatttgtgcataagaaatgctatcccatcactccatcaacactgcctcagggcattttccagttcaaccaacatcctgtactgcccagagaactgaagggttgtcaatcacacttttcagaacaactctctcccaagtgacaagcaaacagtagggaatttgggacatttttggacccctgaatgcctaatatccttcactgatacttgaaaatttacatttgccccctgctctgatactgttaccttactttttcaacaccattttttaagtaacatttctttaagaagtattaagaacaatccttaagaaatgtaaaaacagagagtctgtaggacttgtgccctgacttaacggctctcccaacctccagctcagccagcacttcagatgaggggagccaagaacacaggcctccctctttcccctcggctgccaggcagagggctggtttcccggaaagagcacaatattagcaattctcatcctggctccagctgcctgttgcaaaggctaagttagagacaagcactgctgagatatgggagcttgcttatgtctagcctccacttatggaatggaaactgcatagagctactgagactgttgtttagttgccaagtcgtgtctgactcgtttgctaccccatggactgcatggtatttctcaggcaagaatattggagtgggctgccatttccttctccaggggatctttccgagccagggactgaacctgggtgtcctgagaccatgggggccctgactgccactgccctatagtttgaaaggcagaggttccacgccaccaggaaaggtaagccaaggagacctgaggctcaggtccctccccaa

SEQ ID NO: 41152 - DNA, 5922 bp, Bovine  19866880651847
  misc_feature (1)..(1): n is a, c, g, or t
nccgggcccagtgctccctttctgctggctgctcagatcctcagcgcccgtgtgttctgcagctcagtccttcctttccctgagagtgagggagatgccctggacagcttgaaggacagaactggccctgtcacttgtgcagagaacttgacaaagtgatgcttagagcctggcctctcgggtctgggtttggactcctggtcctctgctctggtgggtgtgcagagccgtgtgagctgagccgtttcctgtgggtgccacttaccggctgccaaatgcaaagcacagctgattagtcaggggtgtgcttttcttgaccacttttatttagttcattgcttttgactgagtgttaaaaatattctgcagcatatctatagtcctcacgagcaccaaatgtgagaagaaatgcagtttctgagaaagcttcaaagaaatactggtctttatcttttccccagcccttccgctgaaacccaccagagtctttttctgagcactcttgttctataaatagaacgacagctctccttgggtagcccgagatcgcagctctcatccgctctctgaaagatgtgcgtgtgtgtgtgtgtgtgtgtgtgtgtgtgtgttggagtgtatttgttttaattttgcttttcttttatgtgtggcatgtgtagcgggagatgcaagaagaatactccggcatttatcctttaaaaagaacttcttttaacttttctgggtctcggcctgtgattttgttgtcttttagaatttttttcctttttctttttgcatttgggaaagcgatggaggtgattgcttcccctgcagaggtaaggaaggaagatgtttgggggcaaggagaggtgcctgggtccgtgagcaggagctgtggggtcccaagcagaggctcgcctggtggggcgggtggtgcaggcatcgtgggtctgcactgcgcggcgtggaagcagcggcctgtctttgaagagcatgttgaagtagcatccacgcgtgcacttgggtctgaaaagaatcctcggacgcaacctggcagtcctcccgtagcgcaggccggtttctgcccgaagctcctcggtcaggaggctttctctacgccatgggccagcacgtgtctctcccgcattgtcgggtcatgctgtgttcgtctctcctcctcagtgacctggaagagcggtgggtgacctcctcagagacaacagtgagggatcccgccccaggataagtgcagcggttcctcactagctttcccccagagttgatcctctggggtgttggagaggttgctgtttgtactgctgggccagccctgagggacccagcatggggtcgcgagccagctgtgtagcccccctgccccgggactccgagaggacgtcctgcggtgggaatcgagaggagcagctggacacgggagcgcggggcgctcaggtggacctgtgcacggccaggcgctggtggggtgtgagggggtgtgtgtatgtgtgtgcgtgtgcccggggtgggggcgctgtctccagcattcgcctgtggggagcagcagtgcctcccaggttccattgcctcccccgttaggagctggctgacggagggacatacagacaaacagcagtgaccaggtctcgcctctgacgtgtttgggtgacgtagggtttctgtgtctcatttcgccttacatcgtcttcagtggccacaggagcccaggtgcttcgtatagccacttaaaagtgacctaaagtgcagagctgcatggggttaggtgatgcgacgagaagattctctggaccgatgtccttgtccttgagcagcgtttctgcgcgttctgcctctgttgcacagggagatgctgggcagagcactcgttgggagcctggcttcggtgtcagggtgccttgctgcttagttttgactgttggcagctccgagtggtccagcacgtctggtgaccaggcaggaccctgagcgcttggcttgtaagtggtgcggctctgggctcagcgtccaggatgcagctccggggaggccctgccctgttctgggtgtgtgcgccgagccgagcggactgcccttcaccccatgcttctctctgcactagtgctttggtggcaggctggtcagatttgggggtggaggagtctcagtgatattgctggtggcacctctctgtgttgcagcgtgggtagacacacacgcccggcccatgatcagggctgagggccgaggaggggcaggcctgggccgcgccgaaccccgtagcaacctacgtcgacagttttggcagccggctcctgagaaatggcaggaggccagagggcacggaggccaggccaagaacagccgagaactacccagtgctgaggctggagaacaggggcctggctcctgactgtcgtcctgcgtgccctcgcccccttccgccgacccccacccggggcacgtgctgggcacacctgggcctctggccccgcctccccgccgctcaggcaggccatcgccccctggaggatcgggtcatcctgtccccactgcccactcagcctgtccataggtcggggtttgcgcagaggatgagaaatagttcttctgttaggccgttggcccattagagacacacagatgctctgggctgtcagtggataagcgtgcggtgccgtgaaaatacacactcatgaatccctttctgtgcttccagaccgtcatcaaagaggggatgctgaccaaacagaacaattcattccaacgatcaaaacgaagatacttcaagcttcgagggcggacgctgtactatgcaaagactgccaaggtgagactcagtggaggacacttggcaagaggagacctctcgagaagctgcagggaaagctgggctccgggtcctccctggggaaagacctttgattctagatctgatattctgagcgcgttttgtaagcctctggggtgctgggtcttatgtcttgtgaacattgatttttctaattcattttctttttctttaatgtcatatgtcaccagtggggagatacggggagggaaaggtcacagaagcaaccatgttacaagtagccattgttcttttggaaagattgaggatcactggcttaaaaaccctcttattttggcctaaatatctatttttttcctctaagttttctatattttttatcattaaaaaattgattattattgttttttgtatttggccgcactgggtctttgttgctttgcgggccttttcctgatggcagtgagtgggggcttctcttcatcgcgcttctttggcttctcgttgtggggcttctctcgttgcagagcacaggctctaggccctcggcttcattagtcgtggcatatgggctcggtatttgtggtccgtgggcttagtcgctccgtggcatgtgcaatcttccagaccagggatggaacccatgtccccatattggcaggtaacttcttacccactgaaccaccagggaagaccttttttctcttttttcaaaacacttttataaacactgtatagaaacttaatgtgtgcaacttgatgactttggagacaagtatatatacttgtgaagctaactaaaaatatgcttaaagtgtgttgggctttttggtgtgtgaacagaagctgtctctgggctttctagccatggtccttcctcccatgtgtcatctttgtaagatttatagctggaatcaccaggcagacgccagtgacagaagaggagctgttgagagcccctgaatcactgcctggcttaggcgactgtggtgtggcacacttcagatactagtgtgtctacaaacctagtttttggtgttctgaacaccactctttgtgttcagatgctaatattttagtattattaataaaaaactggaatctgagtagttagtattttgagatgtatccctagtgagttagtaaattaaaatttgaaactgtaccgagtaacttgtttagaaaggattctgaccacatccttcattaaaaaaaaagactcgtatagttattttagtttaaggggcgggggggagttacttaaaaggctgagtcttttctgagttgctagtgtttcctccagaggggacagtaaggttaacgggagctggggggctgtgacagggggacttggcggggagaggtgagtggggagggggtgtcccaggcctgcttctagacccttctttctctccgggaccagattgtctctgccgtgcgcctttgttttctttcatggctgggtcccttctgtttgggtcagtctgtcctcccctagaatcgttcattttagccaatacctttctccccaagcgccaaggtggagaaagtaaagccgaagggacagaggacctccaccctggaccccggtgtggggtgaactcgtgggaggacgtgtttctgacttaactggcgcaggtcactagggagctccctggacttagaaaaggtcttgagcttccccgtgagccctgcacgctgtcagcagtgggtcgggtgaggtcactcggggtccatgtagttctcacacgcttggctggggtcgagggagagtggtgggcagtccggggccgggtgtgccttcgccccctctgactgtggcccctgtgtttttccagtcgatcatatttgatgaggtggacctgaccgacgccagcgtggctgaatccagcaccaagaacgtcaacaacagcttcacggtgagtctgtggacgacacccctctcgattcctctgccacgtgtggttttcctgtttaatttgaacgggtgtgtgtgagcagttcagacttttcatcctttgccctctgcttggagcagttcctgataaattttgagttcaaggttcaaaattgtacagaggctggagaaaaaccgagaatttggcacatgtaagcacaaaagaacgagagggtcccaacgaattgtttaaacacgttgcagtttgcgtttctgtaactgttttacacggagattcatttttcaggattgctgtagaaaatttgggaacacaggaaagaatgtggaagcaattagaaaataaccgtaatttagccacctcaaaatagaatgttgatatttctttaacagttgtacacagagaactgtttttcatgatcgttgtagaaaatttggaaatacagaaaagaatgtggaagcaattagaaaataactgtaatttagccacctcaaaacagaatgttaatattttagtatacctgttttctttttaaaacttaaccctaccacccccatgtatagaaattatgttgtactttgtgcaaaagttctaaatgcataaaatcatgtgacctcagcagcccagctgctcacgttagagtgattatctttacgtctaaatgtctgtctcttgagcagcatatagcatgagatgacagtgatccttttgatgaaacagctgtttgattttttttttctcttgacaatttatggtgatcacttcccgtgttgattgctttaaatgttcatcatattttttaatgtctatacagcatttcttgtatgactttacaattttggcttcaggggatgactttagaacctactgtgtaaggtatgactctaatattaataacaggaatagagtattttacaatatttttcttcatgttactaagtaattttatctagaaatacagtatgcttcccaattttttcttttttttttttcctttccaatttttaaaaattcttttgtaactcagtcaaggtggataattttcttcgtgtttagatccaacattttgagttaatgttagtttcagctactttcaggttttattttatttatttgtttatggattgattaagttgttgctccaaatgggatattccttcctccatttaaacttctacttattttattttggtgtaattaactgctctggttttc

SEQ ID NO: 41153 - DNA, 976 bp, Bovine  19866880655779
  misc_feature (1)..(1): n is a, c, g, or t
ncagctacagtgatacaggtatcaataagcaaatgtctatgtcctgcagctggaaagcaggcactgctatggcagaatgagatgcagaccttcgcagctttggccttctccatctgctgaagctgttcaagggcaggtgctggagtcgcggggtcaaggggaagatcccatacgctaccgccttcccaaactggaagacaggaaggaatagaggtgatgggtatgagagctgacacacacggctaaatatccagaagcataaagaagctgctctcctgtcccagagcgagcttcatcgcaagggtctgctctgcttctaaacacactgaactaccagcaggctctagtttataacaatacccgtctgcatatccagaaggaaagaaagcactaggcaaaaagatgagaaaatgaggcaacaacagcagccttttctatttcctaaatttctgggtacctacagtggtaagttacacatcaatccttgactcaaaagaataggtcatcattacttatgtttttatttatgctttttctccaacgattaaagacaatttaaaagacttttctacaatgggttaggacaatgttttttaaaaaaaaaaaagaggaggctcaagttcaggaaatctatctactaaagaatttccagcaactccttaagagctattttcaatcctttgctgggacctattaaaaaaataaaaatttcctttaaaaaccacttttcattaatattcactacaaagcagtcccaaaattgatttaaaaaaaaataacaaaaaactcaattataaaagttattagaatctaaatccttggagctatactaaaggccaatctaagtttttacctgtaggctgtgagggtgctggctggagttcccagatagaaccagtatctggcactgacacagacctagttactgagggaatgatgttctgatcagatattctgcaaaagggaaattagaaaa

SEQ ID NO: 41154 - DNA, 1026 bp, Bovine  19866880661523
  misc_feature (1)..(1): n is a, c, g, or t
nacacccccccccacacacacacctatttaaagcactgagattatagtcaacaaacacataacttgctttttcatttaatacactgtgaatatttttccaaagctttaaatgactgcatggtagcccatcctatatatagcttaattaatccatttctgttggacattcgggtgatgtccagtttagtcattactacaaagtaacaggggtaacgagtatctttgaactaaaactttatacacagctctgattatttcaaaacaaatccgtacaattattggcttaaggtttttaaatacatacaaccaaaccagttgtattactttatatacctaccaaatgtagagggagtgctaattgttgagaaccagattaatagaaatacttgatttgggaggaaaaatgtcactcactgctgttatgattcatgttttttggttatgggctagatagatctttttttggcagtttattggttgttcttatttcttcttttgtacattatttatatcctttttccaatttactactgagcacaatggaataaatataagagcactctacagacagggaaaataaatctgtcatatatggtttctgttttccatcagcttgtcatttgccttttggcattgtgtaatagggtttatgtgggcttccctggcagctcagatggtaaagagtttgcctgcaattcagaagaccaggttcaatccctaggttgggaagatcccctggagaagggaatggttacccactccagtattcttgcctggagaattccatggccagaggagtctggcaggctatagtccaagggatcacgaagtgtcacaaccgttagtcacaactaagtgactaacacacatacacagttaaggtttgcatcacttttccttcattttttttgttgctttcaagctaaggaaggtcttttctatcttaagatcagaaaaatacctacatttgaaggcttcttttttacataaacattaaaggaagtataatttcatgaaagggataaa

SEQ ID NO: 41155 - DNA, 1686 bp, Bovine  19866880693108
  misc_feature (1)..(1): n is a, c, g, or t
ncgctggtgctaaaatagctgaagttaagctaacactgacacctacctaaaaaccttagctcttatgaacaggagcatccaaagtctttcatggaaatgtgatggcttcctatcacgaatatttcaaagctgactattggacaaagaacgtgaagtggaaacatcaatttccctaacgaggaaagggcaaggggaatcaagtctgatggtcagacaacacgaattctcctaatgcatcaccctgccatttcctacattttgtgactgatacgcacccacaggaagcctggaggctgtagtttctttcttaactgggtcttacccgtaaccggtagtcatccacggtccagatgcggcttgcaaaatcatttgaagctgctaagaggtaagatccctacaggaaagaaggggagaaggaaaaacagagaactttagttcacatgatacaaatttcctcataccaaactcaagactgtttagatgactaaaactacatacctgatctgaataccgtcataaccagaattctgttaactaatcaatcccgttaacttcaggcctctttcctgagcctgctcaacctcgcctgatggctgtagatattacacctccagctcaaaatggaactcatccccctgtgctcacttccaccccacttcggtaagatcaagtactaattctctacacccgcccaagtccacgagcccagaggcaccgactccccagcctcacctccccactgtcccccagctgtagaccctctcctttccacctgcaccgactcggcccaaaccagagccttatcgagtctggagagatgctgaccaaccggattaccaagacctgtctcccctacccatcttcaacctactcgtgatcagcactgaatttttaacctattggcatccttctctaacattaagatagaaaacagcagagaaaccaggtaggttatttttaaatttcaagaatcagatgtcaaaaatggtttctaaacacctctcaactcacccatttccatggatattaggtacttacagcactatcaaattcaatgcttgtaattcctgcattactgccagacagggagcccttgaactcacatttgtctgcataaaaacaaagatgccaacataccaattaaaacgaggcacttgaaacacaagggaagctaattacatggtcaaaagcaacttcccccgcatctttacagaatcaagtagcaggacaaacagcacaatgagacgggaatgttcggctgaccagtccccaaagcaacgaacgcacaagagggtgcggagcccagcattttccggttggctcttacacttgctctttttaagaaatttagtgtcatcaattcccttcataaaagtgcagggatttaaaaacatgtcaactgacctagagtttatttagctatttaatttacataaacacatctctgtcaatttaactatcactttaaatggaaactgaccattaaaatttcagaacccaaggtacgaaaaacagttttacttgtagttagtataaactggctagtcattagatttccagtaaaactagtttggagtttctggaatttatctgtccactctacctatgtgaagcaaggttccagcgaaccaatcgcctgccagtgctctcctgaagcccatctcacccccaggcccagccactcat

SEQ ID NO: 41156 - DNA, 2900 bp, Bovine  19866880739988
  misc_feature (1)..(1): n is a, c, g, or t
ncacaagcttgacttgacccagctgagaactgggtggttggcttgccttccaggtgcctcaactgacttactgcaaaggccaaatgtcatctctgatcatttattatctacaaccatggaaggaaaagtagcatctccctctgagaggttccatctccctgcctccctgtcctccttcctgggacagaatccgtccttctctaaggcgttcaacgcccagctgggtttggacacactttctgggatcgaaaaatagaaggcttagccaggcaggtctggagcctgggcatgatgccccacttctgcggggctcagcgacatccatgctttaaagcacgggggttgaatgaagttacggcttacacgcttcccacccatctctgatgtttcgtaaatctggggacggtggagtgagagtagagtccccaagggtcaggctcgctcctccacctgagccatctggggaccatcactcaactgacttcacgaggttggcaagcaacagagacagagtggctcctttggttttgacaagaagcgggaagccccgggtgagaagagctaaggcgattagaataagatgaaagtctttgctgcttcacttggcaatgtttcaggccagatcttatttggggaggcttctattctgggggcacccaacagactcaggtgtaaggaatgagttatttagaaactgtggctaagctcagaaaagaatatgaggtttttgcctcaacatgaaaagaggaactggagttaaaataagccctgatcagtaagtactgaagctccgacaaccccaggactcggcctgacggcgcgcgtggtttaaccagctcctcgtgcacagctgctcggatcgtcttgaacgctgttctgtttttgcaggaaggcctatccttaggagtgcaaatggcccaggctgcctcggcacccccagctccccgtaccctggttactggtcaccaaggaggtcccaggcccagtgcccgggttggggaaagatgcgtccagagggcctggtttttctgagatctgcctggctgagtgtaggcctcaggtaatgatgcctcatcccccacaactctacccgttgtccgagccatgggtgagcccctgctccaagacagaggattgcagagaaagctgttgatggccgagccaaccaggttccctctcagaactggcaactcagtaatgagactgttggtgggagcagggcagactcaccaagaggggctaagaaaggggccccttgcagagaaagccgttgatggccaagccaatcagtttccctcttaggactggcaactcagtagtgagcctgttggtgggagcagggcagaccccccaagaggggctgagttgtggcaggtagcgcctggactgcagggccccaagcccttctggtccaggcccagccttctccctccttgcgctgtgcatctcccccagggctgcccacactccttgcacacgttagccaaactgattctctgttcttttcgacccccaaagcctggtgaggccccaggttcggaagctgctgcaggactggcagccgttccctggaaaacgtgatgtcacggcagcaaggagtgacggcgagagggtccagacctgggtgcagcttaagacggttacaagccgtgagtgcaaactctgtacaagaagccgcagtctggccttttccagcttacgacctagtcatacttaaagtcttcttccctttgaaggaataaaagaaaccacaaggggaaaaaagatcaaaagccccgactaacttttaacttgagagtttaaactcctttcagcaaaccaccaatcaaggacaccaacctctgtggggaaagttcacacagtcctagacttggggaaaattcaaggccattgagccccactggctccccaggcaggcctccccttgggcagtcttgtccctgacaggtgaggagcccacaagaagaccacccatcccagtggtgggtggctgccaagtcttgaaaagatcgtctagtattggggtaccaacatgtattcctagtggcaaggctgagacatgggggtgtcccagaccatccaaaaacattcaaatgggcgttctttagataccactgcagatgcacttgtgggaaaggaccaagaagccagaagctacactcagcctgacctgcgtgtgtgtccatgagagtgcactcagttgtgtccgattctttgcagccccatgtaccccagggacctgcctattgtccagttgtctgtcccactgcctcctgagtgtgtgttgagttgcttcagccgtgtccaactctgtgcaatcccatggactgtagcccaccaggctcttctgtccatggggattctccagacaagaatactggagcgggttgccatgcccttctccaggggatcttcccgacccagggattgaacccagatttcctgcattgcaggcagattctttaccgtctgagccaccagggaagcctgttgcatcctagttctgtacaaaatgcatcattccatttatctccggaatcaatgattgcacgccacctcaccccttccacttttactttcttttcaactaacccccctggtcctgtcatggctccttcatgatgtagtgtcccgaccctcgtgtatcctggccactctgctcggcatcggggtggggcaccccacctggtggtgcccctccccaggggctggagagctgagtgtctctcctctgcccccaccggcgagagcacggtcttctttattcagcccactgctgtctcggggcagccaggtaaaaagagctcccccggcctctgcatctctgttgtcatgcattgtgatgacgcaacacccgtggggcttggcacacaaaccacatggagggtggttttcctggg

SEQ ID NO: 41157 - DNA, 1129 bp, Bovine  19866880760414
  misc_feature (1)..(1): n is a, c, g, or t
ncttcacatatgcgggccttcaaattgcacccttctataactgaggaaattctagattgcctgggctgtcattgtcttttttttaagtccttgaaaatagcctcctagcctttgaaggcacggtttcaacctacagtttaaatatttaaactgcatccgaccacctaattatacgtgcgtgtcacgccttcactctataaaaagaaagaagtgcccctcagttggccctgaggagtttctaagcaggcaagagttccccgtgagccaggagatcttagtgagatgagatcctggctgtagccttgagcacagcctgggggggtcacggaagagaaatccctggtggaaccgagggaccctggggccagagtgcctgcctctgatgactccatcctggactcgctgtggggtagccaccctcttcactagcatgtttatgggtcttaggattacatattcctccaaagttatacagttcactgacacaagctacgacaagaatgaaccttgaaaatgtgatgctaggtgaaagaaaccagtcgcctaaggacaaatgctgtgtgattccacttacatgagggatctggaggagttaaattcatggagaccgaaagtagaagggtggtctccagggcatgggagaggagggaattggggaattgatgtttaatgggtacagagcttctgcttgggatgacggaaaagttctggaaacggatggtggggaccattgcaggacaatgtgaatgtcattaatgctgctgaactgtatgcttaaaatagtcaggtttatgttttgtgtatatatatatattatatgtgtgtgtgtatacatatatacacattacatatataatacatacatatacatatgtatttatgggcttcctaggtggcactagtggtaaagaatctgcctgccaatgcaggagacacaagagactcaagttcaagccctgggtcaggaaggtcgcctggaggaggaaatggcaacctactccagtattcttgcctggagaatcccttgttcagaagagcccggtgggctgcagtccatggggtcacaaagagtcagacacgactgagcgtgcatgcatggtggaatacatgaggaataacattctctgaa

SEQ ID NO: 41158 - DNA, 2716 bp, Bovine  19866880760804
  misc_feature (1)..(1): n is a, c, g, or t
nctagggaaatagggacccattccaaatcaaattcataagataggagcacagaatagtatacatttcaatggacagccttttctttcaggacttctgaatgctaataaaaatgacataaatgtggatttggagctgtcaaatacatttacggccagcactattaagctggtgagtaaatccctgaattaatttgcaaaatacagcacatttaatgccttttcctggatcctagctttcattagattttcatgagtctaaaaaaggtcaacacctactaattaaagactttatttagattagatctttacagacaaaaatactactgcaaattctaaaaaatatctccgtggctcatgcctaaaacattgctctgtctggcaggtgacaaagtgccaaaacctcagaaatgatcactaagtgccagtctaccaagagacagagctcaaaagaccaaagatcgtcttatttcatgaaaggccttttggacttggtctcttccaagattcagtaaatattagcaaagagggagaaaattatacaccaagtaagccatctgtggaggaaaggtcctataattagttagaacatgactgatatttgttcctgaaaactataaaaaaaatgctgccagatgctctatgttatttctgtagatttagtagaaactctcattttactaacacagtttatgctccggcacaaattatgtcagtattaattctgattagtgttcacttcctcttcgacagcaaaaaggtaatacttctactaatggctggtatctctgattttcttataggtatttttactgaccaaggagtaaaataaaagtatttctagagctatttgtatttatttgcaaggtataattgaaacagactatctgtgtagatactttgttttaatcaccaaatctctgttcttatcattttattgttaagtttcagcaattcacccaagctcaggtcctagttcaccactctgtccacgtaaatcacccacacaaatcaagaagcgtctttgagtttccacctctcacacaggggtgacgcccagctgcctaacagcacagggctatggcgcggctcagaggaaacgaagcagacccaggcgggaccgtgctgcctccgctggaccgcgagcacacgtgcgccccactaaggaagcccggcaacatgctccctacagagccctgcagcctgttctctgaccgcgtcttgtcaaaagtacatgtatattgaactgagtatcaaaatgtggcgagtgggctatgcctcagttcagacatctgcgagagggttcactaactcctctctcctgtttcaatgccatcccattttgagtactataaggtcattcctaaaataaaacgtaatcaaagagactcagttttgatcttagaaggattagtctcccaggtaggaaggtgtccaatatgtactgcggaagagtagagggcaattaccatagctccagaaagaatgaagtggctgggccaaagtggaaatgatgctcagttctggatgggtctggtggtgaaagtaaagtccgacgttctaaagaacattattgcattggaacctggaatgtcacatcaatgaatcaaggtgaattggaagtggtcaagcaggagacggcagagtgaacatcaacattcttatgaatcagtgaactaaaatggatgggattgggtgaatttaattcagatgaccattatatctactactgtgggcaagaatctgttagaagaaatgcaatagcccgatagtcaacaggagtccgaaatgcagtacttgggtgcaatctcaaaaacgacagaatgaactcagttcatttccaaggcaaaccattcagtatcacagtaatccaagtctatctcccaactgtaatgccaaagaacctgaagttgaacggttcaacaaagacctccaagaccttctagaactaacaccaaaaagagatgttcttttcatcataggggactaggatgcaaaagaagtcaagaggatacctggagtaacaggcaagatgaccttggagtataaaatgaagcaggacaaaagctaacagacctttgccaagagaacgcactggtcatagcaaacaccctcttccaacaacacaagagaagactctacacgtggacatcaccagatggtcaataccaaaatcagaatgattatattctttgcagccaaagatagacaatctctatacagtcagcaaaaacaagaccgggagctgactgtggctcagatcatgaactcctcgttgcaaaactcaggcttaaactgaagaaagtagggaaaaccactaggtcgttcagatatgacctaaatcaaattccttatgaatttacagtggaggtgatgaacagattcaagggattagatctggtagacagagtgcctgaagaactatggacggaggtttgtaacactctgcaggaggcagtgaccaaaatcatctcaaaaagaaacgcaagaaggcacagtgattgtctgaggaggccttacaaatagctgagaaaagagaagcaaaaggcaagggagaaaaggaaagatatatccaaatgaatccaaagttccagagaatagcaaggagacctaaggccttcttaagtaaacattgcaaagaaataaaggaaaaccacagaatgagaaagagagatctcttcagaaaactggagacataaagagaacattttgtgcgagg

SEQ ID NO: 41159 - DNA, 1813 bp, Bovine  19866880765078
  misc_feature (1)..(1): n is a, c, g, or t
natgagttctcttagaagattcagcaaagagggcttcagagatacttcaactgcttaaagacttattaccttgaggtaaaggaaaaaagaaaataaaagggaacacatgaaaataagaccaaggccacttgcaacccaatgacaacacacgcccgaactgtagagacaagcctgaatggagaacaattgtgtctgccctgctcacacaacaagaaaacatgatgtgacccaaggaaatgccattgtgaaaatctaactatggcttcatattattacctggtgaaaaaaaacagaaacatatcatcttttaaaaatgacaaaatgtcgtctttcttgtatagttctagttaacttgaaaatattttaaaatattccaagagtaaaccttcttctaaaagggcaaaacttcaaatagcactcaatatttatcttctatagtcatcaacttaaatagggacatttatcttgccgtaccttcagggggtctctgtaactgggattttcgataaaacagcatgtaggcactttcttttccttgaaattgctgttcaatatccttttccttgattggttggactgtggaatcatttatatcaaaccagtggggacaggagggtctatcatttaatgttaaggattctgaagtaagtgtcttgaaaagtcgttgatcatttctttggatatcagactcagcctggagagaagaatccttcaatagacgaactgtactttcatctgaactgagcagaaatatctgagaatgaacctgcaaaaactgtacagaaacaaaaaacaaacattaggttaacaaaaaaaattttcattgacatgattaaaaaaattttcctttctgtgtatgtcaactttttggcctggccagtttaagagggaaaaaaatttcatttgggccataataaaacatttaataaaaatcagagtgctttctgttgaacagtctaatagctatatccagggagaaagctgccatgacacagtcttttttattgtttttttttttttttgcacattcctacccctaggccctagcctctcagcacatgccctgtgatgacacaatcttaaacatgttttaattatatctcaataactgttttaatgctgttttaaaaagtctttactgaaacagattacatagaataaacactttcaaaatgtttaaagcaatccaaagcacaaaacaaagaaaattacacaatgaagcatcatagaagataatcctgacaaaactatgggatatagtcataattacaggcttacatgaactaaattaagtattgtctttcctggaagctgacaggctagctcaagaaatcaaaacattgaaggttaagtcataatcccaaagatgctcaaattcctccagctaaaggattaggaagaaaaaaatttttcttccccagcctaccccacctttccacccctactccattcttctctcattccctaatttctacatggcctgtatctcttccttttctctcagcacaacacagaaaatcacctgggggcatatggaacattttcttaactcactgaacaacagagaaaggtgattttctcatttttctcttggaaaggaagaatttgtaacaatccatactctgatcaaacagatgacccagaggtaatactgttaacactatatataacagatagtaatatagtttcagtaatgaatactttccatatagcaatttttttctttgttccatagttgaagattaactattttaaacttcaaacttcagtgtagtctagttccagtaacggcagagaattttattttttagag

SEQ ID NO: 41160 - DNA, 936 bp, Bovine  19866880772894
  misc_feature (1)..(1): n is a, c, g, or t
nacacacgtacccacgcttcggtgtggccgtgtttctgttttgtttttcctgggagtcaccccaggaagggacccgccgggccacgtggaaactctgggtttggaggccatgcctgcctctcctgacagcagccgcccagacacacgtgtgggcacctttccatcccctgccaccagccctggctgcccagaacctgctatcagctggctgaaagggaaacctagggccttcaaaaggccacgtgtcccacaatggcttctatacacacaaggacaagctgcacgaaagcccgagctgcctttagacgctgggcagaggacagggcacgcagcgggcagagtccaaacccaggaaagcatctcccggggagagcgaggaggggcgtccagcctgggacctgtgctcacgggggagcggcggacccacaaggaaggcaatgcgatgcggtcaggaggtggtgcccacgtggggccgcccaggaccccagagaggacaaccaagaacacggcacagcccgtcttggtctctgaacctgccgaagcctcagcacgccagcacgttcggaagccagagatgcgtgagcacggccaccgccgtcccagaagttccagccaccctcagccctgcagcctcaccctttctgagttttccttaatggccgacagcagctggaaaaggtcaaccagtcaactcttcatgaatttctcaagttatttcccagtcagacttctacgtaccagcactgagctaacaacaggcccgcttggtttaccccatactcacaggttttctggttcagagttaaagggatcggcattaattagcaatcggctgatgactgagcctccaggcagcgtaccagacatcccggcgcgaacatctgctggggagagaacgggagcagaccgcactggctgggggcccggattcaagag

SEQ ID NO: 41161 - DNA, 1765 bp, Bovine  19866880814120
  misc_feature (1)..(1): n is a, c, g, or t
nttggcaactttgcctgtcgggtgttctgacttttcccttctccccctccctttagggaacaagggagccgtgggggtgtcgttcatgttcaacggaacctccttgggatttgttaacagccacctgacttcaggaagtgaaaagaaactcaggtaatggcgctcactccccaagagcaacttttggggttatttgcccagacagacctcaacacctgaaccctgtaagcccttggccacgaccctgccctgttggcctctaaggacttttcctgtggtctcatcaaagctaactgtggcacaggggtgtgggtgaatcttgcctaggggacagaacagacacttccttgtgtcaccccagaggcacctaaacaccactccgcttctcaaggggaaagcctccttggggcaccgtcacaagtgagagccctatttgcctatggtggcgcagtcatgcagagtcatcgggaaggctgatgactgagtccctgcagagcagatgctcccagggccctgccctgcattcccagttcagcccagggaccacatcagatgggtggttgctgcagacttaagtctcacttccccacatgtccccctctgacttcctggcccatggagtagggaacccacggtcccgtgctaagctggccgctttttcgtttcattaggcgaaaccaaaactatatgaatattctccggtttctggccctgggagacaagaagctgagttcctttaacatcactcaccgcttcacccacctcttctggctcggggatctcaactaccgcgtggagctgcctacctgggtgaggggctctctgcccagggccggggattgcacaggacagaggctcctttgagctgactcagggtggaggtcgtggagacccacagaccgagctggtccagaggggccactcctctgggactcgatactgttgcaactatggagccactgcctttctttaccattcgcctctgctcaacctgggcttccctggtaactcagctggtaaagaaaccgtctgcaatgcaggagaccccagttcaattcctgggccgggaagatctgttgaagaagggataggctacccactccagtattcttgggcttccttggtggctcagctagtaatgaatctgcctgccatgtgggagacctgggcttgatccctgggttgggaaaatcccctggagaagggaacggctacccacaccagtattctggcctggagaattccgtggactgtatagtccatggggtcacaaagagtcggacacgactgagcagctttcactttcactttctgctcacacctacttcccacacacctgttctggccacccctccctaccacctctctgcccctccggtgccctagctgaccagcagcagcctctcaactcaccagtcccagatcccgaggaaaggctgaagtctgtggggaccagctcaattttctccccaaatcatgggtcaccaggtagcctaaggaagacactcctgaatttggacacccatccaatgagcagcagtcggagggggcccccggcacagatggccttgctcccttggggaaggtaaaggattccgtgggaagggggtgaactggcatggcccctagacgtggtaagaacgaaatgcggtcacatttgtgctcctaaaagagggggcaggggccaggcctgggagcagaaccacgcctgtctgctccctgtgtaacaggagtcctttgcactggtgtctgtgccgggggaggg

SEQ ID NO: 41162 - DNA, 2255 bp, Bovine  19866880842089
  misc_feature (1)..(1): n is a, c, g, or t
ntgtgtgagggggagatctcccagggtacctgtgagccccaggggtgagaccctcagatggaattaagtggttttgtgaagtcgctttgggtccggcattggctgaggcttttcagatagtttccttgcaggtcctgacagctctctgcacccagcaccctgaggagctggctctgcctcagggttggagcaggttcaagggatcttgcctgaggttgtggtgatctcttagagatcagtattaccacaaatgtccaaagtgatgttccttttatgtagaaattaggaaataaatgaagcatgatgttatccggtaagcacgcctctgaccgaagccttgaaaactgactcaggtttgttttaaaacataattaaattttattatttacttttccttctgggaaggaagaggaggctgcgaaatgggcccgggaagaagaggaagcccagcgtcggttagaggagaaccggctacggatggaagaggaggcagccaggctgcggcacgaggaggaggagcggaagcggaaagagctggagctcccagcggcagaaggagttgctgcgccagaggcagcagcagcaggaggctctccggaggctgcagcagcagcagcagcagcagcagctggctcagatgaaggtaaagccaggcgccgaccaggccaccggtcagaggagctgcttgcctgcatttgtggttgggtggatgctggcagtgcgatagcataaactattctttatgttaaatattgagactttggttttttgatcagcaaaatataacgatgcatttagagaagggaagaataagtaaaagaggctactacatgagcagcaacataagcaaaaaccaagtggatctgtatggttcataaatttaaacattggcacctactgtatcaattcagcagtgctaaggcaagaataaatgagacaaggcaactgtccccaaagagcccatagactcatgagtgccagaaactcaaacatttgggtgtgtaagtaggaaccatcatacagggcttgaaacatagctgacatggttattgaacggtggattgaggtgatgtatgcaaaatgaggttttaggagaattcaaagccttatttgaaatagtagaaagtgagactgggaaaccagtaaagagagtgtgatggtggtggtgagaatgaatagggccaagatgagaactggctgacattaatgagcaagacctagtgatgctctgaatctgagggatgagggcaaaagttggaatggctcttagatagtaggccttccgtgactgggaaagtagtagaactgttgatgaaataggagtaagtggagagggaggagcagatatatggtagggtctacaaaacttctcgtggagtatatggctggtcatgaggcttagtatctcctatcttcaaggagctcgtaggataaagacataaacagaaaattggaatacagtggagtaagtgcagtgagtgagggagctcggagcagtagttctcagggtgtgatcacctgggaatttgttgatattgttcagttgctaagttgtgtctgactctgtgaccccatggactgcagcatgccaggcttccctgtccttcactatctcccaaagtttgatcaaactcatgtccattgagttgatgatgccattcaactgtctcatcctctgtcacctccacctcctcctgccctcagtctttcccagcatcaaagtcttttccagtgagtcacctcttcgcatcaggtggctgaagtatttgagcttcagcttcagcatcagtcctttgaatgaatattcttggttgatttcctttaggattgactagtttgatctcctttctgtccaagggactctcaggagtcctctccagcactgtggttcaaaagcatcaattctctggcgttcagccttttttatgatgcaactcttgagcatctatacacaactactgcaaaaaccacacgtttgacttatatggactttgtcggcaaagtgatgtctctgctttttaatatgcagtctaggtttggtttgtcatagcttttcttctaaggagcaagtatctgaatttcatggctgtagtcaccgtctgcagtgattttggagcccaagaaaaagtctgtcgctatttctactttttccccatctgtttgccatgaagtgataggactggatgctatgatcttagtattttgaatgttgagttttaagccagcttttttactctcctcttccgcactaatca

SEQ ID NO: 41163 - DNA, 1198 bp, Bovine  19866880859705
  misc_feature (1)..(1): n is a, c, g, or t
ntgagcctgagaaccttccagactggaggtggagctgctggtgctgggggtgggcaggactctgagggccggcccctcaagccccgtttcccacactgatagtggatttctcgtaaggccctgactcccgccccgacatggaaagggaagtggccctcggaggaggagcgctgactccagagtgaggcctggggttcctgaggccttttgcaatgaccctcctcccggggacgtcaaggcagggcgagcagtcctgatgggtccgctggaacggccctgaggggaggccccagggctggcatgtaaacagcccactgccacagtccaagtgcttggggcctacagctccatcctgcgaccctcccaccctcgctgcttttctgacatccttcctacccagaagaataaaggagaaaataaaagcctccgctggtccaccgtcaaggtgacgtttgctgcaaacttcctgtcttttcttgtggttgagattctgccctggctggtgagtgtcgaagtcaagacaggaacatagactcagattttaaggcaactttgggtgaagagggaatttgaaaccatctgcctcatagtctccaggtcttctttccccatttagaagaaaaccccgggtggcttgagccgttcgggcgacagactcatgactcagttcctggtccctgacagtggccgtcacgttgctctggtcactgtggcttttgaagagagagaaaaaaacaaaacaactttctaaaagctgttccgtcacaagtgtccgggagggttgacggttgagccattgttgtttagctcaggaagagggtggcagctgttattgttctgagtggtcaccaagtgaagtaaaagattccgtctgagccgctgggcgaaggatgtggctcgaacacagacttcctgacgttgcacaagaggagcagaagatgcatgggcgacagaggccacgcctgcggggccgccttgcaggactcggcggccgtgtggtccacagcggggcccccggtaggctccacggcaaccaggcagtccctctaggctgtgacagccacattctagaagcctgcattttcatgtaattttatttcattttagtgtaatctgctgtagaacaaggacaggtctgtttcccaagcttctgggtatctcaaaacattttccagttgccatcagatccaaaaggaaa

SEQ ID NO: 41164 - DNA, 1231 bp, Bovine  19866880931372
  misc_feature (1)..(1): n is a, c, g, or t
ncggggtccttttctaccctctgggatgcgaaaggcaagcacagtgcccccaggccgccggggatccctgcacccacacacccgcctgaggtgtaggcttggctctgggaagcgaacgcgaggcagtcccagctctccccacggccactgccacctgtgggagcggcgtctcctgtggtgggcgtgggaccgagaaaaggctcatgaacaggggtgcgcttatgagcaggttatccctcatctgggagaagcctgccagacgagataaatcagagcctccagacctgggaccttcgagctggaggggagcctgggtttcctctgggcctgttctccaagtctgctgctagggctctccggaggcttagagagaaaggtggggagcttgctcagcctcagtgagggcgagatcagtcggaatgcatggatccctggcctcctgctgagctcccatcaccactgttattcagcatcagaagctccctcttccttcccaccctgtttctctgaacggtgccttagcttgtcattcagagtctggtgaattttgcccgaggtgttgcctttgctaatggaattgtccctaaaccacaggggctgggctcggccaggtgaggtgcccgtgctggtggctgaggtcactgtagggcccaggctcacgcagctctatggtttcactcctctcatgctttcagaattgcagaatacctgcagactatctctgacctggagaccgagtgccaggagctacgcactaagcttcaggaccttgaaagagccaaccagaccctgaaggatgaatatgacgccctgcagatcactttcaccgccctcgaggagaagctgcggaaaacttccgaggagaaccaggagctggtcacccggtggatggccgagaaagcccaggaggccaaccgcctaaacgcggagaatgaaaaggactcaaggtgggagaatgaacccgcagtctgagtctcagcgttggtacagtagaacctagcaaagcaaggcacacctggcagctctaaccacagggagggggcgtcagggaacaccgacagaaggagaagggacagttgtgggtataaaagagacttgcgtttatgagaacacttttataactgagccaaggattacctccctgaagggctttggcacattactgtatttgccagtgaattctttccatgtttcaagaagaaaagctaattcttaacattataaattaaac

SEQ ID NO: 41165 - DNA, 1573 bp, Bovine  19866880952318
  misc_feature (1)..(1): n is a, c, g, or t
ntttctcagtacacaggatctagtgcacaaaagttccatttctgaatattcatttaatgcttttcaatttttatggcagttcacgaggaaagatagaattattacgtgacttgtacctgctccaagtgtttgagaccctcttcgtcatctggctctgtgggaacactgcccattccaggagcaccgacgactggcgtctccactggccggagggcaggactagggctggggacaggaggcgggaggatgaggagcggagaggctgtatctgaagggatctgagataggggctgctggacagcaggaaccacttctagagaaaaaaaacgtagacagatgaaaatcctctaaaatagactcttagaaagaataactagcatcaagttgagcagcttgctaaatgggttcaacagatttgtgaaccatgtcatgaacactgctcctacttcttatggagaagtgtgtattcctccccagaatgacgaagtgctgcagtgccatactgtgtcactagagtatctacccaatagttataggtcgacctcttgaaaacaaacagaattagtccaatcccttctttacatcatgtctctgagttgtaaagacagtaaatagtactgcaaatctcctcaaagacactgtatctcagcacgtgaaagtgaaagttgctcagtcgtgtccaattcttaatgacgccatggactatacagtccacggaattctccaggccagaatactggagagtgggtagcctttcccttctccaggggatcttcccaacccagggatggaaactatgtctcccacattgcaggtgggttctttaccagctgagctacaagggaagtataaaaacctttattaaaaacatctgcaattactttgaataattacctattccgacttataattcataataattcgatttataattcgacacataattcaatacaatacattctgcagggtaacaaaaagttcactgggtctacctgtacagagcaggaggttcttcacaataagagtaaagactacaaaagaggttctgtcttggttcctatttctaacctctcagtattcaggctcttgaggcggaaagggggatggaagtaattagatacaatcgtagtttcccctttgaaatcttgtttgttcaattatagcaagcttctccaaatgccggttcctctccaccctttgccagacttcttaaaaggacagtgtgacgtctatacaactttccctacttcaccaccacccacaccagctataaggtaacttccacttccaacagccccaaagcgtctctcccaaaaataagcattcacccaaagtgctcaaacacaatggtttttcctagtccccatcactgaaccttaagtctgacattatcttcccaattctaaactggaacgttctccttccttccttttcctgcactcttcttcctgccttgccaaaatttttctctggctcctctatctaccctctaaaaatagggattacccaggttctattctcagtccacttcttctcactcctaacagtgcatgtaaccttttaaatgttcatt

SEQ ID NO: 41166 - DNA, 1628 bp, Bovine  19866880971920
  misc_feature (1)..(1): n is a, c, g, or t
ntgcatcctatcttcacaatttttactgcctaccacgcacctgtcctaatattgacttaacatttcctttaaatagactcactttaaagccttaaataaatgtatttacatataagagtgcatcacaagactaaatggaaaaccagtgttgcttgccttacacagaaacatcacatttaaagcatattaaaataaatgcattactaataagtgttcatccatgtcccacccagaatcatctttgatgacacctatgctgcaccttgggaatcacttatttttcccaattttaaagactgtattaaaactgaggctttaagaagctggcacgcttgccaaagagagaaagaacatgctctggactgaaatcatggtgtggtttggacatgaagggagccgatgtgcggactgcgggcttacccggaaggatgaacatttatctaatgcagacaattgattgctgcaatcagaagacaagcgcccagtcctcctgtctgcacagagaagagacagacagacagcaccaccacccctaccactacttaccgttcttggagacaaactgggaggtgactcctgcctcaaatgtggcaaaaacagggctgtggtcactggtcatgatgtcactggtgctacctgcaggggagggaaggaatttctgagcaggggaagagggatccttctggttgagccaaggatggccaacgcatagcagaaatcaactgatgcgtatggaagccaccacaagtttgatagtttcatatggctgctccattaccttccacaaccatgcctgaaagtctccgtgaaagcctgtgaccctctcctccgtggctaaatatacccgtaatagttttttttttttttccctaaagacttgtgagttttaaaatatatagattgttgtgtgtgaactgtggggttttttctggtctaagccttttgctgccttgatgaggagctcacggcacagagtgggatgggaatctcatcactgtcccccaacccacaatgcctctggagagcacggaggtgatggaagtgtagaaacagtacagaggattcttttaaggagcctggcactcagatgagaagggaaggcagcggagtacgtttagaggggataacagaaagagcagagggtctagaagtctagagttccaagtgcatgtgatagagttacatggagatgtttggctgaatactcagggctggagattttatcttctgctctggagtcacgatgttaggtggtagcagaagccacaaggatgtctgagcttcagagggaagacatgaaggctgagaagagatgaggatgacaggccagtgatggggcaaggccagcattaccgggcaaaaggacacgcagcacgggagaaaacaatgagccgagatatacccttctcagtaaagcatttacaaatcagcagaaaaagaaaaagagattaatataccacccctccaacaatcaaagggaatgggcagaaaattcaagagaaatataatagattgtccaataaacaagggaaaaaaagctcactggcaaacaaccatcagaaagacaacttttgagaacttccctggaggtacggtggataggcatctacctgccaatgcagggtaca

SEQ ID NO: 41167 - DNA, 2365 bp, Bovine  19866881014939
  misc_feature (1)..(1): n is a, c, g, or t
nactgaggtgactttgcatagtatgctcttattttctatactaaagctccaccatcttgacctggccttgcccgtcaaccagtaaggaaacggcctcccattattacgactcttcttgcacgtttgttcattgtgtcgtctttcccgtggcagttgtttgtaccgtactgggaactactgaatcaacccgcacaattcctttgaccttgttctgaaagggcactgctcaaagcttccccttttctgagacagggctttccatcctctgcccaacaccacacacctggtacgggggcgggtgttattgttagtcgctaagtcgtgtctgagtctttgcaaccccatggaactgcagcacaccaggtttctctgtctttcactatctcctggagcttgctcaaactcatgtccattgagtcggtgatgccatccaaccatctcatcctctgttgtccccttctcctgccctcagctttcccagcatcagggtcttttccagagaggtagctcttcccatcaggtggccaaagcattggagcttcagcttcagtatcagcccttccaatgaatattcaggactgatctttaggatggactggttggatctccttgcagtccaagggactctcaagagtcttctccaacaccacagttcgaaagcgtctgttcttcggcgcttagccttctttatggtccaactctcacatgaaaagatgaaaaggcaaaagataaacctaaatacataaacccagagacctgccaccctcccagcaacaaggccagttgcgtccctccagacagaactgctgcctgcgggtccctcccatcggtgcaggtgctcgtgtgtcctgcgcctgcactgcacacagtggtgtccaggtgacatgctctttatcctgaggccacaggccctggcttggtgcacgcagggcccaagatcccttgagggcaagtcggagcgcagtcctggagttacactttctcctctacagttacatggaagtcgtgattggacctgtgcttagattttagctcgagaaggatgggatgtgcttaagtggaggagggttagacatctattgactgatcattgcaaagaagagctccagccattctgttaggataagagatccatttaccatttgcaccttattctgtggaggtttgcagctaaaactcagcttttatcagcagacccaaccgcccctgttccgatgagaaatagcacttgggcagcagcagccccctgctccccatgtggctctccgtggaccttccggagtgggtccccctgcacatggacaccccaccttcctatttgcaggccccagatcctgtggcagtccccccaccagatgggctcagggaggcgagacctgactgaggccagtgccgtcttggagacccctcggcctctgccaccacacccccatgctgcgggaggggtgtctatctgtttacgtatttgtttctatgttattatggaatatcccaaacatgcagaagtagaaacagcagaacaagcccgcattgcagcatgtcgattcacccatggccccatccgccccccaaccccgccacccacgggagcattccaaacttaattcccatcgtcatctcacttcataaacacatcagtacgcacatacggaggaggtctctttagcaaatgttcctaatgttatcatctaccagaaaacctgaacaagtaattccttgatgtgatagaacacgccccctcactgggaccctgtcctgtcgtgtgggtttggcgaggacgtgtcctcagtctccccccggcttccctaacccagccgcctcccgccaggtttctgttggagctggagcgccggatggaggaaaacatcgtcatctcggacgtgtgtgacatcgtgtaccgctacgccgctgaccacttctccgtctacatcacctacgtcagcaaccagacctaccaggagcggacctataagcagctgctgtgagtgtggccaggggcgggatcatcgcagaggcacggcacgggcagccccctcctccgacgctggccctgagctgtggtccctggacctctgctttcccgggacggcatccaaggctggcacgtgctggggcttttggtgccaccagggaaatggtgaccccgggacagttggccatagcacccactggacctgtgtccagatggccacgcagggctctgcgaggtttagaaaagggagcttgaggccatgaggaccagtcgaggcccaggacagcaggagagtagtttgaatcagagacaaaggcaaggattgggggaggggagtcttttttggtgattctccagcatctggattgtgtgtgtgctctgtcatgtccgact

SEQ ID NO: 41168 - DNA, 1195 bp, Bovine  19866881059584
  misc_feature (1)..(1): n is a, c, g, or t
ntgaaaaaaaatgcttaacattttaacaacttaatagtaaagaaactatccattgggatcacgttgctgtttagttgctaggtcatgtccgactctcttgtgacccccatggactgcagcccaccaggctcctgtgtccatgggattcttcaggccagaatactggagtgggttgccatttccttctccaggggatcttcctgacggagggatcaaacccatgtatcctgctctgtcaggaggattctttatcactgagcccccagggaagtcttgttgtgatcagacatgtatgtaattttgtatgtgtagtaggatgtcttaccccaagttttcttctttctgaaggggctctaagcagatctcagttctctttcccaatttatattccctgataacaaatgaaacaaaacaatactgaatgacatattaattttttaaaggttttttaaaaaaccaatttcaagtattcttaagtgaaatagtatactatataagaacactgaaaatttaagagactaccatgaaaaattatacaccaacaaattgtacaactgagaagaaatggcaaattcctagaaatatacaacctaccaagacggaatcatgaagaaacagaaaatctgaacagaccaattattagtaaggagattgaatcagcaattaaaaacctcctaacaaaaaagagttgaggactagatggttttactgatgataaaagatttaataccagtgctttccaaactctttcaaaaaaaaaaaaccaggagggaacacttccaatctcattctatgaggccagaattaccttgatatcaaaatcagacaataacattacaagaaaaggatattaaaggccaatgtccctgatgaacatagctgcaaaaattcacaaagaaatactagcaaaacaaattcaacaatacattaaaaggatcatacactatgatcatgtgggatttatgcaagggatgcaaagatggctcaacatttgcaaatcaattgatataatacaaccacgttaacagaatgaaggacatgaacatctcaacagatgcagagaaagcatttgacaaaattcaacattctttcacattaaaaattcataacaaactgggtattcaaaccataaaggtcttatttgacaagcccatagctagtatcatcggagaaggcaatggcaccccactccagt

SEQ ID NO: 41169 - DNA, 996 bp, Bovine  19866881089210
  misc_feature (1)..(1): n is a, c, g, or t
naaccggacattgaagcttcctttgctttcagtgacagcacagtgtgaatgaaattcctcagacccatcctggcgcggtcttatgcccacactgcgccccctggcggcccggctgccagaccccgcttcctccccatgaagtcctgaaaggctgactcgaagcctgcagattctgagttgcttggatagaattgtactaagcctgtgtgcagtatcccagcacagcctgtacttcagaaatatgagctaagttcatctaaagctcctgtcagaagtctcactctgtccttgcaggtgctcccagtgacgcacacgcggaagtttccctctggtacttgggagaccttgaaatctcagaagatgccaccttaggggagctgaagtctcaggtcagccttcctcctacagcgaaccctagtggtgatctggctgcttccagtgagatattaatatattcttctatttccttttccctcaattacagtctgttctgatatggcatgtgttatatgccatgttcagtggtgagtacctcacaggccacacacgcacactgctcagggggctcccgggctcgttccatcaccctgtggcttcctttcttcccactctgacaggcatgctgtgctttcatttgactgtcttctcagtgacttgcagcttatgttcattttgatttttttagggaaacatttgttggaacatttgtaaagcattcactttatttacattgtttttgcaccattgtgattcatgtgttaaatgtggttagcagaagctgtgttgtcagttgcccaggaggtcagaatctcagctttatgttagaatgttaaactagatattgtattgttttcttggacattaatattcacagacagagtgctctgtccaaatggaagggctcggttgaatacaactcaaaatgcctaagaagcatcttaactctcaggaactaaaatgaacatccttcttcctcataaaggaaaaaggtagggg

SEQ ID NO: 41170 - DNA, 884 bp, Bovine  19866881141722
  misc_feature (1)..(1): n is a, c, g, or t
nttgcctgggaactcccatggacaaaagagcctggttgagctacagttcatcgggtcaggaaagagtcagacatgacttagagaccaattaacacctgtgtggatatgccgttttataagaaaccacattaaaattaagttgtttggcttatttcccactgttctatattataaatattatcacatggacatctttgtatattatctgtgcaactgcctttgctcatcttgaaagacttcatacaaagtcacaagcaatatagagaagatgctttgattaacagcaacaaacaataaaatgaaaatgcttctcactgaatactaatcaaatagcacatttaattaactattaaatatccatgcagggacaaaaatattaatgtatttctctagaaaataaggatcatttaaacacgtctaacataactcttatttcattagtagcattttttggaaagtgaaactttgtaactgtacagagagccttctcctctgcagaaagcagagaaaaaatgcttttacaccaagaatctttatcccaagatgtgactcctccagttacctttcctcccagctctgtgacctgtgcatttccctgccgcctcctcggacaaacaccccctctacttcatcaaagcttctttggtagaaaccacattcacctctgcctctgcctgaaaacaacaatacagagaaaatgatggtcagatgtcaacatctggcacaaggtgaacaccaagcattcatctctgaagtgctgtctatatacaaagcaggatatctacatttaatatttagcaaggcccactgaatctttaccagtgagaccaataacagtaatgacagcggtgaagtagccagaccagaggaggatattaaaaaaa

SEQ ID NO: 41171 - DNA, 1745 bp, Bovine  19866881161717
  misc_feature (1)..(1): n is a, c, g, or t
nttccttcaataattttaattcctttatggctttaattcgaatatcaaaccacccccctaaaatagagaaataaactaatgactgtgtataagttaaaaacaatgggaggaagggaaaatgaagattatcagtgtgtgcatatgcagattatctgagttactaattacctgacatttgacaatttttgcacacttgaaaaaaagttactcccttccctgaaattctcccataaagtcaaagggaaaaacttagatcttggttaagtttttaccaaattgataataactggaacagaaaaagcctcctacagaaaactttagaaaactaaagacataatagtagcaaaaggcaaaaaaattgaaaaacaactcacctttctgatgatagcaaacaaaagacactgtagacaatcataattttttatgtcaagaatgatgaatttagggccaataagcattaactatataaaaatgtactaatccaagagtactatttaaaatttctatgtaaattatcttattttagactttttttctttttaaaaaaatttaggctaattgcctctagggcacaaaattgcggaaatttagggataaagataatcatagactctactttcccaccagtgcccctctcccagcttgtcccaccaccacttctgctgtgccaagacggagcagagcctgcagtaaccaaggactgcatcagcctcctgctcagggtcaaggaggtaggtctcttgagctatgtggtactgaccttatattatccccactactgtgcaaacaaatattaatgcaccttgagaaactataattttatataaaagaaaacattctaagttttcaaaatgaagttacagaaaaaaaatcttagagactacaccaaatgtaaaaagatgttttctgaaattctgtttaaggaaaccagtataacagtcttaaatgggaaaaaaatgaagaaaaatcctttttaagagcaactggctttatatagagcagagtatactgtagagcaattttaagataaactttgtaaaatccaaacaccaaagaacataaaaccaaaacaaatacttggcttaaaaagtacagaaaaaactcttaaaaataccatttcatagttatcaaagtcagaagattccatgaactaattaaaaaggtaattctcacattctaattctaggctttggcggggaaaaaaggcacaatttcttgacacgtgtcaaaggctaacaaaggtaaataagcaataatcaaatgttacaaataaaaaggtgacttctgaagatttataaatttacagagatgtttgttccaaaagattagggtactactttttaaacaaaattctattaactaaaaaattgtcagccacacttatagtctactcactgtgttaagagttgctgatattttaacttgttcctcttcagattctaattggcttaaatttctaacttggagccagttgatctcattcacagtatcgatccatttcccttgttttgtcaacaaactgtaggtaaaaagacattttaaaaatgtgtgttcacacagtccttttatggatcagagaggattggaaaattcatgcttttccttaggcaccacttccaaaatttaccacttaatgtggctaattaaggtgaccaagttctactgagttgggcttttgaatgttgactatctttttagggcagtgttagtactctacagagtctatattcatgattccaaatatt

SEQ ID NO: 41172 - DNA, 948 bp, Bovine  19866881185039
  misc_feature (1)..(1): n is a, c, g, or t
nccagaaggcatagtgatgtccttactgttaggactctgtatcagggtaagctgaactcatatatcaagatccccctggctcctggatccctgtaatggaactaatccacttcattagtttcccaaccacccccgaccctttaatttgttcttccccaaactctagcaaatagtagtacatgacaagctcagagaatgagaaacatgacaagtgaattgcattagaaaggaaaaataaggctgtaagaaactgaacagacgagatcaggtttacatttttttctttgggtttctgggagttgaagtatatggggcctctggacagaaaataagatcacaaattaaggactcggaaaaaacacagttaatgcttacagtgtacaataattgcaaatctccttgaggaatgactaagaaagagatggagattatagtggaataaatatccgtgagagatgtttattaggagtaaaaacattggtgataaagaatcttacttttctaggcagtcaagattattgtttaaattataactttactcaatataagacttgtttttacataatttgagatttttattaatgttttatgatcattggcctttctcttttggaaataaattatatatttatagaattttaaaattcaaattaaattgtgtttatacctttgtttcaatcttagctgttcctgttttttgctttggggagtgatgttcaccctgggacagagatggagatcatagtagaggaaacaatatctgtgagggatgtaagttattttactttgggagccagggtctgtggggtgtttggggtaggcagcagtggtaacctgtattagggttttgtgatcctaaggctagggtttacataataccctttaaagaattctatgtactcactaaaggagtgctttggttggcttgaaagttggtgagccggccgt

SEQ ID NO: 41173 - DNA, 1321 bp, Bovine  19866881273585
  misc_feature (1)..(1): n is a, c, g, or t
nttgggccaggcaggaagaagaaacagctggtggaagagagaagggcagacgggaaggctcacaagctcagcgtgtgcctcccactgcaggcagcctgggacagacccgtgatgctccaggttgcctgccgggctcctgctgagagcgcctgtctacctctccaccccagctacctttccagattctttagctgatgaaaccatcaacgcagctgaagatctttataacttgccattagaccaccatccagggcaaacagagcccagaaagtgcttcatcctaatgaattttcctgaaactgcagggttcacagttcatgatggttatcagtaaaatgttcagtcgatcgaggagtagggttctttccacgttttctccgcttgtccctttcatgccacctgggagttacctcgagggttgctgatattggcgggggcgggggggggggtcctcacctttcctgttgtttcattcccacagatagagctggcgatgctgtatgcaacctggatggctgcaaatgcccgtggaagtgcctgtcccccgctgcccccacccgcagggagagatgagaagggctatctttctttacctccccacgtttcttgtgcagttcagtcagctcttcttggtgtttaattctcagctgggccatttcttgcagctgactatcattccatgaaccatcatgtccgggactaaatgccccaaccaggcagatgaggagaacatgcaagaaagagggggaaaaaaaaaagaaaaaaataagaccttattccccttccgtcagacaatggaatagtaactttggaatttgaagcctgtacatgacaacacagccaataaagcagttcagttctccaggccagtggagtcctaagtcactaccaacctgaagtagaaagcgggacccgtgagacacaggtaaaaccaaccagtcacaacccaaaccaccagccgtgtcaggaataaaacatggcttctggaatgacgttcaggtgaacagggaggagacaacgcagttccctcagtcaacaagtgtctgagagccagctctgagccgggcctgttctgggagtgggcagaagggagggacacgaagctgtgcccgagtgacgctgcgatcggccaagaacacagaccacaagcgagagggtgcacaaaggctggtggtcagatgcgctgtgaagaaaaacgttagcagcgtaaataaagagggacaggacgacagggctcctgctccacgtggagtgaccaaggcagcccgagagatgacgccagactggagacgtgacagcagtgcagaactagccgtgcagg

SEQ ID NO: 41174 - DNA, 728 bp, Bovine  19866881328928
  misc_feature (1)..(1): n is a, c, g, or t
nccaaacagaaactctgcccactaggcagtgactcctgtcctcccaggccctggcgttcattttccttgttcctgaataaggtttccaactgtgccctcaacacttgcccctcatactcagcattcacactcagaggacacctgtactgaatggcaatgacaaggcatcagatttgtagagagttctgaaacctaacgtaggcacacattcccaccgcagcttcaccccagaggagcccgagccggggtcctcacggagggtgagaggggcctgcggagagcagatgggtccacaccacccgcgaggccccttcccccagacctgacccggctaccagtccttctgcatccatcgggaacatccccgagggatcctagcctggggatgaggcggggggtggggggtgacctggtgggccatcctgaggaggcccaggtgctgatcctgggaccgtccgtgacgtctcatccacgacgtctcatccgcaggagctccgtgcgtttgctgatccggaaggtacagcacgcgccacgcgatatgggtccccagccccgagccgaggcctcctggcagttcttcatgtcggacaagcccctgcgcctcgccgtctcgctcagcaaagaggtgactgtggagccggcctgcggggagcccgcccaggccctcatctgggggtgggctgtgggcagccttgggtgtagtggtaaataccgacctatgaggatga

SEQ ID NO: 41175 - DNA, 1356 bp, Bovine  19866881344284
  misc_feature (1)..(1): n is a, c, g, or t
naaataacagtttagttatagcttattacagaaaactccaaaacattcaaaagcagagaagccagtgtagcaggcatgcaccaccaagccccagcctcaccccgggtgagaaggagggactagaaggcgccccacgaggatcggggcactggctcaccgctcactgacggccatgacatccagcacgttggagaagaggatgtgggcctcagacgggtgcaggatcttcttcagccgctcgttctccatgaagtgggacaccagcaggttcaggcttttatagtaggaggcctcagaagtgatgagctcgaacatggcctgggacaccgggcaaagaagacgagaggagggccagcggtcgacacccagggctcacctttccccactctcagacagatgaaagtgcaagttgctccatcgtgtccaactctttgcgaccccatgggccatacaatccatggaattctccaggccagaatactggagtgggtagcctttcccttctccaggggatcttcccaacccagggattgaacccaggtctcccacattgcaggcagattctttatcagctgagccaccagggaagcccaagaatactggaatgggtagcctatcccttcttcagaggatctttccaacccaggaattgaaccaaagtctcctgcattgcaggtggattatttaccagctgagctatgagggaggcccctcagacagatgtaaaggttttattttatttttggccacaatgcacaacttgcaggatcttagttccccaagcagggatcgagtcctcaccctcagcagtgaaagctccaagtcctaaccactggaccaccaggaaattctccagatgcaaaggcggccagcaccctttcggagacctctcgcctgctcacaacagtgaagctggagacgccctcgtgtccaaggtcaaacacgagaggtcatccattcttcagagctccgacagctgccaagggtggtgactcaggactgcttcctggcgaagaatgggtgggagactcatccatagagggagccccacttctacacacccagaaaaacgcttagaaggaaccaggtcatgatgtcaaccacaggtgtcaacagggggtggaattagagggtgaatctcactctttttctttttttaaaaagtttctttatttttttatttttggctgtgctgggtcttcgctgctacatgggcttttctctagtggcgtcgggtgggggctactctctagctgtggtggccagccttctcaccgctgtggcttctcttgatgcagagcacaggctcgaggcaggcgggcttcagtagttgggctcccgggctctatgagcaca

SEQ ID NO: 41176 - DNA, 783 bp, Bovine  19866881408230
  misc_feature (1)..(1): n is a, c, g, or t
nttgcttttggcctggtaatgctcactaaaaataggaatagcagacgttcatgattcattcttaatctcagagtaaaagccttaaatattgtaaggggtagtttaggttttgctttgttttgcaactactatatcagactgaagcaattcccttctattctttaatatatataccttaatcttgaatggatatgaaattttggattctttttctttatttatggatgcaatatgattttcttcctttactctgttaatgtagtgaattacagtgaatgatttttcatattaaaatatctttgcaattctggaataaatccaatttggtaatggtatattatcttttaaaatatattgctagatttgatttgctaatactgtaagtattttgtatttatgttcatgaaagagattggcctgaatttttatatcttataatataatggtcttgtcaatttttttacctcccggctctgctagcattaaatcaatcatctatctatatctgtatgtagctagctagctaactagctatctattacatggcatctcacacagccttgactttgacttgcagatgaagtacaatttgccctcctggtgtgaccgagtcctctggaagtcttaccccctggtacacgtggtatgtcagtcctacggtgagtagcaagttaagaggtcacactttcctaagttaaagggctgcagtccatccatctgcctaaacttggcattcaaagcaagcctatcatggaggtctttaaaaagaaggagggagactgg

SEQ ID NO: 41177 - DNA, 770 bp, Bovine  19866881415540
  misc_feature (1)..(1): n is a, c, g, or t
natgaggaggaggacacaaaccttagagaagttttatgacagtattcgaaagagaaaaccatggacaggaatcaaaggagaaaattacaactgacagctaatgcaaatggatcaacctataaagagaaaagtaggaaatgaagcaaacaaaacgaagctcaaagttcactattatattctatgtaccctcagtaagtgacaacagtagttatcttcataaactactatcacaacatactctaaagcttttaaagataaacttaaaggaaaccacttttaaaggacagttctttgaagtatctacttttaataagctctagaactgaatgtctgactgaagtgttgatcagtcattcatgtggcccactcctagcctagacttaggcactggctatccttccatcctgagtccatgctctccctttggcaagtcttaaagcattttctttcttctgatgaaactatcattctttatggataagaccagccccctcgacaatataacaatatccacgacatgatgctattatgtcaattcttaataccaggctcatcatgtccacccactagtgtcaggatcccattggtaattctgattcctccccacttcccaaaacagtcatgaaattatagcactgacatgtcatatctggcccactatcccaattatagtagtttatgaaacaaaacctctgacagcagaagtaacctgcataacaaagcaacggaatccaatgctgcatcctctactgctctttccacagtaacag

SEQ ID NO: 41178 - DNA, 1137 bp, Bovine  19866880859903
  misc_feature (1)..(1): n is a, c, g, or t
ntgtccacacccctgttcaattattattctgacattatatcaaatgtatccttttatatcaatttcctgttttatttcccttcggtcatttcccctttttattttaatttaaatttgtttggactgcactgagtggcttgcaagatcttagttccccgacagggaatggaacccaggcccagcagtaaaggaaagcagcgagtcctaaccactggacccaagggaattccctcttgccaaccattttctcccactaactgtccctctgtgaactcttactccttaaaaccattccttttatttttctacttttgatatattcgtaaaaatttcatggggatgttgataacggaaggaggttatgcacatatggaggcaggggttatacagaaaatccctgatcatccacttaattttactgtgaacctaaaactgttctaaaaagtaaactgtgttaaaaactagcataaattcttagccatagtgatatatatggcctcataattttcatatcatttagggataaacattataattttttatctttagaacagttaattactgaaaagtttatgagtgtgagtgtgtgtgtatgtgtaatttgttttcctttgggcccatcaaaatgaaattaccatctgtgtttgagactgatttaaatattttcttgactgaaggccagagcattagcaggaagaatccttgaagtgccttctaaccttgcattttcttccttttctagccatattggcaaagcatcaccttgtctgtacacaatgacagtgaatattggtatcacttatcatcgattagtacactgttccttgagatcttggtatcaattacattttactgatagtattagaaaaccaaggatgaaagaaagtcattcagatgtctagacagtgagttacagaggttagggtccctgggagaatgtgaattaaagattagcaaagagaataagtatagtatgcagagaaagtcatctcttttgcccttgaagacagatgaaacaaaaattagaaaacaaacaccgtaactgtcagaaattcagttttctcattttttctggggagatcaggtctatatactggtcacatgtttgtcctgctttgtaacaatttttcaaacaaa

SEQ ID NO: 41179 - DNA, 1189 bp, Bovine  19866880496044
  misc_feature (1)..(1): n is a, c, g, or t
naataagtcaattaaaagggtcaagtaaataattaaaatcatttctgactcaatcatacatgttaatgagatcttggggcaggatgaatcaacgaaattttcagttaatcccaaacaattaattgcaatttaaaaaaatgactgctcattcctcagaatggtggttctgaaagaacactgggaaggtctgattcagctcctgtgccctccctctgggtggaagtgctaacgagccacggaatggctacaaggaggccagggagatggaacagcaagtgtctcccagctgcgccacacaggagatcttaccactcctgctcatgctgtgtggcctctgccttccagcatgaaaaccgcctgttgagtagacccttcattctgtcttgtacctttcagattcaccctgcgcaactgtgaccgtgtcaaacccctgtttaaaaccctcaatggctccatgttgctgtcagaataaaactgaaatggaccaacatgaccccaaggtctgtgccacgtggaccccacttcttcctccagacatcactcctttcatgctatctttatacaccagtctactacactgagctccccgaagtccacagtctcccaggcccccaccttcagccttcatgctgctgctgctaagtcgcttcagtcgtgtccgactctgtgcgaccccatagacggcagcccaccaggctccgccgtccctgggattctccaggcaagaatattggagtgggttgccatttccttctccaatgcatgaaagtacaaagtgaaagtgaagtcactcagtccttagcgaccccatggactgcagcctaccaggctcctccgtccatgggatttgccaggcaagagtacttgtctagaattctctgcccctccacgacacatcagcagtgggacaggcgctaagaagtggccactggtccacgatgcttgcatctgagtaagtctgtccagcacaaaactaagataaaatgcccccttggagagaccagctaagatcttgttctctaagatcgctatcagtagcaaaagaactaacattttcagctccatctcccagagcatttgtcttccatccaaacttgagtgacaaataagggttatgttttactggattctgtcaaatattgatgcctgagctgcaattatctacttgtgtttctcccccatcagttcg

SEQ ID NO: 41180 - DNA, 745 bp, Bovine  19866880663326
  misc_feature (1)..(1): n is a, c, g, or t
ncacacataatgattaaaaggaggtagttgttgattagacactcagataggaaggtaaattatttaaaaatagtccctaactctgaagcatcaatttagaacttcatcaatgtcactgacaaatggaaatgaataaataacaaattttaaaaataatgaaaaaagagataaggaaattatatcacttatatttcccagtgtaactttattttacaaattctgaaaattcagctttatccattaaattgaattttttaaacctgtagtagacagtttatcgattaacactgaatcaggtatatagcatgaattgatccttgagagtttatgaatgatactcatcctttgtaatataattaaactatttgaaaatgctttggattattacatgttggtttgcaaagagccttaagcaaatgattccatagatatattttaatgtggcaatactgacattttctttttagttttatctcagcctacactggacaaaatatgttttcactgtgcattattttaagctaccacagatgtctttaaaatctacagatcctctatatttaggctacatccaaagtgctaacttttagtttagaagtttgcaagaaataagaagcttaataagtggcacggaatgattgactgcataaatctactgaaaaccagttgccagcatgtttatttgacatttagacacacacctttatagatcacaaaccttgacaaaagctccgcagggtgtaca

SEQ ID NO: 41181 - DNA, 2993 bp, Bovine  19866880699114
  misc_feature (1)..(1): n is a, c, g, or t
ntgtagatcctacgctagctgaaaattgaatgccatgttctggagattgggaagcaatactgagaataaaaatcatgttccaggaggtaataaagaatcttagaatgtgccatgtgaagaacagcccacggaaccagagaagaactggtgatggtgggagcaggaaaacatatagcaaatcttcaaatacctgatgagcttcaatatatataaggaaacaatacatttgtttcaagaaaaaattaggaccaataagaatagacattatagataggctgatattgtttcaatgtataaaaaatctaataacagtgcatccttttaaactttatggcagttatagaaaatgaaagaatttctacagctcattgtggaaaaaagtggttcaatgaatcctgcctgcctgaggtctgagatgtttaatatcttgacaacctgtaatccattcacagcacatttatgggaaaatttgttaataatatgatcagtgggctctgaaaagagtaaattcctcatcatagtaaaccttcaggcagagtttggaaacaatgtagatgggatgctgtaatggcaatttaaaaaatcctttaaaatgtataaactttttattgtattgtttcatgaattctgacaaatgcatagactcctacaactaccacaacaattaagatacagaatcattaccatcctccagaattattttgtacttccccattgtagtcaaatcaacacccatcccttagcactggcaaccaccgatctgttctatacgctgaaatttttactttcccagtgaaagtgaaaagaaagtgaaagtggaagccactcagtcgtgtccaactctttgagaccccacggacgatacagtccattgggaattctccaggccacaatactggagtgggtagcctttctcttctctaagggatcttcccaacccagggattgaactggggtctcctgtattacagttggattctttatcaactgagctatcagggaagcctgggactttcccagaatgccatgtaaatgaaatcatacaatatccagccttttggaacatgtttctttcactcatcatagtatatttgagattcatccatattgttgactcatccaagttttgatcctttttattgctgagtagtactccattgtatagatctaccacattgtccctccattcaccagttgaagaatatctaagtgacttctggtttccagtatggcatgtaaggagcttggaagtcatgtctccattctaacaacaatttaaaagctgaacaaactgaaaatcaacaacttttcttatattcatcagagaattgagatcccaggaaagactaccgcccctgaaattgaagagagagataggtggatacagagaatcacaatttattggaacagaaacatacaagtagtgaccttcatgagaatgattactgggtttcctttactcagtactcatatccagctttcaacaaaaattacaaggtatttcataggcaacaaacagagtttgaggagacagagccaaacttgatatggcaagaatgttagaactgtcagtccaggaatttaaaacaactgtggctcagtggctcagtgataaagaatctgcctgcaatacaggagatgcaggttcaacccctgggttgggaagatcccccctggaggagagcatgacaacccactccagtattactacctggagaattccatggacagaaaggcctggtggggttacagtccatagggttgcaaactttaggatgtgactaaagtgactgagcacacatgattaatatgctaaaagttttaatgataaaagtagacaatatgcaagaacagataggtggaaatccagagatggaaatcccaagaaagagtcgagaagaaatgctagaattcaaaactaccaatagaaatgaagactgtctttaatgggctcattagtagactggacacaactgaggaaagaatcagtgagcatgagaccatgctaacagaaatttccaaaactaaagcaaagagaaaaaagatggaaaaaagctggaacagaatatccaagaactgtgggctaactacaaaaggtataatgtaccagaagagagaaaggaacagaaaaaatatatctgaagcaataataactgagaatttcccaaaattaatgtcagacgccaaaccacagatctaggaatctcagagaataccaattaagataaatttcaagaatgtttgggttgcttccagtttagaaggaataaactactaatactacaaacattagcagcatataggtttttgtgtgaatagaacttttcacatttttggagtaaaccaaggagaatttctggtcataaagtaagtccatatttaattttataagaaactgcccaattgtttcccaaagtatctgtacaattttgcattcccatcagcaataagtgagaactccacattctacatccttaccagcatttggtatgatcaatttcttgattttaaaattttagtgattctaataatggtattttaatcagttatcctaatcagtggttttaatttgcatttcctctgtgaataatgatgttgaaaatctttttatgtgccatccatatattttctttggtaaactgttcaaatcttttgcctatttgaaaaattggattattttcttattgttgagttttgagagttctttatatattctggatacaagttctttatcagttatgtgattttcaacaatttttgcccagtctgtgatattcttttcattttaaaaacatttttaaagccttttatgaatgtgtgtgcgtgtgctcagttgctcaattgtgtccagctctttgtgatgccatagactgtagctcctctgtccatgggactgtccaggcaagaatactagagtgggttgccatttcctcctccaggggatcttcccaacccatggatcaaaccctcatctcctgcattgcaggtgaatt

SEQ ID NO: 41182 - DNA, 1968 bp, Bovine  19866880860000
  misc_feature (1)..(1): n is a, c, g, or t
naacatgctagacccctaatcatctgaataacttgaattcctaatgcatccaaccttggttcccatggtgacgcactccaccctgaagccttttctcctcttactctctgtcacctataaaacaccaaactcatctttcaaggctcagtgcaaagtttgcctgttctagaaaagctttccttaatcttaccttctaaccaacaccttcctgtattcttataatctagttgatgtcaaggattatgactaattctactttccagatcttctgagctcatagtgactgatacacagaagacatcaagaaaaatgctaatgaatgaaaacagaaattcattaatgtgacctgggtagatggattactagactccttgactcaatcaggagcactgcagaatcacctacaatgtaattggttgtgtatgtcaatagtatttccaagaaatcatttattgggccaacagagaagtaagttacaaacagatgtactttggataaatgtccgtagacatttttaacaggagtgtagttatgggatctgaccttttcacacatactaaaatggctaaggctgtgaaaacttcacctgcctgccacgtgttaaatggcaggtcccagagaatagttagaccagaaggaggtggagggaataaactgtactggagcaactgtctccttcttatagctcatattgcccattagttggggggaaattgtcttaaaatagtttcagaagaatgttttaaaaagaggaactcctttgcagataaccataatgttttacttaaagatgcaaaagaaaaaaaaaaaaacagaactgtgatttggtgatactcatcactttttacatatgtgtttattataagtagttgtgtcatgtagaactctgctgttggggagtcaagacataatgttcttctctctgttcattatttgagcagaggaaggaaactttttctagacatggattattaaagacaggatctaaagaacacagtactatatgtttgaaagctgttggcttaacataacgatcatcatcccacttcatagtccctggatttggtgctttaatatttagtttagtctaacactataaaaggcatgacaaatacactatgttctaggtttctttctttctatttaaaaaatatgtttaagtattgcagtctacatgacaagagatgatccagactattttaatgagttatgcatgcatgtgtgctaagttgcttcagtcatgtcagactctttgtaacccatggactgtagcccgccaggctcctctgtccatgggattctccaggcaagaatactggggtgcattgccattcccttctccagggaatcttcccaacccaaggatcgaaccctcatctctttgtctcctgcattggcagggaggtgcttttccactagtgcgcgtagcagtttgccgaatgacttgattggtatcgggcaaaagaataaggttggctttctgattttgtttcagttagtgtattgataatctacatatctctagatatctctagatattggtatattgtgtaatctagatatatatcaatagtttataggcctagtcttaaatcagtttgtaaagcttcagctcttctgatgtgtaatatttaaggtttcaaaagatatgcttatcatctagcgaatcttagaaactctaccttttcagaccaaatataatctggcataggtttaggaatataaacataaagtccttaagggaaaaaaatgagtgtgaaaagggttcatgctccaaatggaatcatgtttctgacatgtctgttctgagcatcggaagtttgattctaattatgataggtttcacatttcagaaacttatctgtaagaatataaatctttaattctgatctttcaagaggccacaccaggttggttgagaggattaggtcatagtatgtctgacatattcaggttaacacataggcg

SEQ ID NO: 41183 - DNA, 1460 bp, Bovine  19866880934760
  misc_feature (1)..(1): n is a, c, g, or t
ncatcccacgctggcccagagaagtgtcttctctgagggtcagctgctgaagagtgctcctctggcatgtcccaatctccagggagcacagaattagcaaaacagagttctccaaaaaggtcaggatggatccatcctattaaaattgagaaagttggttgccttctgaggtgggtggtgactgaaatacagccaagcagaggcgtggctcctttcccgccatgagagcagctttcctgactgtattcagcttaaaaactaacactatagatttgagttcatttaaaataaatgtctattaagaattagaccacacactccaaatgcatctgtttctgcttttctcccgttctagtgggacaaagccttgtcagttgcgccaagcgtgtctgtgaaatactggaagaagctgatgcagaggtgaggcggaccgtctgtgcccagatggacgtttgacgttttgttaaaatggaaacaacatgtacatatgctagtagcccttgggatttttgacttttctgttgttttaaacgataactgaattttgtatctcctgatacaataaacaagtcggttatcagtcattttggcatttttgtatttgacctgacatctgataagaacagtggtggaaggcaagtttccccatgttgatagaggaaaggatggatcagtcaacatgctcactccttaatgtattgcagttgaaatgtatggatgtcaagtagtgctgatggtaaagacgttttaccactgaacaaggttaccctggatgtccttgactggaatgcagaaaacgagattttttctgaggtgtattggtttactggagctgccataacaaaggaccacagagtgtttcaaatcacagaaatgtgttctgtcccgattctggaggttctgaaggctagagatctgctatcaagctgtgggcagggttgctttctcttggaggtttcaagaaggaatcaggtccactcttctcccctgacttctggtggttacagcccttggcactttggtggcccccttatcttcacatgcattatcccccatgtgtctctgagtccacatttcccccttttgaatgaggataccggtcatatcagatttagagtttaccctaatctggtataaccctatattaactatttcagcaaagacccaatttccaaataaagtcacgttcactttaaagaatcagcctgcaatgcagtagacacaggttctatccctgggtcgggaagatcccttggaggagagcatggcaacccactccagtattcttgcctgggaaatcccatggacagaggagcctggtgggctgcagtccatagggttgcaaagaatcggacacgactgaagaggctaagcatgcacatgggttaggacttccacggatcttttgatggcagtgagggggacgcattccaacccataacataagactattctctatc

SEQ ID NO: 41184 - DNA, 1125 bp, Bovine  19866881240140
  misc_feature (1)..(1): n is a, c, g, or t
ncagcagcagcagcagcgcctttaaaataggaaaatctgcaatgttttatggaagaaacaagtgcctatactattgtttcagaaaacttttatcctccaataatggtgtgattataaagctaagtcttaaaaaaaaaaaaaagctaagtctttgtgaatactgatcaaattttagatattttcagcatttcagaaaatctgagtccagctgagaaccttgaaattagtatttcttaaaaaaacattgttgttactttattaggagagctgatcagttaatccaggaagataaggatgacgtcattccgtattgcatagccattggtgatgtgaaaaaattagtccatttttttatgtcaagaggtcagcttaaagaagctctgcttgttgcacaggtaaaaacatgtgatttacatgggctgcacagctttgtgggggcgtgtttgggagggggtggtcatgttcacgtgattgattaagtcataggtgccttgacttctgcccgtatcccggccttctttcctggacatttccatcaccctgcctttgctctgatcacactgagtttcttttagatctttaaacaggcaagcatctctgaattctgatctggtctattttgccgaacattgtatacacttgaacaactctttcaagtagacttggtgcttcatgttgatacagtgtaatttatgggtttgtttgttttccaaattctaagggtatctccaaattgtagtataaatttcaaacgtggtttgaatatactttgttcaaaataattttctgaagttgatctattatcaacagccaaagattaaccaaagattgcattaaattccaggctgcttgtgagggaaatatgcagaccttccatgtttcgacacccaaaggaccttctttttctgatgatatctacaaggaagactttaaagagtgagtgattcatcctttgcttggagtcaatatttttgtggctggtttccctttaggggcttttgagatcatccttccttgtacacagagtgcttggctgtcccgtgtcctcaactgcatttctcaccgcagtctcgtttcatgacatcacctgcccctggatgaggagggaaaagtcaggcacgtaga

SEQ ID NO: 41185 - DNA, 986 bp, Bovine  19866881477298
  misc_feature (1)..(1): n is a, c, g, or t
nttattaaaactttagtgtaagtctcattttactatttttaattggaaagagagctgacatttatggttacaaaaatataggtctttctccttagatgattgaaaaacaaagaaaaaatagggtaaaggagatgggtttaaagtcaaggacagaattagttccaacctagaaacttagaggccttaaaaaagaattagattctgatggttgcaacctgactgatttgaggtcattctattttcgactgtttgacaagaggtgagggaatgaggatagataatccgaagccacatactctgtgcccaggactcatgacatggcagacagacagaactacatctcaacaggagataaaggcctgacctatataactgataggactggaagagtgcctgaggagttcagaaggtaagatgacatggaattaaattcttctttactttgttaagacaacctaaagtcagaatagtcactcattactttctctacaatatttgagataacccaaactatataatggagaaggcaatggcaccccactgcagtactcttgcctggaaaatcccatggaaggaggaccctggtgggctgcagtccatggggtcgctaagagtcggacacgactgagcgacttcaatttcacttttcactttcatgcattggggaaggaaatggcaacccactccagtgttcttgcctggagaatcccagggacggcagagcctggtgggctgccgtctctggggtcgcgcagagtcagacacgactgaagcgacttagcagcagcagcagcagcaaactatgtaatgatagcaaaatcactatctctggctgtttctgtaagacatcttgttctagagcctctaaggctattgtctgaatagaataacttggagaatatgctaagtaccggtttgtgggtcccactgccaagatttgagatcagaaagtttgggcttgagaggtggacctgcagttctcacat

SEQ ID NO: 41186 - DNA, 1661 bp, Bovine  19866881603139
  misc_feature (1)..(1): n is a, c, g, or t
ngttgcatttggaagacgacatgactaaacattgacatgaatgtaagtcctttaagaatgtaacaggaaagaacagattttaaatagttaagaaaggacagaaaggcctctttcaaatccaagagaattctctgatatctgaatcattatttaaaaaatccaattaatgggaaacaggataacagttacggtaaagtgttgccatagtttaaggggatggatcactaaatctgtctacctgaactcttgaaaaatctctaacgatttttatctgcttgtcaaggaactgcaacttagatctcatcacattgcctcctgctcccacacaagtagaaagaacatttatattcaactataacagtctaacaacaaacttatataggaaaggtgtcataagcataactgaaaggaaaggaagatcaggaatgaagaaaattaaacctctcttccttcagtaagaggaaaaaaaaaagcttaaccacagatatttacttctgtatctcagtatacttatagatcactatacgacatttaattttattgttttccactgctgttcctaaacaaaacatgcacatctatggtaaaaagaacccactgagacaggagcaggtgctctcacatcaccactaccccgacctcaatgaaggaatgattttcagtggtgttactggagaaaaaaacatcacaactaattacatcatttctcttggttcctacatccaccaaggcatgctcaaacatgctcagacatactcaacctgttaccacaatccatggtttctctcaagatttcacttagtgtaatgaatataatttctctatttaaaatgataaacttctatttccataaatggaatgactggccaagaagcaatcttctcatgtgctataacaaggtattaacataaggcattttattcctaaaataaggtaatcaattgagaagccttttaaggatgaaaattaccaggaaaattcaccatttcatatcactgatgaacacttattctattagttcacatagtaaaggtagttgaggatttttttttaatttaaaaacatatcatatgatacctatatagattattgtgtttctgttacagagtatcattatcaagtgtgctaatgtctaaaatttgggtactggtttattgcctttctctactgtgtctataaaaccttcatttatagaatgtctctggttatatatatgtgagtacgtgtatgtgtgtgtaaaaaaaaaaccattaaagctgaaaggttcaaaataatgaaaaaaaaatcactgtattcccactctattttatcatgtaaactaaaataatgcatttgtgtacaatcgaaatcaaatttgagagctgaatcttttccatactgctcttaaatatagcctttaagtagttttacctgtttgcatcctaagaacacaggagtatttgctataacattacataagccttgaagagacaggagagaaaacgctgccaatcctggggtaaaagccacagttccctccaaagctacccttgagacatacacaaattctagagtgttggaatcatttaaaattgctgatatttggccatttcaaccttaaaaaaaatgacaatttcacttaaacagccagatacacctaacaggcatagaaaatgcatctg

SEQ ID NO: 41187 - DNA, 797 bp, Bovine  19866881836942
  misc_feature (1)..(1): n is a, c, g, or t
ngtgtgatggctttatgcttctttaagtgtgtattcagctttctgttgttcacaataatgtctctgtagcatcatctagagcaagttcctaatagaaaagtaatattagaagaagtaaataaataagagaaaaaaggggtgaattatttcttattgataggtattttgcattttttgaagcatggaaaaaatgggatattctgcattgcctggagtcataaagattccaaaagaatagcaacctgcagtggtgatggttactggtaagtactgtgtatgaaatcacactgtttataaagatgcatttgataatataagtgtctgctgttagcacctgtattaaaatatttgataagactctgtttgtacagctctgccagctgtcataaatattacttacggtggcttcacagctggcactagtggtaaagagcctgcctgccagtgcagcacatgagagccgggttcgatccctgacttaggaagcttccctggaggaggaaatggcagcccactccaatattcttgcctggaaaatcccatggacagaggagcctggcaggctacagtccatggggtctcaaagagtcagacacgactgaagcgacttagcagctccatctataggcacatgcactgctgtgatataccagtaataaataacaatgcaatgatgtttaaaaataaaccactaattgctttctaaatgtaaatactactcaaattataactaaaatactgtgacttgcctcaaagcaactttcacgtactttcagagtctaattctcatcacgttt

SEQ ID NO: 41188 - DNA, 1591 bp, Bovine  19866880497378
  misc_feature (1)..(1): n is a, c, g, or t
ngtttgggttcagggaaaaagcagccttggccgagacagcttcactcctgagtagtcagagggaagcaggcttctccccccaagcctcacggtcctgccagcccacctacctggtagttgcgaacaccatcccagcacgtcgtctgcctgggctgtgcctggagatcctcgatgctgaactgggccagaaacaaggtcatttggtgaactctcctgggccagcaggtcaggacgtttggaagcagacatgttcttccccgtttagtgtgagcactgctggcagcagggcccaggagcctctgggaaagtaccccacagcccgtgcgtgccacgcacgcagacagcagccctgtccaccctgtcatctgggcccaggagcctctggggatagtaccccagagctgcgcatgccaggcacgcagacggcagccctgtgcccccctgtcattcctcacagtccagaggattaggggagtgggtaattaatctgctaatcccgttatctctatttctctattattaaaatatatatcccttctatagcatctccaactgtgttgtctctgggctgtgtgagaactgagtcacactcaccccctggttaccagctgttggcagggagatacctaagggcacagtgggtggccagagaaaggcagcctgaggccaagtgctgcctggcatggggctggtggaccagcctttgggctgcatctggcccacgcctgactcgcagacagtttcactggagcacagacaggtggcctatggccagttttttttgttgttatcttgcccgggcgtatagctgactgacaacgtggtgagtttcaggtggacagtgaagggactcagccataggaccacatgaacccgttctcccccaaactcccctcccacgcacgctgcgtggccccttctggtgatggcagcagcactgcgaccacgaccgcccggccctctagagaaaagctggagggtcacagcgcagatggcaataaaccctgctggtcctactccacaccaccgtctccctgctcctcagaggcaagaagtaggtgatgggccctgtggcgtcccctgtgcaccgtggaggtgggcgcagcacctcaccttcacgtccacacctttctccagtcgactttctggctctgacttcatcagccagtagctgctgagagcctccccactgtcttcagagactggagtcttctggaggctggagttctccacttgggctgatgccctccctaggttcttagttttggtgcgtttttcttctggccccttcatgtctgcaagagaaacaaaaagaaaactttcttacctgctgagaaagttctgatgcaggaaaaacagctgctctggagtcagagtttcccaggtggtgctagtgataaagaacccacctgccaacataggaaacttaaagctatggcgttcagtccccagggttgggaagatgccctggaggagggcatggcaacccactcgagtatccttgcctggaggaccccatggacagaggagcctggcgggctacagtccatggggtcacagagtgaagcaactgagcacaagcacaatacaa

SEQ ID NO: 41189 - DNA, 2165 bp, Bovine  19866880620437
  misc_feature (1)..(1): n is a, c, g, or t
ngcagccagcagcagatgcagtgagagcacgctgcctcccgcgtcctcccgccggaggccagtctgtcagggccagggcccagggctcccgtcctgtcctgctcagccactgtggtggggggtgggcagttcttgactgcgctggggccacgtggagttggtcggtaataagtgtccccgttgcacagctggggacggggggcgctggggtccggggccttgtctccagcagccatctggagcacagttcaccacttcagcagcagtgtgacgtgggcacagacagccagcaggactgtgtgagaggagggtgggtgtgcaggaggtcttctcagagggtggtctcgggacaagcaggagtctgttaggatgtccatcctgagtcccacccaggccccagaattggagatattggggggggagtgccagccatctgtgcctcagcacagcctcggaggtcctggtgctgacacgagtctggggactgtggcctagactgggatagcctgacagcccctccgtcagcggggccgcgtggacccgtctccaagtcctcacctgcctcttgcctcgtgttcacccctgatctcccggggcccaggagcagacacggccgggcaggaaacctggggcgctgggcccggccccgccccgccccaccgcgcctaagtttccttgtctgttaaacgcgtgacgggcccacccagcctctcaggttgccgtgaggatggtgtgactgagtgacggagtcgagcacgcttcccacacttaggaatcgctataactgtgtaaagagatgcggtgtttcgatggcagtccccccgctgtgtcccctgggtgcttccctggacagggtctccacagagcgcagggtctttgggtgcagggctgccgtgcggggcgggaagagggggtcgctaaccgccgtgcggctccgcggctgggagggccacttccgcagcgggcccccgccgccctccgtgggccaggctccagtagggaggtctccgctctccccgcagagctctactacgaccgcggcaaccaccacgagttcgtgtccctggtgaaggacctggcccggcccggagaggtcacgcagtcacaggcctttgacttcgagttcacgcacgtggagaagccctacgagtcctacaccgggcagaacgtgaagcttcggtaagtgacgtgactcctcctcctcgggttccgcacacgccgggacgtggacctgcgtcctgttacgtgagaagggggtcacagatttggattcttttttaaatttgtgtttgactgcgccagggcttcactgttgccagcgggctttctctagctgcggggagcgggggcttctcattgcagtgacttctcttgttgtgacgcacgggattagttgccctgaggcgtgtggactcttcctggaccaggaatcgaacccatatcccctgcagtggcaggcagattgttaaccactggacccaccagggcagtcccagatttggattctgatcccagacccatcctctgcatcttttgggacaggagaggataaaatgtagcacagtgtgagaagctttagaacaggaatacacaccttttaagtacaggggattgtcttccttgtttcagtcttgaaaacccaaggggggcagtgatcccagggcctctgggctgtgtgatgtcacccggacttctggctccaagttgtggtcatcacctacctggggcctgcgtgggggaccacatgggctctggggaggtctcccctctcccgtcagaagacggactgcaggctcttttattccagcctttgcagggacgtccaagcgccgaaggtgccccattcagcagcgctctgtgactgctctcggaggaggcagcaccagcaagcactgtctagttaactgtcagttaagctgggccggggtcttattgtgatttaatgtgatgctctgcagtagattcctcatagatgttcctatgtcagaaagatgttgaaaatagtatggcagttcctcaaaatattaaaactaccaaatgatgcatcaattccacttctgtgtgtaaatccaaaagcagtgaaagcaggactcaaatgcaagtgctctcacgtttgcagcagcgttcccagtagccccagggtggacatgaccccagcgtccatg

SEQ ID NO: 41190 - DNA, 1609 bp, Bovine  19866880867406
  misc_feature (1)..(1): n is a, c, g, or t
ncatgcctgcatgtctgcatctgtgtgcatgtttgcatgcatgcatgtgcgcacatgtgtacacgtatgtgggttagagggaggcagatgtctcactcaagaggggcacagcagcccctccctctccccggtccccaacccctgcctttcctacacagtctcacttgtgttttgtgttaattgcacttaatatgcaagtttcatgataacttcaggaaataagctcaattaaatgtagatatattcagcttactgttgcattttacaaatataatttttccattgatgtttaattgccttaaaattctttcaaggttaaaagggaactatctcttgaacattagttattaaattatgtaatgccaattaacttgctgaattgatttgagctttatgacactttttattgattgtttgaaagcaagcttctaattatcaaaggattggatattttcaactcaaaagtcctctgagactaacagaaagctggcctgtcattttgaaggtcttggttccttatgaccagtgacctgaaccccagtgtgggctcaaccaaaggaagcattttcctgggtggagggttccgggaagccttgaatctgcagctggttttccacggtgttacccagctgctctccagatcaacagcggcacccagaagtagccatgtgatcttcataggcaaagagctgctatttcctccatttgtcctgcttggagataaagcaccccgcccccagggtctacccctgggtaaacaccaggggtctgcggtgggtccctataaccagggatgtgtccttgctgttgaatgtccagtgcactcaagagcagggattctacaaaaaggcatgaaataaacttaattatgtgttgaaagtgaaagtcattcagttgtatctgactttttgtgaccccatggactatacaacccctggaaatctccaggccaaaatactagagtggtagccttacctttctccaggggatcttcccaacccaggaatcgaactggggtctcctgcattgcaggtggattctttacaaactgagctaagagggaagccccaattatgtattagtcataatcttaattaaaagccaccaaggcttaagcaaaagctagcaaatagcatgttttgaaattgtgaaaattttatttttaatttgttaaattaaaatttatatttaaattatggaagtttatacttttatagcagcatcattaaaatcatagggaaaattcaatgaaatgtgtgtaaagtcatgctctaaaaactacaagcactgttgagtaattaagcaccgaatcgagctatgaagttaaaataatatcagtcagcttctcgtagtgatcgtgttttccacgttgaacagattcatgagataattattctgtaaagcctttggcttccagaacgtggtttaaaatcacagccgaattaattcagcctttggctcctcctccagccctcttttattgacttttctctcacttcccaaatatacagattgcatttctggttttattaaaactgccctgctgcagaatacttaatgggattcaaaaatgggtctcatttattattgcataattaacacacccaaa

SEQ ID NO: 41191 - DNA, 2351 bp, Bovine  19866880904636
  misc_feature (1)..(1): n is a, c, g, or t
nacagagttgtaaacaggtaaaacaatgccactcttctcattaaaatttctttgctttggaaaatattttttttataaaaattgtgttatttatgttaacatgtgatgaatttattgacgttattttttaaatttatttatttgactgtgccaggtcttagctgaggcacacgggatctttggtcttcattgtagcatgtggggtcttcaggtgcaacatgcaagccctaaatcaaagcatgtgggatctagttccctaactagggatggcactcgggtcccctgcattaggactgtggagtcttagccactgaaccaccagggaagtccctcaatgctgtttttaattaacacttttttaaacttctcagtttgcatttctaatatatatgaacaaaaatattttgactgtctctgtcacccttatctccatagcagctgtaaataaataaagttattaatatattaatctcctatattaaaattctttcaattaattccactgcagttagaataaaatccaaagcctttctgcagctcacaatgcactaaaaaaggcacacgaccagcatttgccgtcatctggggccccgagtctgagttccagcacagcccccagctccctattccagaacacaccaagctattctcacttcaggtctttgcatttacttatccagacccttgcatggtggcctggttgaaggaggagtggatgaaattctggataaagaggacccgaagacagcggtgtctttcctggacaggtctgtagatcagattcaccttgaaagtcaccagctggtgactttcgctctagaagttcaaagtgaaaagaacaaggataaaaaaccatggtgggggaaggggggttaagaaaaagaagaagacgaagaagtacgcttttagcaaaattaaatggcaggggtgcagaaaggccctgggttctgatacaatgtgagtgtccctgacaatttccatttgaagcctgggtctcctgcattgcaggcagattctttaccatctgagccaccagggaagatagtttcttcacttaatattccttataaataagttcctgcatagctttttcattcttttttcacagtcacattgtattctattttagggaggtaccataatttatttaaacacttccctcttgatgagtttatttttaaccattcccctccatttttttgcagttaaaaaccagtggcagttaataaattttacacatcatcatgcaagtgtgcaatattctataaggtaaatccccaagagtgtcatcgttgggtcaaagattacctgtatttgtaattttgataaatatggtcaagttactctccgttttacctgtcagcattaatgtaagaaagttctaatttctcacagatacatcaacaaagcacattgtcgaatctggggttttttccaacctgataggtgaaaaatgaaattttggtgtagttttaatttgcataactcgagtgagattgtacatcatttttatatacttaggggccatatccattttccacccttgaactatgtgttcacatccttcacccaatttccttagggatttttggtctttggctaataggtagctatgggttcttcacccactaggaagactgcctttctttgtgatatgagttgcaaatatttttcctagtttatcatacttgcaagtgatgttttgccgcacagaactttttatattgttaaattcctcagtcttgtgcgatttccatcattacgcgatttccatcatttcgtgatttctggattttgaaccagagtgagaaacgtattactcacctcagtgttataaaggttttaacacagaaagtctcttaagttctcctttgtatttacatggatttttttaacatcccattttgattcatttggagcttttttttttttttccaacttatcacacagggaagaggattccttgcgtcctcgctctccatccagcccccctagactccccttctatcctaacctgaacttggccctgtcaccacctttagacataacagcagctgccagcaatgtggacttcaggagaaggcggcaggcctcgggcatctccaggagggatcagaatttctgcacgaatccgagctgtctgggatcaaacaaggtttgggggaattgaaggaggcaactgaaggaacccaatatcaaggaccccaaatttgattgcttgagccacttaaaattcttggaggcactgaacagcgtcccttggaaagggagagaaacagacttgaaaagcagttccagggtttcgacatgtgttcttcgctggtagaattcagggtgaggatttgaagggc

SEQ ID NO: 41192 - DNA, 1385 bp, Bovine  19866881229749
  misc_feature (1)..(1): n is a, c, g, or t
ntgttcgtgcatatgctcatgcacacacatgcatagatacgtcttcctaccgtttggacttctccgttggggaccaggctggcacttagctgagctggaggccccagaactgtctccctcaagatccatcaaaaagcacaggggaggctgagaagcaagaggaaaacttgggaccactttctctcttctttgtagctgcagattttctgtttccaatagatattgtgaaggcagcctatgtacaaagagcaagaatgagggggtaggcagaaatacagaacaatggagaaagtcttgctggaacagggctggaggggaggggcaagggtgggagggcgaggttggggccggccccatgtggtcttatgtctctggacacacagatcctggtctggcacacgcggaccgagaaaccagtgctggtgaatgaggggaagaaaggcttcactgaccccacggtggagatctgagccccggacacaggtaaggggatgcgagccggtgacaccctgatcagccccccctccaagcttgggtgtagagtaaacctgccaaggcgtttcctcctggtctttaatcatgacagtcacagcaaaggccccatggagtggaggaggcagagatgaagtcagtaggtggcaacctccccgcacacctgggccccccagctgggtccccgcacacctgcacccccccaagctgggtccccgcacacctgggcctcccagctgggtctctgcacagctggatccccacacagctgggtccctgcacacctgggcccttccttgctgcttggaggccttcacctcacagcaccgcctcgtgacggctccctgtctccccatctcattctggccacaaacctgtcctcgtatgaggccctgctgggtggactcacccgggctctgtctgcatggtttcctcctcagttgaggtagaagcgtggactccagattctggcccagttcctaggctcccatttccctcattttcttcatctgctaaatgggttgttggggcaccagaaatagtctctggcactgcccaactgctgctgcttttatttggtccttaaaaatcctgtactgaagtagttcacaggctctatttacgctttagagatacaggaacgaaactcagaaaagctgagtggattgtgccagtaacccgcacagccaggcccttcctgagctggaggcttgctgtgagtggggttctcttggtcttcaggcctcggagtcaggctgcagcttttgtgcctcgctggcaacagcccaactgcaggagaccgcgggggtcatgaccctgagcatggcagatcacctgggccacgaccagaccgcagtgggtcagacagagcacgctcccagctcctcgggcgt

SEQ ID NO: 41193 - DNA, 1361 bp, Bovine  19866881578499
  misc_feature (1)..(1): n is a, c, g, or t
naaaaagaccataacctacaaagggaccccaacaagctaagagctgaacagaactatcccacgatccagctattccacttatggtatttttccaaaaaatatgaaaacactaattcaaaaagatacatgcgtccttaagttcactgcagcattatttgcaacagctaagacgtggaagcaacctaagtgtccaacaagagaaaggacaaagacgatggaatgtgtgtacacgagggactactacttagccatgaaaaggaaggaattcttcgatttgtgaaacatggatggacctagagtgttgcgttaaatgaagtcagacagaaaaagacaaataccacatgacttcactcacacgaagaatctaaaaaacacacagtaaatgaaaacacccaacaacctcacaggtacagagaacagactgggggtcacgagaggaagagggcaggacgaaatgtgcaaagggggtcagctgaacgtgatgcatgggatcagacttctggtggtgagctcgctatggtgggcaagaagcccagttataatgtatgcaggaaactttaatgatgttgaaaaccagtgttacctcaataaagaaaaaagaatgaaacacaaacaagcaatcactccaatcccactcccctgaaataactactttttgcattttcagaggtatctttgaaaacgttttattagtgtttacatgtatctatttcataaacaaaatagcacatgctcctaaaatatcatgtttcttttgccatgtaatccatcacgaatcttcctgcgactataaacaaaaactattataaacgggacagaaaaaaggcacaagttctggctgcagtgagggcagaaccaatagagacagcagggccccactgctccagaagacattttggagacaagagcaaaggaagggacacgcggggagttacctggctattggccagaggctctccaaactgcttccggaccttgaggtagtctcgagcgaggacgatcgaggcgtgagcggcgcccagggagcaggaggctgggagggaggggatcaaggcggccagggagtttggggggccgtcgcgcccgccccccgcccccaacccccgcggtcctcaccaacattgatcctcccgccattcaggcccttcatggcgatgaggaagccctggccctcgtccccgatcctgttggccaccgggacggcacagtcttcaaagatcactgcttgggtcggctgtgagttccaccccacctggcaaaaatcatgggctgtgtggcggcccggcagtcaccacacagcgcgatgtctgctgtccacccgggcccgatatgggtgctccaccgtcccgggactcaagctc

SEQ ID NO: 41194 - DNA, 845 bp, Bovine  19866880650941
  misc_feature (1)..(1): n is a, c, g, or t
ntaaggcccccttctgtgttttggtcctggctggattactacccaatcttagttggtcagaagctagtatgctggccagtgctggcgtagagaggggagacagcgagctttaatggtcttgaaaggatagcttttcttgtttgcaccctgatttttctatttgctagcttattacagatttgagatgaagtctaaaggttctgatgccagaaaaagccctgggtattccgcaagaggaggctctcagggcacgagggaggggctgtgtgagagcctgtccctgccatggcccctcctttcacatttccctggtgatgactgatgacttggggttttgctagaagtgtagcattgatgtgggagctaaactggcctgggtgctagttgtcaagagactttgagaggcctcctttgacatagaaaggggctggaaaaaacttggactaaatatcaagttccaaatcgccatggtggaaatgtttttcccagccttggggattgtggtgaattagttcaggctgggatagaacttgggggagggaaaaggctcttgacagcagctctggccagaggaacccccttgttaagagaccccatttagaagaccctaggccacagagaggagcctaattcctagacttttccatgtgaccctgctttagactggggaggtgtagggctgggtgggagagggatggaactgatgcagtagactccttgtgatttgaggatgtttcattgctcgtaaggagattcaacctttttttcttttttttcttaaagtaatactcattctctaaaaaaaaatgtttgggcaatttataatttagattaaagggaaaaag

SEQ ID NO: 41195 - DNA, 1511 bp, Bovine  19866880922149
  misc_feature (1)..(1): n is a, c, g, or t
ntaggcctactgaagtccagacctgtgctcctgtactgaactttggggtggtggtggctcatttgcagactgaaagggtcacagactccctttcttctcaaaacttccctcagaatgatgcccagataatgttctaaaacagatggatgagagatagctaagtgggaaagagtatttttgtttgaatcgtctgtgtccagagtatgcttaggcccctttggacagatttctggtttatggttgtggttattttgttttcacttgctgctcagcagaatcagcatcacacaaacactcattatcctcacccccttggcagtcaggacacttggtaaatcccttgtaaagtgctcacgtctgcagattattttctgatgcatctggcatgagttccagattgatggtccaatagcagctattaattgctccctttgggcttgcctaattactgctggcatcgtgggtgagtaagggattaagagtctcttctgcatttatggggcagcaggtcctggtgagctcccaaagcatttatctgtcatttccccagaatacccttgttaaaagttgggagtaaaacctcaggagttgaagggtcggcggctagacagtgtctggtggcattaggcttctcggttgattccctccgggaattgtaaagaaaccatctagtatttgttgcctatggatgactgtagggaaatgtcaggtggtgtcacagtgttataaaacactgcaggctgcttctgattgtctcagaggcaagagggcagagaggctactccggccttatcccaccacggctaggtatagagtcactcagtactctggagggcttctgaggctgcgcactgagaatggtgaaggtgtcatcttcctcgcctggagacgaagaagggagaggaatgctatgccagtgctcagagccttctgagtgcagcctggtgttcattcactcagcaagcacttactaagcacttaggattgtgttaagtgccagagaaataaagatgaccgagccagtgtctgcccccaggagttcagtctgaaggggaagacaaacacattaacatctaattgcagtcttcagcttgggaagtgtgatggtgtagaaagggaggagcacctgggcagcacagagcagggcttggggaatgctgcctgtaggaggaaatctctgctggctaaaaggataattaggagctggagagaagtgtggaggagaaagcattccaggtagaggggcagcgtccggacgagacagagcgtaatgtgctcagagaatccttccggagctgctcggggcttttggagtatagggtgtaaagcagacagtggtgaaagcactttgactgctctgtggatgggcttccctggtgtctcagacaataaaggatctgcctgcaatgcaggagacttgagttcagtccctgggttgggaagatcctctggaggaggacatggcaacccactccagtactcttgctggagaatcccagggcacagaggag

SEQ ID NO: 41196 - DNA, 2577 bp, Bovine  19866880977893
  misc_feature (1)..(1): n is a, c, g, or t
ntgactggccccctcaacatcgtttaaggctgagtggagtgctagcctccccctccccatgctttcggaacttagcctcagaagagcttctcaatccccagtgtcttcatgaactgtcctatgaagaggagggcttggatcggtggattctgggaagtatgaccaaggcccaggctgaaaattacagggcaaggggtggaggagataacccctccagaactcaaactagaaatcagaagaggaatcaagggacctcagaggagaggtgattaaaaaaaagtctgtgcaaatatgtgttctggtgcctccctttgtggcactctggccacggtcttccattttgctcatagaaaaactgaatcatagttagcaagaatcatttgcttaataccatgagccccttggcaatgaggcaccagaatccttcttcccagcttgtgtctagaagttggaaactacagagtgcaaatctggtggtggtagcgggggaggggggagatggaaggccagggaggggttactcaggaccacaaactcccccgagctgtcagggcctgaccactcggtctcattccagccgccatccggtctgttagctgtaggatcttggatcaagcctctccatcacctcagctctcctctgtgccatgggcatgtgcagagtacttcctttgcaggatcgctgtaacgggttaatttagacagcacacagggagcaacccacccgtgctctcagttatctccgtttcacataccaacactaccaccatccattcttgattccctctctcctcacatccaagatggaaaaaagcttcacatgcttctgcaatatttcttacaagttggagataggaaggatggagagggaggcgttgggaatacatagataacatacctagttaccctccccaggggcaaagagagccactggcatgtgggaggagaggcaaccctggagggagcagtcaaggaagggtccaggtatccactctgaacctccatgactccacccagtaactttccactggctgagttagccactagccaaggcagcttgcacacttcccccaggtgtggcctcttggtccactctccagcagacctgcagggggctggtggctgacgcacacagtctgcctgagatctcagctgcctggaagctgataaggagacctgatcccatcacatgagaccagccagagggacttgccctggttgttagcatcagctggacggtttccaaattggagagatgaggagataggagtgaaatggcctggacctctgaactgagtggtcagagaagctaggagtagagacacgggcactgccagtggaggcctcaggaggcctggctggggataagccagcaactggcagtggatgagggaggttttggaagtaagatgggcagaaaggccttggggaagggctggaggcagggcccaatttcctcctgggtcagggggtcggggtgggtgctgctggctcagcagtcagaataagtctccttttcccagaacacccagtcttccagcgctcaagcccttactcagcctcaggcctgtgagagcaggctggggatttaagagaagacagtgagaggacgtcggtctcagtcctgccacatctcccaggaggacgcaagtctgggagagtcagcaatgctgcagagcccagttgcttggctgcttgctcctttggaatctcaggacaggtctccactcaggagcagggcccccctatacccacctcctgccctggtagtgctgtgttgtgacccagaagggtagaccaaggcaagcacagatggtactggtttcctgcccctctcttctgccccagggctcaagtgcctaaaacaagcccctggtcccagagctgagggaggctgggcagcctgggacagccatactgtttacccagtacccttgcctctccgcagagcacacacatcttgtctcccagttgtcctcaccaccacttccttacagaacgtcaaaacctaaactggaaggagggcgaggaggcaggggttgggcacaggacagtgtgccccagggtcccacactgtgggtggccctaggaggaatcacagtcaggttgcaggcttcagctgggcttcctggggcctttttcccacatctgaaatcctgctgggcttctcccacgcatcccttgggtcctcaaacccagaggggcctccagcctcgatggtcccagtctgggagaggtagctgggggaagggtggcacaggggacagtaggaccgggttccgcagggcccctggtggcatgggtacaagctgcagagggtggggttgaggacagtgagtgggtcggccgaaggctgggctggcagctagctttatatctcggcttgcaggagcacagggagggtcagaggaccagcaagggggcattctctgaaggaaggaaggaaggggtgggaagggctccttattcccggttggtgccaaaaagctgcaggaagaaggtgaagatatagatgatgtctaggtaaatgttgagggctccaaaaatatactcttcggggctcagcgagtggcgtcg

SEQ ID NO: 41197 - DNA, 2868 bp, Bovine  19866881046559
  misc_feature (1)..(1): n is a, c, g, or t
ntaatgtgtgcaaagaggaaatgaagggcggagggagaggaagtcaaattggggaaggctggatggctgcttcacttcttcttcttcttatcctagaaatggaggaaaacgacccaattaacttctggtgttgacagttaagctaaaactcttgagtgagccaacagctgactgcctttgattaggtactgtaagacggaaggagagaagctactttggtgtaggaggagctaaagcttaaccgtcttccactggcagtcccccaaattgccagacttgacaagaaaaaagtctacgctctcgctcccgcttctaaccggcgtgaagctaggtgcgttgcctgaccactcctggtactcacaaccgtgacagctcagatacccaccaccaaaagctgcagactggcagtctatcctaaaagaactaaatcagaggccaagaccaactttccattaggcctgagacggaaacataaatcctgggcgtaagccaacatgcaaaataatccagtccagccaaactcttcactgcacgggggtggaagcccagtgtataattacatgaaagaaaggcaagttgtttggaccgaaactgggaggctggcttcgtgctcagcccattcgtggcacagccgagacaggggccacaaatcctatccagtcgccagcacccaccactgctgcactgtcccttgttccattttaagttccgtgaagaaaggctatgctttcagctgttcccctactactggagtggacaatgcttgctcctcactaaccctacctagcatacctcacttgggaaaaaaaaaattagaccaacaaatggatacaactggcctatttctgaaataaagataaaaaagctggctgtcattttatccaaatcctctaggatctctttttgagtcaaagctatctttacagcctttaaattcttcatatatactaattgtttcttgctgccactgaagctcttttccttctgatactaatcttggggagacattttctaaaaaaaaaaacagaattgtctttacttgttcctttttatccaacagctaatgacttctagtttaacttatatgcagtggcctgccttacaagtaccctgggcccacacacagtgtgagcaagctctcaggtttgaaggacacacagatgctgagctcaggagcccgtctttcctcttcgggtggtgctaaccttctcattcatagccaggatcatcatgagctttctgaagagagttacgaaatccaagaagaggtcaacgcagtgcctgaaagagaaccaccaggttataaactgcactttccatgtgtctttatccacaagcccacagaggtacagggcataaaaacctcaccccaaccccaagagtcaacctcaccagcaccctaccaccaacaaagtaccctattgtctcagaccctctttgactccatgaatccatgaagcacagaaagaagaaaatttagactgttacattcctctccctctcgtctacctagaggtaaccactattcaaaggataagataattaaccatctatcaatagtccaacttttaaaaatctgatgtctttcaggaactgagaaagacaatgctttctaatggatagttccagaaccctggatattccatcatgtatacccctggtaggctggccacgtaagtcagccagtgccacctggtccactcttattcctaccaatgtgcaaagaaaggtgagtcagacaaaagatcatcccagagattcaggaaagagccactgaagagtagcctcctcctccatacttattaaagaccattttcacactcaccagatataatctttatctccattttcagccttttcaataatgagttgagtatcaaaaaggacaaagccacacatgaccaccagccccatatacaggtttgcctggcaaaagaagaatgagatgttaccatgtggtagaccttgtagagaagaacagtcatacctctctctggtccttggtcacttcaaagtacatcaaacactaaccctacagacataaacattcacgaaaattgaagcccacaatgaagaccatattaccttcccaagcacaattctgcacttatttttttttaggtcactgaaagagctttgatcattttaacaagaagccactgctggactggttttagaaaaatgacttctgagcaaaccatcatctccactgcaatgcccaacccctgttcagtctgtactttgacctggagcagaaggctccactctgaaagggtgagtggggaggcttcaagagcactgcccatgaagataagagttttggaggattcctagcctatcctggttttaggagattaaacaaggaaaagaaacacaaggtaaatggggactggaaagttatatgcaaatctcacctggaaaagccaaacagatccgaagaaaaggttccccagggaagacaagagcatgaggctcatggccgacatcaagatacctagaagggaagacaaaaaccaccttgagaaaagctaacacaaagttcagcaatctcattaaagccattctttactttttcccccaaaacagaggctttcattctcaacccaacagttacaagttggagggagggaaagggtcccagggagaattttggctaaagccgagatcctctccctgttttccagctcatacatacctcctagaaagaggtagctacggcgcctggcatagagtgcactcagggtgaagcaggtgaagatcattgctgtgcccatgaaggcagtgggaaggatgctgttaaaggaaaaggccgttatatcaagggctacaggcatataacctttgtttagaaggtatcttcattaaggt

SEQ ID NO: 41198 - DNA, 2060 bp, Bovine  19866881332601
  misc_feature (1)..(1): n is a, c, g, or t
ntgcctccagcactgcactttgctcccaaggtcttcaacttcatttcctcaagagccagctcagggctagaaaaaccatttccagctttaagctaggccacgggcacctaggcccgccgtcactagaggcagagggaggagaggagaaagcaagtatcccttcttttttccccttactttttgaatcccagtggtcagctgtgatctaggagtgtccaagcttagcaagccctggaccctgccagcctcaggtctccttctaccaggagcaaggccctcctaagcctgggcctgcccagctgtgccctagtgacaaggaggagcgatcccacactccctgcccatggccctttgcagtcaaggctgactctgtccttgccaatgtgagcagaggggtcgtttcctcttccccaacctggagacagcaagacaaaggatgtgccaacagcatcctcatttttcccagctaggttttgctggcagggggcagggtcatggtggtctcagctgttttctccatcccctgccagtttcttctcagtccctgaagggaacacaggggcccactcctttttgtacatgtaccacttccttctctcttgtatataaacccccaaaccttccttctctcaacaaaggcttgaaataccaggcctgactctgtctcctttttctgagcataggggctacatcggccatttaggctgacctaagccacaggggggcttccctggtggctcagcagtaaagaatctgcctgcgatgcaggagacgtaggttcagtccctgggtggggaagatcccctggagaagggcatggcaacccactccagtattcttgcctagagaagcccatggacagaggagcctggcaggctgcagtccatagggtcacccagaattggacatgactgatgtgactaagcagcagcaagccacagggacagaaaggaggctgggtcaagctgccatgcttgggggaggtgactgcagaagcctgggcaaggagaatctgtttagatgggcgccaacctcacacagggaggcaggcctcccatgaggcaccagtgccccctgctggccatgcgtgtacctgtctggtccccagcctgcccccagtaccaagcccaaggacaagacaaaagagccactggccacgttataaatattgtcatttaaaaaacaaaaccaaaacaaaacacacatacgctgggccccaggggtggtggagccccagggcctgggcaggcgggagcaggccctgatgctagcggctaaggacctgcccctgccgcccaggctgtgtccaccagcctgccacttgttctgggggccccatctcacattttatctactggcaccacccacatggcattcaccaccaatcgctggtctgagactgagggcaaggactgcactagttgtccgggaagttgaggggacccttgaacaccacaagcaccttgggagatgccagaaatggtgggttggggttggggatacttgagaaaaagtggacacagacccaactaaagaagtctggggcagacagcgagggtgaactcagccacagcctcacgcagacccgaggcacggtggcgtgtcaggtcactggtggtcgtccagctgctgcaagagcgtccgccgccgtctttccagctcaccctcactcagctcgctttccgacgtgtcccagcccgtctggtggagcaaaggcacagctcacccacggcttccccgagggcctgggcagcgcgctgaccgggcgggggccgggggcctgcctctctcaccttctccttcttgactccaaaggctggggagcggttagggagctctacccgccggaggtccctgtccttgtcctgttccggttctttctcatcactctccttggcagctttctcctcagggtctgtctcgctctcaggactattctgtaagagcccagagcccacctcctcagttctgtggaggacggcccgggaggcgggtgaagacatgaagatatctcataaaatagcagagacttggacgcaagttccttctctacgcaccga

SEQ ID NO: 41199 - DNA, 1241 bp, Bovine  19866881656121
  misc_feature (1)..(1): n is a, c, g, or t
ncatgaaactgagcaaaaaagactgggacttctgggctggatttgctttccttacaggtatgtttgggatggctctgatttttgagggagcgacactgtattttagtatctctttaaaccaagggcccaagatatgtatatattctgatgcatcccaattggcacactgtattatcctgtcttgtatttgagtgtgccttgtattactttcttatttcatataagtacatcttgctcccccatccagagggtaagctgtttgtgactcgtgactatgacttctacttttgtacccaaaaataagcattcatgtgcttgaatgaatgaagtttaagagcttaggtagcatgacttgttaacagtggacatgggactaaacagcggcctgagaatctgatttaatgaattaaggactcaacgctggcaactttcgtaggagcatctgttctgaatcttgcagacagttcattaaagccatacatcgagattcatcctacagggcactttgctgattctcaagaaaagaagtacaagcacagctcttctagaataatcattaaggaaaacagttcaagcctacctaataaaaatactcacagagcaacatttgagttaatacaacttgttctgagtgcgtctaatctgtacagtgttgaagaaattgtaggaaggaagggatttagagattagatttttagatcaggaaaagctggtttttgaaagtgttaagaggtgggatgagcagaaggagagggcatggccagagtagaggaagtgtttggagctgggacaggtttccctcctgttggcaagtgtccacctgcagaaccggtctggccttttctgctacacagggagtcagtctgcatgactacaggttgttggccacttttcaccactttgctctttatccttttcttctattctgattcctgatctggcccacattacagtctcacatcactgctcttcagaatttttcagccttacagtttagcttgacaatgtttgaactccctgcttcatttctcctaatctctgttccttctgtgtcatccatgattttcaaccaaggacttggttttgcagctctgtccataaataatttagtcaagtatatgttctctggaaaacagttgaggatggaagggagggagactgaattatcttagtccacatgttttgttttctaggactgtaggcatgcccatgctattgattaatccttcaagaattggtgt

SEQ ID NO: 41200 - DNA, 1286 bp, Bovine  19866880222359
  misc_feature (1)..(1): n is a, c, g, or t
nctccaggcaagaacactggagtgggttgccatttccttctccaatgcataaaagtgaaaagtgaaagtgaagtcgctcagtcatgtccgactcttggcgaccccatggactgcagcccaccaggctcctccatccatgggattttccaggcaagagtactggagtggggtgccattgccttctctaaaatactactctaacacgatctaaagtcagtttcatatttatgaacacttaaggtgctctggatatgaatatgactttggcaaggaacataagaattagtcattgaatgtgtttcatatacagccatacatatgtgctagtaggtatttaatgaccttgctccaattacagaaaaatatttggaaaaaagttaagaacccaggttaggaaggcgtctgaaatggcaatgatattcaggaagcaaggtgaggaacgtagtcaaatagtttgggagtatttttaacttggcttttgctaacgccatacttttaggggaaagttaagttgttcaaatcacagtatgaatttgacatcattctttattgatttacttgatcttaaaggaaaaagtgcattactattttggattttaatatttaaactccagaaaacattggtagttaaaatataattgcaaagtaaatcattgttaaaaaatacttccacccttttactgggcatacttctatcatataaatgggcattaagccagaaatataaaaacttcctctggtttaaaaaatatcatattcttaaaaaaaggatttatgtcttggactgacttataaaattttccttgaaataccttcatgaaaggaaggataatcttgtatcaagcaaatatgttataccaatgtgtataattttactctgtagaattcttaatgatgaaaatttaatgaacagaatcaatttcctaaagtttttaaattattatttgttgttctttggttaaaaggaggaaaaatgaagtaaaagttgatagaaaatagaatacatgatatatcacgttattctgaaagtaccttgtattcttagtagtagaactgaaagattatttctttagaaatttgcaaggtactatttctgttattacaaacaatattgagtgattaaaagttctgtgaagttccttaagctatgataaagcctccttaacaacattaaaccctcactgtaattttttgagggtagaaatcagaatggccatcatcaagctggcctggcatttatatagcactgaaggaactgctgtgaatgatgtaatgatcttgctgag

SEQ ID NO: 41201 - DNA, 1676 bp, Bovine  19866880543811
  misc_feature (1)..(1): n is a, c, g, or t
ncttgtcctttgggcatttctaaagtgtgggaagtagacctgtccctactgagccttctgatgtgagcagactttggctgggggaactttctgtgtgcctttataggctgctgaaactacacttaacatttccctcctgctgtttaagaacagctgggcacagatgtttttagtgggtggcatagtactgtaaattagatggaaaggtcgttttagaaaatcctcttttagtcttattgtctctaaattccctttttggagcagatggggagatgcacaagtttgcatcttaaagaaaaatagatcctatatccaagggctgtttctaggtgagtcagaatcatttcacaccagacagagcaggcttctgtgagactcattcgtgttccctcttcctcactacgtccttggtttaagttaaacacgtgggggcaagcctgtcagaggagactgctgactcacttccagaatggatgctatttaggtctctgaggcatagacatgcatattttgttttggggaggaaaaaacaaaacccaaattggcaccgtgaaggtctgtttgtacattagtatcaccagctttgaaaggtgaatgatatgggagaggaaagaacaaaagggatcctgagatcttacgtatttttacttttttcccaactcgccttcacagggaatgttagcccttgtgttaaactgcattgatcgcttaaatatctacaatagcatagcacactttgcagggatcgccagggaggagagtgggatggcctggaaagaaattctgaaccttctctacaaattgctcggtaagtacatgcccagagctctctccctgggcaggtggctgtggaggtctataggcatttttgttccaggaagggggagcccaaaaggggactcttatctaacattcagaaatgagtggtctagatatatgtgctaacaaaacaagagaatttgttgggaaggggcacctggacggagaggagagttagggaacccgggaggactgctctgtcatgtggctcacagtctagggtcctatggtaatgggattagtttccaggttgtctctggccaatcactcttactcgcgttctccctggtcgtgcatgcattgctcagccaagatggattccagcaaggaggattctgggaggtcagtaggatatgtgatgtctccttttgacctttccaaaattcttcctgttggtggtgctttgttagttctatgttccttaccaggatctcctattgtaaaataactcatgcaactgattactgtggtgcctggccagggtgggtggtttcagccaatgtttcccttaacattttcatggaacaaactgctattgtcatccagcctcattccttggaagattgtgttaaccacttgattctaacccagtggattatcaaatcaaccctgaatattcattggaaggacatgctgaagctgatgctccaatactttggccacctgatgcgaagagccaattcactggaaagaccctgatgctggaaaagattgagcacaagaagagaagggggagacaggatgagatggttggatggcatcactgactcaatggacatgagtttgagcaagctctgggagatagtgaaggacagagaagcctggtgtgctgcagttgatggggttacagagagtca

SEQ ID NO: 41202 - DNA, 1313 bp, Bovine  19866880550172
  misc_feature (1)..(1): n is a, c, g, or t
ntgtaagtaatatccatttaaaagcagtaaatgtctcttcccaaacagaatggactggcatgcagaggaggtgtcaacccactcaaacatcccttggctccccagagaatcattatggtctgttgtgttaacttacttccttcttgatttttcttctttttttctttttctcccctgctgaacattatcatttcaaatcaaattaagtactaatagtaagtgcatacagcaatcacttcagaaacgcaaaacattcagactcaagaggttgtatgaaaaatattattcctcataataaagattgagagcccagatggaattgtgagagagttccaagagggttctagcaactgaagctgctgtttgggtaactagtggagccaccaacaaataataaaatctaaatcatttaaagacagcaccctctcctatctgtgccccagctctcttttcaagtctcttctttccagctctaagatctccagttattaattacaatagaagtaatatatcaggatgggaaatcactattagctcagtcttttctttggtaaaatagcacaaaatggcaatacagtacatgggaaatttgagagtctgactcgatatggtgattgttatccaatgactatttaaccataaaaatgtcatggattgtttattttagactggagttttcaaagagactggatcctccaataagacttaacctattggtctttaaatattgtaaattaaagatggtccttgaaatatataactacatggagtaaacttctgctagaacatggatggtaattataggtatgtattagacatacattccaaaactatgcattcaatcttattagactggcgttctattctatatggaaaatgaattagttattctttttcaaaagacaaaccaggataagactattatttaagttcctggcaacaaagaagagcatggattataaccagaactttttagttgactttgacacctgcaggattccctgaactacacaaattagatggtaaagaaaaagaagtccttagaaatgcaatttgtgaacaaagaagacaagagaatgcccatgaaataattatccagtgagcatagcttctatcttcccaatttctatcctggggccatatgttggcagggtctagctgatcttggttgacactgaaagtggtgatattccaaatcagccaggtcttcctcaccaaagatgtctataaatcatgagttaattatcttggaggaaaagtgagcaattaaaaactaatttatttcactgagttggaaatgtttgagggtgtgt

SEQ ID NO: 41203 - DNA, 1794 bp, Bovine  19866880576150
  misc_feature (1)..(1): n is a, c, g, or t
natggtagagtcattaaaaaaatagctaaaaagtgagtggcttcatataataaggcttgctttaacattattaattcatccttccctgaaaggaagtgagtgttataaactgactcggagacgtgacatctaaatagacagcattgctgcgccagagtaaatattaaatcacattaccggatgatccttggggaatggccttgcaatgtcaagaccatgggaaaatgatgcgaaatcaagttcacagaaatttgactttgatgttcaaattaatgaatctctctccttgaatgtttgcggagttgtgttgtgattgaaaatgattacacaatgactataaaattctgtgaagaggatggaggttaaaatggaaaggattttgctgtacgaccacacttacataaccttttggtgagtgatattcaaacttactacacgctccacactgcatggggtgcagaggtgcagaaaaggcgggcggagggatgtgtgctccttgtcatttaggggctcccagtcaagtgagtgatggctataatggagtcacgaaaagggccctacggggaaaggccctcttcccatgaggggcacttgacacttgtctgaagaatgaggaggagtttgctgattatggtacatggagggttaaaaggtattctagctacacgtttagctgtgagaaaagataccatgttcaaacacagtatgtacttagtatgttagagctcaaggcaaacatgagctggtggccagagatattacggaagggtaggcaggggttggctcttcaaagtcttcattgaatttgttacaatattctttctgttgaatgtttttgggtttttggcttggaggcatgtgagatcttagctccctgcctagagatcgagcccgtaccctccgcactggaaagtgaagtcttaaccacgggactgccagggaagtccccaggggtcggctctcagagcatctttcacgacagacttcagatgaggtgcagctagaataagaattgtgttcaaggtcccacagagggtagatgggagtcaaagccagatctaggtgacttggaagccatgctctatctgacaccctactccttctagactgaggggacaggtgtaaggctgtaattcagagccctcaacaactcccagacctccactttgatttggatctcctggtgaaggagaggaatgcaagctctgaccaagatccctttctgctcagtcacacagttttctcagagcccacagtttgattccatttgaaccaagcaacactgcagccgatgcttgacctcgacccctcccagtaaggctcagtcatatccctgtcctgttctgtgggtacaagattcacatggatacctgccatcctccttgtaagggcatcttgctgaggatgtgaacatgcacctgcagctgtccccaggcccctgatcatgtagtcatagctgtcatgggttaacacaacttgacaggaaacgtggggtaagaagcccatcactgccaatgactcacagcccagcttccccaatgtcctcctagaaatgtaggagcctaaacggcactccttccaggagtctcttctcttgtttttcagattctccagcatacagagaagatcagataatcagataatcccccactcaatctcgttcacagaggcacaaagaacacactatctcttcctctcagccttcccagtgagtttccccaacccctgtgccacctttcagaatctgggccactgtttcagacaactttctgctgtctgctccatcacctagca

SEQ ID NO: 41204 - DNA, 865 bp, Bovine  19866880642063
  misc_feature (1)..(1): n is a, c, g, or t
nggaacttggtccattgaaggaatacaagggatgaggaaaatactgcaaaaaacattgactgtccaatgtaacctggccctggtgtccttggccccgggataggtcatactccatcaggaaggccacatggatgatggattaaccctgcagagatgccagcgtgaggagtcccaggctgctcggatcatccggaacacgactgccttattcagccagtttgtaaggtacgtgagctccttccttttctctacttgttggtttctattttgcagccatccgatcccacagaccacccccttttaatactatggattttcaggaaataattatgtaccagcgaagagttctaccagaaagagcttgggattgaaacttatttcccactaggcgagctcctaccagcttcactcttggcccaacaaatgcccaagactcttcagttggtgtcattagttggcattcaggttggcgccataaacagccaaggtcttcttatgaaaattaaatggaaagagatggagtgctgtaagtcccctttgtattagcgcatgaacaggagaggagagagaaaaaaaaatggatctacaacctctgtgctatttagaaaggttttctacatctttcaaaattgttgctatgggtttggacacgagaagatttgcatggaatgcttgggtcacccacctacgactgggacttaaatggggaaagtaacttaactacctacttggatcgtaatccttccagcctcaacagtgctgctaaaatagaattctggattgtattcaccaattaccacacacacacacacacacacacacaaaaacagattctgttgtaaacagtgcagtgttgcaagccatc

SEQ ID NO: 41205 - DNA, 619 bp, Bovine  19866880768001
  misc_feature (1)..(1): n is a, c, g, or t
ngggcggaaggggttgttgccacccttcttcagtggcctgtgaggatggactgggtggccctgccactgatcatacagaaccactgggcaaggaaagtgctgcgcagaggtcccacagcagggatggaggcagaggggtgggggtggggggcgctggtggtggcagccgtgacctccctctctcgcctgtaacaaaacccagtaccacccctccattgggggccggccctgcccaggcgcctctgtacctgttgttgtccacgtatcggatgagcatagggtagaaggcatagaggtctctgcagaggacagcaaactcgtccaggatgagcagctcagcctcctgcgtgtcgcccttgctgtcagctctcagctgctcctcctcctgcacagttttgatggccttcttcttcagcttctccagggtcgggatgaagtggcttctcagcaggtctggcctggctttgctgatgatcggttgggcgtacactgtgtttgcaaacaaagggcctccccctcattccacaagttatgacagtcgagaaaaggaaagaagggacactcaatggtgaggctatggaaagcccttgactcacactggcacccttccttcatcttc

SEQ ID NO: 41206 - DNA, 1410 bp, Bovine  19866880779283
  misc_feature (1)..(1): n is a, c, g, or t
ncagaaattagtatgttcatatatcaggatgcgtcccttgtggttcagaatccccttgtgggattcccttgtgataaagaatctgcctgcaaagcgggagacctgggttcgatccctgggttggcaagatcccctggagaagggaaaggctacccacttcagtattcttgcctggaaaattccatggactgtatagtccatgggatcgcaaaagaatcagacacgactgagtgactttcactcattcactcatcaggatactgatttctctccagttccaactcaacacttgaagcattgtaagggttaaaaatacacacacaggctttgaagtcaaatcagggactgaatattggctgtcaatcatgaacagtgaaattttggctgggtacttcactttgctgagtctcaatttcttcatgtggaaaaaacaggaattagagtatttgtctcacagggttgttatgaggattaaatgagataatggaaataaggtttttatcacagctacaggcatgtggagagtactgaataaacagaagtactgttattatggtgaccaatcctagatgatttcagtgtgatcttgctgtgattaatgcagggtaagaaacagaatcaatttaacgagcttcctgtgaccatgtatttgtttcaggggagggtgaaacatacatgtgttttcattatacacactacaatcaaatgttttatctattttaaagtaattttatcttgtctcttccattttgcatttgtttatatcacttagaaataaactcccctatagtcacatgaggagatcattttacaaaagaaattaatagccgaaaatggccacctgtgtgataggccacacagcagacacaagctatggaaatccaagatcttaaagactaatttttatatcccaaacaaaattctcctcaaaaccagaatgttttttaaaaatttatgtatagttgacttataatatgtttcaagtgtacaacatagtgattcaatttttatagattcagaatgcttttctaaacaagaaataaattaatcttacagcaatgagcttacttcctaattccagacaaaaaagtgataacagaaatcagcaaacagtattaaacactgttctttcagtggagtactctgacccattacattaaaatgagtatgaacgattttcagataaacccagatttacccaactctggttttcaaaggcccctaatctttttcattcccactttatgatttttggatgggtaagagtggtcaaaaaaggccccagagctagcagaggttgatagtgctgacatcagaattactgagctccctgataccatctctgtgtgggaactggtcagaggagcaactgataggggggttgaccaacattcgtgcctgatctactag

SEQ ID NO: 41207 - DNA, 1727 bp, Bovine  19866880783898
  misc_feature (1)..(1): n is a, c, g, or t
naaccctaggcaaaggactaaatacaagtgaggacttgaggtagccatgctctgagaagcagagccaggatgctccaggctagtggtgctagcccattcctcaagtatactgttgaatgccatgcccaagaaaccacatctgagcgcaggctaagtacaggacacccctgaaagtgttgactcagggccccatgtgcacttctttgggtgcttagtatcttcctctgtcccttcacatgtacccaaggcctctggttacaggactaggaaaagaaaatgtgttggaaactgagatccgcaggatagtgtttcctggaaattccaggaccagcgttcagaggctttttgctcactgagaaggaactttttcaaaggaaccagaggaaggacttttgccagcttcctagaagtttatctctagcggatctttcagttcatttctggtggatctttcaggttctcctcccactggttgaccagtacttcatcaatcatcgcctgtacttcctgtcctcccctctgaagccccttagcagcagcgggtatgcctcccataaggagaaagaaatggtggccaggtgagtctacagaagagaaggtcatggtgctgatgtgatttccatgaaaccccagattcctggaacttaaatggtgaatcttttggagaaatgagctgtggcctgacaatcggcagctcagaggtttctgttatcatcttttttctgaaaatgactttattcatacttacctgtgtattattttggcaaccaagagaagtgtactgtttgtgggtatcactaggattagggggtagatttatatactcagatcaacttccatcctgaaatatatttagaaaaaggtgaaggtaattctgaagcttggggaaagcaaacacacaacattgagaagaaacagattaacactgctttcaaccccattcttatcaggtttttaaagattaaattgcttttaaagaatcagattttacaagtcttggtatggatgacctgagatttgaaatctaggctggcatagttcaatttaaatttctaacaggaaacaaattttaatcaaaagtgtcagcttgccttctcgttccactagatgagacatggggatgtctcagcagaactgagaacaaagcggggtgcttcatgatcaggctatgaggtggatcccaccatgcctcaggttctctctgtatttgacttatgagtgacaaaagcatgggttagatttctaaagagcagagagttaaggactgcaatcagagtagtctattcaccctttccctagcatccactggtggtgaagagtgtactttatattttataaggacctagccattgacagtcttgggaggattgtctcagcagtgagcttaatttttcatatgcacaaataattgcccacctgtggaagtatcattgtgaaacaccacagtgctttaatttctaagaaccacccggatattatgatctccgttttgcagatgaggaaactgaggtttgagcaggttccttccagtgtctaaagtgaccccagataatgagagcaagaatgaaagcccacccctctttatccagaccgaggggcattttctctatactgaaattacttcatttactgatatttgttaaacagggagaagcccatgctgtcaaaatgagatgcacttacaaccagttactgacctaacatttcctagatatttccacgatgca

SEQ ID NO: 41208 - DNA, 2525 bp, Bovine  19866880785946
  misc_feature (1)..(1): n is a, c, g, or t
ngcttgggatataactccgccggggctcttttttcttttcttttttttttttttttttctggtcatcatttctggtaggtgatctggtagaattagaacccaaaacataagctatcccaacttcctcatgtaacctgagaaaaactgaggcccagagtcatatagcttcttagcatcagagccagggcctgaacttggccttcctgactcctgtccaatgtgctttccatgtctgcctagcaggaaaatgatggaacggttggtagatgttttggacttccctgatggctcagacagtaaagcgtctgcctacaatgtgggagacccggtttcaatccctgggtggggaagataccctggagaaggaaatagcaacccactccaatattcttgcctggaaaatcccatggatggaggagcctggtaggctacagcccacggggtcgcaaagagtcggacacgactgagagatttcactttcactttctttcactttgggggtcacagtgctgctccatgagtgagtgtagtctgcatgatccactcatgtcagttaagttcatgggagtatatttgggtcatttgagcttgctgagttaaaccacctcattaacatctggggggagagaaagagtccagtggaaaggatgcatgatgcccagggtgagcagagaaagtatttccatatcgtgtctcgagcatggtgccacctgcatgacttccttatagctccttgtgtcgcttctgtctcagcagcacagaggacgatgaagatgaagaagagatcgtgcacatgggcaatgcaatcatgtcattttattcggctcttatagacctgctgggccgctgtgctcctgagatgcacgtaagtgataagtgcccagagagcagctttgagggacttgaatcaggaacatggtagatgtcgtgaaggtcatttcttcttctgtccctggcatgtgtgaacgtgcctttctctctattccttctagccaaaatcaaaagtagtttctgcctctggtacctgattctacagctttctgaggaatgactcctgggaaaatctctgtgttgtatgatttctctgtgaccctagtagggcatatctgctacatattcttgtttcagaagcctccaaaaattacattttcttgcacctcagcctggtcacaatgtgaccaacttgatttcatggttgtctctgtcaggacactccacatggaaaatctttttttgatgaccatggtgttaggcatcaggaagatagtcacgattcatgtttggttatttcccagcggtaagctttgcagatatactggaaaagatgattctatttttatgagatgtcttctcaaacattcagtttcaaactgaatttgtgtattcaaagttgtgttttcaccttccctttttcatctctgctgagggtggagacacatactggccttatttctcataaagtctcacattattaagtgagagaggaaataattgctgcttgtaggaaaacagaaaagatagttctttctattttaaaagtacttggtaactgtgtaatagaactttgttcattcagggctcaggtgctctctccacagtgttcactgcatttggattatgccagtgtctcctaaaagtacttgcaatgcagactaggatgatataaatagtggtttctggtattgatgaggttatatatttggtcacagccaagataacagtgggtatgttgtatttagtgctaatgaaaagatagcattgatttaagtaatggctttcaaattcttttgaccaaaaaaattattttaaccatagtaagaaatttggggtgggctaacaagatcacttgggtttttctgtaacaatttgatccaaacaaacttgttgagaaaattaatatcatttacattgtaacctaatatacatatgtccagaaacaaaacttatccttgctatggatactgcattctaatagtttctactctattctaatatatttcatgctttttaatgctggtgacaatccactaactgattttataacccactagttggtcaagactacaatttgaaagatactgcattaaaacataaactcttatctttcttcctgtatgtcatgtattatctacttaacaatgtagcctgtttggaaatccatctacaagcgtttaggggaactcttccggtatggaagaatctagggtaaaagtactgtgtgcttttgtgaccccataaactgtagcccaccaggctcctctgtccataagattttctaggcaagaatactggagtgggttgccatttccttctccagaaaagtactgtagagaaaagaaaatctaaatcttcaaaggggaggctgatcagaattcttaacttgtaatagtttctagttcctactgtggaactagcaccttacccacatgggcaaatctttccatttctgtgctgttaaacaaataaaggaaaatgaaagggagctagggaaattctcaggcgtccttctgtcttagggtgggggg

SEQ ID NO: 41209 - DNA, 1568 bp, Bovine  19866880791427
  misc_feature (1)..(1): n is a, c, g, or t
ngagaaatggaattgccctgctccctgcctctgggctggcctcaggaaaggtgtcctgggtccccaggataagggtactgccttgacttgcaggcaggagtgtttctttagaagcccccagtgtagaggccccgattctgctttctagcaaaggggggcgatcttcaggccacagatcacgaggatcctgcagagtcccagggctctgtgccatgtcctttctaggcctcgaggccgggctattggccgtctgaggttctgccaggccacaatagtttctctcttctagggcaactgtgccatccgtgtctccacagggaactgcactgcttcccacgtcccggggtgccagggcttctctagggcccagggaaattctgcttctagagcccaatgcctggccgcccccccaaggctcagttacacattccccctcatggaggttctctacgatctcctcgatctgtaagggcaactccaagtcggcagcatccacctcactgctgagccacagtctctggctgagagaagccctggcctcgtccctattcccagctggtctaggtgaagggttctgatcataactctgaactgtggggagaccactgtcctctccccacgtggcctctgaagagcctttctgggacaataccgatggctccatgctctgaggagccactccaagaccctctacctcttgtcctgggggcagccccagggtctgcttttctaacccctgtccttgcagaggagccagccctgcaagtccaacatccaaactgggaacgagctctagctgggggccttcctgccagcgaaggggcagagtctcagaagtcctgtcagtgcccagggagcacccaggggacccagcatctccctggaggccatcctgcggtggggatatctggtttgtaacttccccaggccctcttttctctatactcgggggcccttgagtaccctgtggagctgcaagttctagctgcaggccccagccgctgggggttggcagggtgttcccatccctgcccatcaccctcaggccacgtagggccggctcctgcccaccagatacttctcttgcccgctctccgagagaagcagcctttccaaggcggagggagcccccagccccccgaggcccaggtgagggccgaagccgcccacccccatcttcatcctcatcagaaatagaaggacttgaatctgactgggctccactgcaacttggaggtgcctcggcatcctcctcctcttccaaggccaggagtcgcttctggaccagctggaaggagaacggacaaatgctgttctatacgtggttgtgagaaggggtagcaggccgggtggggggagatggtatttaggcaggacaggggatacaagcaagtggcctaagtgagggtatcaaagccaggtaccaccgctctttttctccaccttattgggtcttattcctgcaatgctttgagccctaaactccccttttccatggtccctcgtctgtcgttctacacccaaagctggatgctaaagctgtccctctccagaagccgcatcatcca

SEQ ID NO: 41210 - DNA, 960 bp, Bovine  19866880791775
  misc_feature (1)..(1): n is a, c, g, or t
ntgaaattatttgaaaataactgttgtttttttttaatgtgtcacacagggactaaatcattaagagtctcctgtgccatgtcagaggccctaaaggctttgtgaaccacggaggatcttaagcaggggagtgctgtgataagttttggatttagaaagattgactcgagtataaactgggatgggtttgagacatgcaagactggaggaagggagagcaggtaggaggcttttaaaataatccagaaatgatgaaggcctaagatgagaccctgaggatggagcaaagccacttttcccataatgcccatgttatcagattcccttggaggtaaagtgctgtttctgtggtaatacagtctgccatataccattattaaggaaggtaagcttggttttagagactgtctcttgtggttgtacccagaatggaaatactaggatttatgacaaagttgatactgccatacacaaaaagacccacaagagaataacatgggttattactgttaggggacagctccaggtgctgtcattatgagaggctgcccagaactgaattcaactggtctgatggataaaatgtgggaatttgtgctaatacatttctttattgctgttgctgccataaattctgtattttatccagttgtgtatttctattctgttgaacagtatttgctgtctgttgttgctatggagagcccatccctgctgcggtaggctattaagtgccttaaggattctttatatatccgctttagtggaaggtcttttctgtcatttttacttcaagtttttctgttaacaaaagagcttttggttctttgaatgttttaaaatttgtattgacttctgtctcacatgtgggtattgttctttgtgcttattataggggaactttgcccagagaaacatcagtccagagaaatcccactttcctcctacaatttaggagat

SEQ ID NO: 41211 - DNA, 1390 bp, Bovine  19866880797880
  misc_feature (1)..(1): n is a, c, g, or t
ncttttctccaatacccagaagtggtatccagcagctgcgggagaggacaatgtgtttctcttggcctctcattgcataacaggaaggagaagattgggggaagcattctgaggcacgcacagagcagagaaaatgccaagctcaactaaaggctgatggaacagagacactgggtacccaacagcagtgctgtcccccttaggggcaatgatcaccacaattattaacagggagaaccttctgtgtacggagtcctgcttgactgcagcattagcttcacgaggctcttggactcagggtctgaagtgaacacaaagctcagggcaccaaaggccaagaacaacagcctggtttccaaatgttttgaatttttcttccaacacctccttcctactctcaaactgagtccaaattcctaatggaaacacagtttttattttttgtcccctctgcggaattttcattttggtaaatatccctaaaatgtcatttccggattcgaaaatatttttttcggtagggttatatgggtatgtgttcataaaagttgcaattttaaaaacctttgtggaaataaataatagttataaatgttaatagtttaaagttttataaaacttttctccaatacgtacaaatcctccagtattccatccccttcaactgcctcatagtatctgatctaaactactaccaggagatgttcatatttgcaaggattagcaccacaggccccatttgcaagggagaatatagtactcaacacagatattttaaaacatgtacactggagagagatttagcactgctcctcgggaagtagctgcatgagttaaaaatgctcacttaataataagcactctcacagtggagtggtctgtgtctatttcactagtgccttccttacccggaagcattccaagtatgaaggacaaacaaacatcaacaagatcattgaactatggagatctgttggatgccattctctccaaacctcctcttgctgaagtcaccgatacctttcactcagctcgtgtgccagatttgataatcacagggaaatcattaggagactcagtctcttctaacttgaacccaacccatcactcagcatctgatgaaggtgcctaggaaataaccatgtcgaatactgctcctgtccacccatccaagttcatatgacagagccttaacttgagtttccttccttagctctgctaggtagctaacccaggtgactgaggtttcccatcaacaatgaggagagagaagattatcagggagggaaggggaaaggaaaagccatcatcaggactcatacctccagtacacaatggttgtatcagctcggtaccatgagaatcaacacactgatagaaaccaacagac

SEQ ID NO: 41212 - DNA, 846 bp, Bovine  19866880800310
  misc_feature (1)..(1): n is a, c, g, or t
nagttaataatactgtcttgataacatacctggcttgaggcattaccgtcccttctttttatttaaagacagtctgtacctttagaggtgggaatcttcacagagaatttattcagtgtaaagtggcaccatagctcggctgctcatttgtcattcacttgttcacagcaggcaaatggccccaggtgaattatgagtaggtattattcatacccgggctcctctgcagctcttagtgctttgctcttcagacctaatagctgctattttggtctcgattagcagtattttttcttcttccaccaactcctcaacttattaattagattacaaagacttgccttttttccccctgtgattagaagaacatctcttttccagttgttacttttacatggaattaaaatgatgcattgcatttatgttagaatttgtcaagaaccccaggcatgtgacacccaccatttttattcctcatgggtgttttaaaacctggggataaaacctaaatcatgctgatgaccttttatgtgagcttttgaaatgatgtgcatattcatagttcacagttgaaataattgtttacaaagaacattggatagtgattcaagagatctagttttgctctcattccaacatgctttaaaatgttacacaaaagaacctctcaaatctgatttgcctggccatcacaggagaagagtcttgtaaaggaaatgtttaaattgttttagaagttaagattttcagtttagttgacaactttatttctccttttcagtagttttcagtggtttcattggtttggaatagtgacctgaaacaactacatgaactgaaatattt

SEQ ID NO: 41213 - DNA, 1764 bp, Bovine  19866880803307
  misc_feature (1)..(1): n is a, c, g, or t
nttataagctgtttagcatatcttcacaagttcttactttcttatacttaaattttcacagaatgtggtggaagagatcagaatttagggtaaaacaaaaaagtgaaatctccattgtgatttatttctgtaggaattaagacaaatttgatgcctcttgaactctgagttcatttcagaagacttccagagggaactttagaaagtcaaacctcgggtcctagtggatgataggcatttttaaatattaagggaattggctccaggttacttgagtgaaaaagattagctaacctacttgaagtaaatgaggtttgaaaactcagagggcagaaatcacttaaagtaagtagcagggtatttggggattagcacagctcaagtttcccaagcattcagctagtatactcctatttttaaaaataaacccgttgacttaaatataagcagagaagctaaaagtatgatcctcattactttgtagtcacaccttataacctactatgacagcaaaagtgtgaagaatggttggaaaagcaccatgacactgtgagatgctgacacacagaatactgagacagtgggaaaagagattagaattatcaccaaagagtccacattaagtgatcatgaaaactctggataagcgtggcaactgccttttggctgattcaaatcttaagagttcaaaacaaatcctattatttatatattatttagcaattttagtttcttttcaaagatagccttatattttaataatttatacttgtaattataaaatattttaaaaaaccagaaacataactctttgaaaaagaaaataaatattacctataaaacccagagtcgacctctgtggtataatccaatatttataaatatcccttgtttggttttagagttctgcctctgtccctatcctttctcacccccttgtggccatgatttgaagaaaccaagaaccaggcagcaaaatgagagaaagcaaaaatcctgaaggataaactgatcacctctcacttttacatcattttccataataaagtaggtctgcttgaaattcacatgggtcaggatctttgagaaaacagatggaagatgtgaagtggtgattgtaaattatcactttgttaaactctcttggaagtatggacattgaagaaaactaaaaaggatgtgctactcatacttcctattggctgaatccaactagaagcactcagagggaaaaggaatcaagtttttgcaatccttccaggcacaaagtggagtgaagggtagaaagtggatctgactgggcaaacagagcaagtgagtacaaaatctttctaaaatatatcattataattatagtttattttctatgttatattatggaatggcttgtataatttggagttgaatatctatgcaattcctgtggtttacctgaaaaacatcagagataacagaatttcacaccatcagaaagcattacttaggcttttcttctccatctactgcctcttgtatgttcttcagtctcttaaggctgtccgactttctgcaatcctgtggacttcagcaggccatgcttccctatcctttcctatctcccagagtttgctcaaactcatttccactgaggcagtcatgtcattaaaccatctcatcttctgtcaccctctactcctgctctcaatctttcccagcatcagggtcttttccaatgagtaggctcttcgcatcagggcaagtattggagcttcagtattagtcctt

SEQ ID NO: 41214 - DNA, 831 bp, Bovine  19866880836270
  misc_feature (1)..(1): n is a, c, g, or t
nccagatctgtttgatcctgccatgatgcctttaaaaaaggaaaaaaagaacaagttaacttctttagttcctagacattgatatttgaactgctatcaaagactagaggaaaatctaggaatcccgagaatatagctttgtctcctaagaaaaaccccttccctggtctcatcacccataatacagacaacagcccatgtgcttacctgtgacagagggaaagaagatgcccaccagaagagtgaaagaggtggtgatgtccacaaggacatactcatggtttaagctgcctaagacttcggaagatttggctgagggcttctcaatgatctctccctttggtagataattactccaaagattctctgcagggggatcaaggggtatataagcagtagcagtacagaaaggacacaactggataattttctagccaacagtattctaaatcagatctgtcatttatatggtttttaagggtatgtttgcttctacagagcacagatatatgcacatacataaagtacacaaaaataaaaacctaatgccctttcccatctggttcagatgtagtttgacaaatactttggtatgtacaaatacagttgcgtttaccaatgcaaattagcaaaagttaagcagactaagctgaacgcccttacaaagtttttttttttttttaaattaggtatcaatgctaacaccttagtgtaaacttgcttacatgcaaagatatttgtggaccagacagttaagacagaaatcacttaaggaaagaatttcaaaaatttagagagtcaggaaaacacatgtgggtttgatgacattaa

SEQ ID NO: 41215 - DNA, 915 bp, Bovine  19866880867775
  misc_feature (1)..(1): n is a, c, g, or t
nattcctatttgaagctaatcttctacacgagcaatgtcttcttcttccctaaaatgttttaaaatactttgaaatattttcttgatattccgtttttaatattttactttgaattacttcaaacaaatggccagcacccatgtgcttaccacccagctttaacaagtatgaatttttgacatctttgcatcatattttatgttcccttcataaataggtctgtgaacaaaaactccagctggcaatacaactgctttctctaagataagcatattaggagctagttataattctacatctttatttaggtttttaagtatcagatggatacttaactagttattacagaactatcctcattacaacattttgaataactgtaaacatcaagacaaagattttttcttcatttattgtacccttcctatctcagacgaccagctgaacttctgaaatgaatgtcctagacaacagaatcataggcagtttcttttacctcccggctgtgtcagcttcctgtggtgcagtaatatcctgggtagaagtaaaataatcaatattacagggtccctgggaaggaaaccgactctcaacagtgatttcttatgtagaaaagagatgacctcaacttgtggtcacaaaggcatgaactaggtatggtaaggttaatactgtgtttttttaaaaatgcatgtttgactcaagttggtaccaaagaggtaggaagactgaaaatatacatctcctcacttgaacaaaaatcaagatactcccctttttagaaagaaaataaaacaaaaaccacaataaccacatttaaagagaatataaaggctagacttcttacagggagacaaggaagcctgccttcaggataacaattgggagcgagctccaatactctcacctcttaa

SEQ ID NO: 41216 - DNA, 1357 bp, Bovine  19866880907539
  misc_feature (1)..(1): n is a, c, g, or t
ntaagaaaaggtattatcttgttaacatgttggtacaaatataaatgaaacatagtaagaaaaagtattcccctgttttgctgagtttgagtttcttaaaagatagtagataatacttcatttttacattcagagctatataaggcagcagtctttagcttataaatatcattcagtggcccacactcccaatttctgttcttggcctttgcagtttaccttagtacctacctctctcagttactgggttatgattagtgttaggtgattttaagactcttggataaaagataagtacatattgttgaacccttactttgctatcgagtccttctcatgctgtttaatcagaacagtgttgatctccagaaagagccaaagaaagtgtttacaaagtattttggctgttgtattgacctagattaaaacaattgctgtctgtcatcactctcttgttgctgtgctgctaagcaatataactgaaggactacccaaggtctctatgcctttctatctcttgtaccttactcagtttttttaagatggtagagggttataatcaagtaattggcttgattataaagcaaattatagagataaagtaaatgatgttataatgagtgttcagagaaaagaagttaggaagcaagcattatgcaatggttttaaaaacatcctttggcaataatttcgaaggtaattggcatacattatttacatgaatcttgaggtacaagaatttagaaataaatatctgtacccactttgaatcattaatatcagcactgaattttaagggcccctggaggaattaaatcctaatgcccctaaacatacttggtatgtgtcttgtcctaaccttaaaaatggttgtgtggcttcaaagctgtatatttggactttgaaataattttctcaaacttagaccatttctatatgtgacaagttgttgatataattaatatcaatggaatctaatttgagtaatgattattagctgttaaatgctgataatagaaattatatttaaatgtttatttagttaaggagtttgataaaacagaattttagttaacattttggtagtcattcccagttatttttttcttcctatttaagaacaaaatggtaacgtccgttggcttttttgatttaaagaaaaaaaatagaatcacaaacagttgacttaactggagtgatctatttggatgcactacttatctttcaacacagacttttattttctaaattatttcagatgaaaatagtattgctggacattttggtaggtattgacttctgtgttattctttaacccttaattcttaattcttctagctatggaaatgtcatagaa

SEQ ID NO: 41217 - DNA, 1820 bp, Bovine  19866880940057
  misc_feature (1)..(1): n is a, c, g, or t
nctgtgattttttcacattctgcagctttctttttaccccaggaatcaaatcagacactttcagaagaggaagtggaggttgctccttctttttaaaagtatgagaggtatgaggtgaaacagtgggattcaaaatactgaaggggacaggctggagttagacagtgactggagcccgttggtccaggcctcttagcctagatacagtttcctctggtggggatgccacagggaggcatgggggtggggtgtgatggggtttgaggcttgcgacttctggatttgccaacggacctgactggagaaggggaaacggaaggcagggaagataagactgatcatgaagcttaccgggagagtcaagataacaagctcacaaagtgatctaagctgtttgagcaacagctgtaaggagcctgtgcttcttctaccagagagaggttattgacacttgctttatcatgcatgtactgagaatattggggagctcaccaaccatacggaggcgggaaggcaattctattcacttacacttccctcttgtagccctgtgaggggaggtcgagggctgggttctcagagatcttaatggcgccttgcatggccgccaacagaccgtttcctccttcaccccgcagggcggggccgaagcactcagggcgtctgatgagcagcttgaccacgacactagcattttcttccacactttcacctaagggaaagaggcatttttaccatctcgctggaggggacaacctcagaactgatttcatttttttggccatgccatgcgacttacaggaccttagcttcccgaccaagaattgaacctgtgttccctgcagtgaaagcgtggagtcctaattactggactgctgacaaagttgcccagaattgatttctaactgataaggctggaagaacagttttggtttagcttgtcacatactcttaagattagtagctaatactgatgcagaggaagctttgataaattaggtcagaatctatttatctgaagtagtacaattaaccagtattagaacagagtcttgcttctcagttcaggattttatgccattcacattatttcagtatatttaggtcctcagagggcaagaaatagactactgcatctaccatggattactgattaattcacaagtgacttagagaaagaggacctttatgtctttattaactcccttggggtgcttattaggtatttccttgcttccttgaggtgaggtaatagggtaactcaagctggtgtgtttcggttagcatctggagaggtgacgtgcctcagctgttctctctggggtatgtctctcttggggatgacaatgttagtcgctcagttctgtctgactctttgcgaccccatggcctgtagctttccaggttcctctgtatcatgggattttccaggcaagaatactggagtgggtcgccatttccttctccaggggatctccccaacccagggatccaacccgagtctcccgcattgcagacagattcttaactgtctgggccaccagggaaactctcggggatggacctcagggcatttctgaaatcatttatctgggtaagaatctacttggtaaagttgtcttagttattcttagaattgctctgtggggagctaaagactggatgactgtgtttgctggtatttctgtttggaagaaaccgtagataaccaagacagggtatcacttcccaaagaagtgattaagcagtgaaccgccacatgtggacagggatcgccaatgcttctcagagtcagttttaaaatccaaagtagttttaca

SEQ ID NO: 41218 - DNA, 1172 bp, Bovine  19866881076192
  misc_feature (1)..(1): n is a, c, g, or t
natcggtgtttgagtgcttgctgagcctcaacaccttgtggtgttggtagtttagttgctaagtcgtgtccaactcttgcaactccatggactgtgtagcctgccaggttcctctgtccatgggattctccaggcaagaaaactggagtggattgccattcctttctccaggggatattccctacccaggaatcgaacccacgtctgcattgcacgcagattcgttaccactgagtcaccaaggagcctgtaaccatttggtaatctcgaaatcacaagaggacagcttgtgagtctccataatgtgagaaaagagatggagaaccagaataatattataaataataatacagcaacttggaaagtggactttgcagacaacaagggtgttgggttagactggtcatcagctcattttaacaagggtttgggattcttcttgaaggaaacaggtgtttgtgggccattcggaatgagtagcacaagtcagcctttgcttttcttttgtttattatttcttttaacctgattctttttttcctttaagatgcaaaagagaaacaggtctctttagacagagtaggcagttgttcagtctgtcactgtgaaacacacatatgagtacacctccctgccctgctggttgtgagctcagcacaggggaagcctggccctgtccttcccaggagactgaccagcatctcaatccccttttcgtaggtttccctaagcaccaccgaggctgcactggcactgaacaggtacatatgttctgctgtgctcccactcctcacaagatgcgcccctctctttgccgggacagagcactacacttctttgattgactctacactgcagacaatatacaggctttccaaggggcgatccctcaccaaagctcagagggacaccatagaggagtgtttgctggccatttgcaagtaagtgcacactcccatgtgtttcacttctgtgtatgtatctgtgtcagctgcatttaactgtgtaaacctagacctggcgaatctagtctgaggatacgctcagactctaagattgtgctgggtcccctacttgcaacaggctctttctttgtttttaatgttctgttgaaaaatagttgatttacattgttgtgttaagtttcagctgtagagaaaagtgattcagtt

SEQ ID NO: 41219 - DNA, 1392 bp, Bovine  19866881101474
  misc_feature (1)..(1): n is a, c, g, or t
ntgcataggcttacatttatttgttagtctgatacacttgtgatcaggttgccttgtgtatatggcctctggctgcatcttctcttattccctgtcttgctgcttgtcccatggaaagctgagctttcactcactctccaaggccaatgtaaggttcacatgaatcaacatcacagctcagcaatatttttggagtggtcccaagtatgtaccactgaaggggaaaccagcccaggagaggggcagaccagcccaacgataagcctgtgtccccttacttcagtccacggggccagaattcccaggcagagttcttggctcatccaaaggcagcatgagagcccagcaagaagttaggtggcgttcagaaccatgattcagtgctaacccacctgctgcacctctcactctgaaataactgcctcatctcaggaaggctcaggatcagggaagttcacagatagctgtgtgcacacgtgctcattcattcctgagcctctcaacctgcacatgtctggaatcaagaagatgacaactaggaaaccgtggcagggaagggagtggcgaattcaaaacagcatgtcagattataacaacttatcactgccattgtcattgtcgtcttcttagtccccactaaggaccggaaaaggactcatccaaatacgtgctattattacagggcaacagcccccaccgtggctctgccatcttttcaaatgtttctctgtgagcagagatgcctctctgtgaaggatctgttgtgaggaggccatagcagtttaaatcacgcatgatctttcatcggggaatagttacgcaaacccccatctgcctcgccttgggaatggagaagtctaactaatttcatgacacttcattttattcaagggctggcattattaaaatgtgatttttactgctggctttgaatgttagtacaaattttccatttgtactcatttaatcctgaagtggcaaatatgttcactggtaaatattaaggcactgggagaagagctggcagactcacatgaggaaaccaggactgttgctggggatatgtgagtgggaggagctctttgtaaagatgaaatgcattttctcagattctcttttctctggcttcacgtaggatttaaagaacaaaagaaatccacgtttggtgccatattcattgctggatgagcgtaccaagaagtcaaacagggacagccttcgtgaagctgtccggacgtttgttggttatggctataacattgagccatcagaccaagagctaggtaatgagtgcaaattgttcattctggctccagtttgctaaacacatcttcttctggaggaatactgatgttcaataggtctaacttgcactgttagaaataccattgg

SEQ ID NO: 41220 - DNA, 3396 bp, Bovine  19866881139513
  misc_feature (1)..(1): n is a, c, g, or t
ntcatgtccaactctgtgcgaccccatagacggcagcccaccaggctcccccgtccctgggattctccaagcaagaacactggagtgggttgccatccttctccaatgcatgaaagtgagaagtgaaagtgaagtcgctcagtcgtgtccgactcttagagaccccatggactgcagcccaccaggctcctccgtccatgggattttccaggcaagagtactggagtggggtgccatagccttctccatctgttctattcatatctaattctctttccccttacctcttcctttcctactcaaagggtttcttctattaagttagacgagaattcactttatgattcttagtttggtacaggcatttaaaaatacaggtaggtgagaaaaaaaagtgtacaacttaactgcaacataaaagctgggaagaagagggaattcaaaaccaactatctgaaaacactattgtcattttatttctctgcttctcacggcttcatcctttactttttttaatctggaaattttttgaggcaattataaattcacatagttataagaaataatacagcaagatctcctatacagttggccccaatggtaacatttttcaaaactatatagttgaatatgccactcaggaattgacatttgacatagaatccaatcttattcagacttcccctgtcttatttgtgctcacttgtatgtattatgagtgtgtgtgtaagtttgtgtgttcacccaccacaatcaagatattgatcaatatgagcactaactcctgaaaaccacaagtctatccgtcattcgtcacttcagttcttaggccatagcctggtagcaaatggccttctatacaaccagctttgctccatttcctgtcatcactctccagcttcacactgctgtgcatcactccagggagtcaatcttaaacagatggtcatagaagtaattagtttttcaccttactgataaagaagactattcaaaaacaaaaagtgtggtgttcgggtacacatggcttcagtgggcctacccgctagtatgtatattcctggctataaaagaaggaagaatgaacatatattctagaaacataataaaactttgtataaacttaagtacctattcctctgaaatcagcctatccagtttagcggggcacagtttagcatttcattcccataaagccttttacccatttcaaccagaacttaagtcatcctacaccagtatgtggaaacccaaggcttccaatgaaagaaatatccctttttccttgcaaaccattagatactgtcctttacctggatttaaaatccaaacaatgaatgctagttattaaaatgctatttaaaaaggaatataaatgtccatgcaactttcatagcactaagtagtatgaactgggattcatacctgcagagctgagaagaacactgaaatctgtccccctctgtgattctccactttcattatcaacttctttttcagtatcttgatatcgatcccagttagagactatcttccttttagaataatttccctgttcttcattctcttctccataggtttctgcatcactgtcatcttcaatctgcaatcattagagacaaatcgataagctggcagtagaaattttgaccttagtcgccttagcaataaagtgtttaaaaacaaaacaaaaacacagtacataggtatcacgataaagagtacattatataagccaagctctctgaaaacgttaaatagtatttcaagagaaccccattatatcatacattgtgctttctgggcaaacttttcattttgctgtcaaaaggaaatctgatgagttcctacctaaaatttgtgtgactgaatctctaaagtctacctgaatgtatcctatttcaagagttatttctcactgaaataatcaaggctgttaagagtcacaggcaaaagacttaaaggcaaaagtcacttcttccaacttacagattttacaaacacaccccataagtatatataagctttaaatgggagccctgctcagatgcatttcagacgatagtttccagtcttgggcattaaaatattgagagagcatgcagaaaaatgcagaatgtgacaaattacaaaagatacaggtctaatttcttcaacaaataaattacaaggggaaaacggtgggagaagggggaaaaaaacctatagattaaaagagcttaatggacacataaccactgtactgtgggaacttatttgtactctgatccaaataatataactagtgggaattctctggcagaccagtggttaagaattgatgctttcactgccatggcctgagttcaatccctggtcagggaaccaagatttcacaggctgcatgacatgaccaaatatacatatcaaacaatttaactaggaaaaaaaaatcatttctaataccattgaagaaatgtgaacaataacaaggtattttcttatattaaggaaatattttatctgcttattgtttggtatgatacaattatttgttaaatatttttatcttttagaaataaatattgaactatttattgatgtaaagatatgatgtaggatttgcttcaaaatcataggtggagaggactggtgggtagagatgaaataaactgagcataattgatgattcctgaagctggatgataagtatttggaaattcattatataatctctatctactttagtatatgtttgaaattttccataataagaattaaactaaaaaatcatgcatatagaatctaaagatacaattcaaatgagtaggccaaagattataaaatctttatgaaatactataaaacttgtaaaacacattaaaataatccatttgtacaagatgagttagactttacacttttattgacatgggaacaggacatgtatattgcagaaaattaggagggagagacaagccaaaaaataaaaaccccaggtttccatcacctaggcacaccactatgaacactttgctatacattctttcagatcttttacaatgtttatatttatatatacttttggtaaccagactttttcatcaatattctccacctctgctcttcagtaaatttcattttctacagcatccagactatttccaaatttccctaactgatccccaaaatttcctttagagttggtttttccaagacagtattcaagaccgtgcattatatctcactgcttgtccattaagtctctttgaatctaccacaacctctatttttatgacatttatttactgaagaaggcaaaaggacccacgttctgtcaggttatttccttgtggcattagtatattaatttataggaaatagtggataaaaaacattttaatctaattctcaaaa

SEQ ID NO: 41221 - DNA, 1257 bp, Bovine  19866881147036
  misc_feature (1)..(1): n is a, c, g, or t
nagcttctccctctttggtcctctctacagtccagcctacagccagcatggttttcagggactctctggcaggccagcgataaatttccttctcctggaagaacattggagcagaagagctgtgtagggcaggctccagcactccggctggcctgtctcctggaaaagacgttggagcccacaacggagggggctaactggctcaagcttcctctcaccgggtcaaaataccctctgcagcatcccatctgaaacacgtcctcagcctttcggaggtttttaagtaaaagacgctacagtctccggcttttaaggggaatgtgccagacattacccacagtttgtggttaaagagaagcatcaagaggacaatgaactcctccccttcccctctccccacccgactccctccagcactgccacctcggcctcctccaggcagcgcttactgcgcaagcgtcacccgcctgggccccagcccctttctctcaagagtgatttctgttgtctggtaggtgttcaagatggcgcacgtcaaaatgcgtctgcacaaagctctcctctgagcttgggaaatagatttccttagatttgcaattctcttttgagtgatacacaattttatagccagtgaatatgcatataaagatatacatatcctcctttacctgtgatggtaaatctaaagcctacagagaactcttactgatggcaagataggaattcagagttaagctgaaccaaatctcataattaacaaagcaaaccaaactatgagacctgttcatatttccgtggggattctcttctctgttcctttcatccttcgtgattggaagtcctttccatctgaattcatgtctccccgccaaaaaaaatttaacaaaataatccccccaataattaacaaaagcctttcctatttcagttgccaagtgaaccacaaaatgtattttggtccagcttctgagtgctgaccagtgtttctttctccaatgggctctttgaagctggtcctggggccgtgggtcataggccagctcctgaggagcttctccagtcctgaaaagtctctaaggagctggaccgtgaatgtgccctcagctcctctgctgggatataatcccctgggaagggaaaccagcatggccactcagtggtccttaccttctcggttaatgtcttgaaaggccggatcaatggatgggtcttcacattttcatccagcgaaattccgtatttccatccattctgact

SEQ ID NO: 41222 - DNA, 2005 bp, Bovine  19866881153761
  misc_feature (1)..(1): n is a, c, g, or t
ntcacaggtgcacaaattacaatcggagggccaaatctggaccattgctgacttttgtaaataaagttttattggaacacagtcactcatttatttgcttattgcttatgagtgattttgcactataatagtgaggtagtagttgtggcagagactgtgtaacccataaagcctagaatagtgtttatccctttgccaaaaaaagttttctaatcttcactccacatttatgatatcgcaggctcttaaaatttagtaatcacagaataaatcaattagtatgcctaagtgaagtaactgattactcctcattaatgcatctgcttgactattattgtaaggttacatataattaccatcaacattttggaagtgaatacatatttcagagagaacatgagatcccaagtattaatactcattcctttagttggtaaaacaatgtttgactaaatcttacattactaattcttttttctgcctaatgaagatatttcattgaaatggaacaaaagcatggtaattaccaagattatatacccgtcttttcagtgtatccctttttaatgtagtttgctttaatcttgtgaaagcttgctaattattatataaaacttgtatctgtaaaatatatgttcttaactcacaaagcataagatttcttttaaattaatatttattaaatgtacacatgatactaattacaatacttgtaaagcagatataaatttaatattcattcattcacttgtttattcctaacaaaactttgagctttgtacaaggaattgtgaatgtctttaggatatggtcacaggaccccccccccccaaaaaaaaaaaaaaaagagggtggggaggaacatttgtgtatcaaaagtaaagcataaaacagtatttcatgaaatatctgtttagaagagacggtctctaagataacactgaagatttgattgtcaaatcagactcacaagaatcagatcatacctcccattagtctttactaacaatgttttaaggacacagatggtcctgaggctccacaaagcattatgaggaccaggactgccctgtccactccccaggtcctctctggctgcaaaaggatcccctggttggccttacagttaccacatccctaagcaatgcctgtgatgtgttaggacagcatttccattgggaagcatttccattttgtgctctgatggtgacaaaacttatatgacatattttccaaggtattatccttcataaatccaaagattccagatttgttaatgataagtaatccatgctagacagattaggtgggggaaaaaaaaaagtgaaagttagttgctcagctgtgtctgactctttgtgaccctacggactgcacctgccaggctcctctgtccatgggattttccaggcaagaatattggagtgggtagccatttccttctccaggggatcttcctgatccagagattgaacccaggtctcctgcattgcagcagattctttaccttctgagccaccaaggaagcccagatgaatcaggtacatcttgccaaaaggattccataggtaaagactctccagctaataaacataagttgatttttttttttttttttttttgatcaagagctctaacactagttgttcacaagaagacttgaccaggttaattgacctctttctcttctagagcatttccataccccagtctatctaaccccaaaaagggagaaaacgaatcggaggcttgctgctaaccacttcctcgtctctctccctagtcatgttgccctccctccttgccacccctgctcacatacaaacatttgtgctgtggaagatggaggcaggacagtaaagccatgtcaattatagcatgtgccctgagtttttcttttgttcttttttcttaacatttatggaaatttgtggatatgcttaaattttgagtatgattcttatacatatattttcagaataggaagtcaagtatccagatgaat

SEQ ID NO: 41223 - DNA, 1108 bp, Bovine  19866881154121
  misc_feature (1)..(1): n is a, c, g, or t
ncctccaagtgggaaaatccattctggaccacccccatggtgatcacagtgcagaaggtggccagagtctggcccctctaatactaggacagaaaagacacgtcatgcatttgacctgtacctttacttgcatggcctgtgtggaaagataagagaaaagaaacaaggagaagtcagtcagtgaaagcaggggtccaaagcataagcatgttagtcacagctcttccacccccattccttagccaacacgacagaaaaccaaccactctggaagccagttgaccatggcatgaagcgggggtgggaagttaggatggaggttaattggattgaaaggacttacacccagaccatgcagtacatcatctcagagaccagcattccagagtgtgtgacactctgcacacattccagagtgtgcagacccagatggtcttcagatctggccacccaagtgactttagatttcacaccttctctcctcccctctccatcctgtcacctgggtgggctgcaaacaatctgtcacataaccaaagaccctgattttctttctttcttccacccactacattatcaccaccagaagatctgtggttacaaaaagagtgaggagaactgagctaaggggctatgtatgtgcttcccctaaataaaggtttgctacaaaccatactctaggaatatccaaggtggttcaggatcatctcatgacccaaaagatggggcatctcccttcctgtgctgtgaccttcaaatataccttaggtcaaaggctcctcctacatgctataagttctaattttattcttttcctcacatattgctaagattagttaactcagtgcatttccctaatgcttgaatgctctctctctcgtgcatgctctctcaatatattttaatctatttttaaatgttagctgaaacttttcattttacaaacaaatctagaaattcctatacattaaaaatcacttcattttggcacacttaaccactaatagtttatgatcaaatagccaatttatgtgtgaaattaaggaaaaaccagagactcttaagggaaagggagttggaggagtggagggaggctgtaaaactaggg

SEQ ID NO: 41224 - DNA, 1718 bp, Bovine  19866881223287
  misc_feature (1)..(1): n is a, c, g, or t
nctctctgatgttaccttttagtgatttttctaagagaagaatacaatttggttgactgctcccttggaaagacagacttgtaatcaaatcagctccaggcgggggactagtgctggggagacagactcactgtggtgctgacggcctggtaatcagtacagagtatctcaaagcggtgaccattcgcaaaacaagtccagtcatgcagttgcttagagggttcttcacaaacgcatagtggagaggggttcaaaggcaaggtacaggcaaaaaggaaaggaaatggcaggacaaggagcatcagaagcaggataataactttgggaagggtacttgaaagagcaaacagcctcaagaggtccacaaacgtctgcagcctcaagagactggagctgcagaaagaccatgaaaactgaagtctgcttcctagagctggacacaaggccaaaccactttggcagtaacaaaattgagtctgaacagaaactggctatgcaatattaaatatgttctttggaacacctgttctgcaagatgtcgctagattgaaaataaagagagggaagaagaaaaaaaggtttccttggccacagaagtttggtaactgttggataaaacaaatatttctttactgtagtataccacttctcaaagtctttaaaatactaacattaactgtgactcttaaagaaagacagggaattctctggtggtccaatggttaggactctacactttcactgccaatggcccaggttcaactcctggtaggggaactaacatcctgcaagccttgaggagtgatagatagatagacagatagacagacagatagatagatacaggtgtgcaagcatgctcagtcacttcagtcatgtctgactctctgtgaccctgtggactgtagcccaccaggctcatctgtccatgggattctccaggcaataatcctggagtgggttgccatgccctcctccaggggatcttcctgtcccagggatcaaacccatgtctcccgtgtctcctgcattgcaggcagattctttacctactgagctacctgtgcagcccaaagttacctcaactctgaatccttcaaagaggagaacacaaatattctacagcgttattctcatctacaaagggtagcaggactagtcccagtcctgggaaatggagcgtggctccagttgcaggctgggtggacaggattgtggaaatggggcagggagaaagtgcagtgtggtagcgtcgcatgatctcagccaaggctggataaaagcaacagaacctgaacatctgtcagaggtatcagagaattaaacacaaaaacctgaaagatttagccatattttttcctttgcctgtcctttgccttttataaaaataaaaatatggcccttcatggaatagcatgttataaaatatatgttaaataagtcaaaatataaatttaaaaagtctgagagagtctaaatcaaactgtccatgaaaattgttatcacttttttgcatggtaggatttattaccttttttacttatttgtattttccattttgtacaataaatgtcttttttaaaaaaataattgtttaaaagtaactttactgggacttccctgatggtccagtggttaagaatctgtcttgcaacgtacggattgtaggttcgatcccgggtcagggcactgtgatcccacatgccacaaagcaacta

SEQ ID NO: 41225 - DNA, 1721 bp, Bovine  19866881228318
  misc_feature (1)..(1): n is a, c, g, or t
ntactgaagaaaaagttgttttggtttttgacactttctgttaccccaacagctttcaagatgctagaaagttcaagccagaagtttcttcagggtttggtgtatctcattgggaaccttatgggtttggcattggctgtttataagtgccagtcaatgggactgttgcctacacatgcatcagactggttagccttcattgaaccccctgaggtaaggcaaaaggaaagttaaatttggagcagctctaatgtacagtaaatagctgacccatttgatggtgggggatcacagttggtattagagctcatttcttaaataagatccattaggaatttgagagttgttattcttaaaagataaagtaaaatagagcttgtgattaaagtagtaagtactcaatttaggaagttatttcaacactcaccattaacctatttactttttcgtttctcagaggatggagttcagtggaggaggactgcttttgtgaacttaagaaagaagcacctggtacctatatatctggattctttatgcccagtggctccttctcagcttattaacccttaacattatctcctgctgaaaagaaccaaaagctcttttttccatggtgaaagacaatgtatgtatcactacaaacacacaaaaactataccacaactcttgactgaaaataaggtagaaaactttatttatgtttccagtatagagcaaaacaacaaataaaaccatgactatgtaaacaaaagaatgggttgttgttaaatcaagaaccacagcagcatctccttttaataaattaaatggttgagaacaatactaaaaaaaaagttgcacaagtttttcttaaatctattcttcttaatatttcacttctatttaacacaagctgggacataaaaattccgttggagatacttgtggaagatgtgaattcagatcgtacatgatgaaaagaaaaataaaccagaccaaaaaagcgcataaaatgcttacagtgtaataactactttaatatccacaaaaatggatttttaacacgtttgggggagtaaggattggcaggattgctggggcaacaggaatcggaggcaacggaagatataaagtggtgatcttccccgccgagaggaattgggaacctgtcaaacagatgctgcgattcaaacttcagttttaagatagctatgcaacacagagggccagcaattagaaaatgaatattgtcataacctgccctggtaaagtcacagctaagacttaaaagctggatctcattcaaaaagcaggaagatgtctttcctttttctttctgcttaaaacacatagccccctcccctaagatgcattctcttgtcaagttttcagtattgctttatttgcagtgattaagagacaagacgctttgcagacaacataagtgacttgtagacatgaaatgctctagacagagatgagtttaaatctggcccaagaaccgcttccccatgtaacagtgattgttttaggggcgcagtaggggctatattagcagccactaattccattatccctttaaaggattcttacagagctccagccacaaaaggctcttataaaaactaaccttattttctgcccacgttttttctatatggaaaagaatacatatacatgtatcactttggccagagggtgtaaatataaaggaattccgggcaagcgactttagagca

SEQ ID NO: 41226 - DNA, 1215 bp, Bovine  19866881245369
  misc_feature (1)..(1): n is a, c, g, or t
ntgttcctctgtgaaaggacccaaccctcctccaaaggtggctctggcgactaagtcccagcacgttattttctaggtcacacccattggttcaacagttgacccctgatcaagttctccagtcaaaagtgatcgcaggattcttgccttgaataccagagtagaagaaaccttctcaccattcccttgaacactgttgttcatggatgaggcccagaaatgcagctaccatgttggctgtggaggtgaggagagccaaggaattaattcaacaaagggactgcggccatcatctccagatacaccagtcataaaattcctttatcagctactccatctgaattgggtttttctgttctttttttactgaaagcaccggaaatgataaacatggaagtgaagttcttatgtatgaactataccttttaaattcacttcaggagctgaaagttacaccaacttctaagtaccagaacattaaactgagcactgctttactgagttcttatattcccttctcctaccctgtgagactggaactattattattctctttttacagagaagaaaactaaaacagaaaagtttcagaaattggcttaatatcataagcagtaagtgacagagctgggaatcaaaccttgcctgctggagtctaaacccatctatgttaccatcttagcgctgcttactctcaatagctttgtaaaattcagaaaaatagttatctttattaacgctttaaatttaaattatactgcttagaagcgctcttcataaactccaaaatggattcagaaataaatcctgaagattataaagctttagctctttttctaactgactctgagctgggaagattagtcactttcccaagaggctcagattcttcaccaataaaatgaagtgaacaatataaaattcatgttgaagaaaatgaatgagtgtgtcatctagggacaagagtgctgggtacttggttcctgctccgcctgtgtgaccttggtcaagatgctttacctctctgtggctctgttcacttgtatgaagtcaagtcacttgtggcttaatattctacaattctgtgtctatctgacccactgagttcttgaaagggttgtcctagtttattaaaatggtgaaatgaacacttatgtcttcactgggttaaactgataagcactaagaattttaccactgaattttaatgccaac

SEQ ID NO: 41227 - DNA, 742 bp, Bovine  19866881290071
  misc_feature (1)..(1): n is a, c, g, or t
ntcggcggcacctctctgaggtctgcccatgccaatgcccgcacccgagtgggacagggccagagtgcttaccagcaacttggtctgatagatttccagccctttaaagaaattggccatgaaggcttcaggcttctcaaccttctggccacaccgtcgcttcttccttttggtcacgtctgcccacagggcctcggcctgctcttcttctttggctgtgtcctctttctccccatcttccatgctgcaggaatgacaaagcccctcagcacagagggcagagggaggcctgaccctgacagggagactaaagagaaatctgggctgagaggggagggagacatattattccctgagcccgggaatctcaggtcttgatttcctgctttgatgagtcatggtcacaggtgtacatatacaatttagtagctttctgaaatttgccttatcgaatttttccccttcagaaatgttgtcctttattttctaagctttcatgagaattgccaatagtacctatttcaagtctgtgttaggaattaaatgaagtatcgcataaaagaacttagcaaaaggcctggtgtgtagcagttattcagtaattactatcaatagatagcaccatcatcaacattatatgaagttgctaagtgtgagagtttgatcgtttgcttggtcagatggtgaaatcctgatctactatttggactgtgaagtgaacacaattattagaatgtgttta

SEQ ID NO: 41228 - DNA, 776 bp, Bovine  19866881334242
  misc_feature (1)..(1): n is a, c, g, or t
ntgagaatatgaccctagccttgaaggaagttggaacttttaccgtgttatcccagctgctcaatatagttgattgaactagaatagtttattgtcctttctaaatcttggtcaacctccagcctgacagttttaggagacctaactcattcagccctgtgattcatctacatgtggtcttctcaccagcacaagccagaaagtccagtttgtagtactgtcagctgtttgaaggctggcccaaatcagatcagctctggagagggaggtatatgagccaaaggagtgagaggtgatttatttagccttggacccacaactaggcaccctaagaatcccactgcaaagagattgctgccctgacattggaaggcccatttgtgagatatgcatgggagaggatgctgtcattagaaagcctgctctgagtacagtgtcttcctgctcctaggtccctttggtcgtattcaaaagagaaaaagaaatcgccaggaagctggagtttgatggcctgtatatcactgaacagccttctgaagatgacatcaaggggcagtgggatcgcttggtaatcaacacgccgtaagttttgcccccaccccaaaaaggaaaaaggagtttctaccataaataaaagaataccttttcagcagccctggagactgattaatataagccttcctttgatttctgggacttgttttctcccctgccttttcacaaaggtagcgtcttgttcccccaacagttgtatgtatgctatgcatttaatggca

SEQ ID NO: 41229 - DNA, 1531 bp, Bovine  19866881415027
  misc_feature (1)..(1): n is a, c, g, or t
nctcactcaagttgatcctgacatcttggtcactgttcccttgagactttgggattttcttctcttcatactttagaatccagcttgaaactcatcttagcgtgaacaagaaaaaatctgccttttgtactcatccatccatccatccatcaaatgttactttgattcataggctctttgcccttgagatgttactgcatgactgatccccaaccgacatgagtaggcatcctcattctggttttatttccacagtatgttcctccagatctctgcgtctgcaactttgtgctggaacagtccctctctgtcagagccctgcaggaaatgcttgccaacacaggtgaaaatggcggtgaaggggtgagtacctgaattatgtcctgggaagggagggattgggacacaccatagcccaagagtacacacttcatttcattcctccagttttgaactagaaaaccttgattttccagtttccttgaatccatcctcatattcctcttattcagcagccctacttcctttgggttaaccagcttccaccagaaaatagactagaccaccttaatgctgcctgagcggggcataggtcattgaacccataatccaccaggatatatggagaggctgaaagagccttgggaaggggagagggagttatctgttaggctgattcttttttcttggaaaagtctcatcagagatttatgactatgccaatgaagcacagccaggttacagccatttggagaggatttcctatagaattcacagtcattgacatgtacccagatcttcatggtttcactaaagatgagcaaatacagagctgtattaagtttctattgccagtaaaattgtttccaagtctttaactaagggataatggcctcccaaaggtctcccaggcaagacattgactagagacttcagaataatttttgaccctttccctaatgactcacctagttatattcatttatcatttcaaatattctaactctatggactgaatatctcacaggcagacaccactctcctacgccccttatatactgtgttagaggactatcctttatcttctgggttattacatcagactcaccactctgattccttctgtgcttacctcatctactattttattttccctaagctgacataatgctcttcacaaaatatagacctaatcatcacactttaccatttaaaaattgtctttctgcccattaccatgaatgaaatcccatattccttaactgggcataaagaacttcaggatttgagtcctgctcaccttgcctgtcctgtttctcaccacatcttcccaaacacccaggtgatccaaccacatggaattattttcagttcctcaaacataacccattctctttgcctcagatcatatgtgtcagttcttccctccatttagaacagctttctcctcctctctctctccccttatatgatctttacttctctttcaaggaacaagtctaaatattaggtcaacggagaagcctataag

SEQ ID NO: 41230 - DNA, 832 bp, Bovine  19866881640000
  misc_feature (1)..(1): n is a, c, g, or t
ntcttcaccaaaagaatgctcagaagggaaaagcagaaaacttcccacacaaattctttgctcaaaatgatttagttttgtcccatagttccagcatgttccagcatgtctataatccagtctgttctgttgcaactgaattttggaaagttcacaaatattaaggcctaattattatttccttaaggtttactaaattagtaacattgcaagctaatgactcaattttgttctaatatcattgttcatattcttaatacccatagattgtgtcctgttatataacggttaatgtaggaacactcacagggactaattgtggttctaattctctattattgttgtttagtactttacaatgggaaagtgggaggcttcatatgatttctgtaattaattttaaaacagcattttaaagaatttgtttatgttgggaaggggggaagaaacttaatatctgttacttggagagccttttcttttccagttttaccattagctgctcataatcacagttattcagccaacactgagactctgctgcaaggcttccccccactagaatattccagttaaaggaagtgagacctagtggagagtattgctgtgagagctttgctaggtcataacgttcccacatatccctccacacacaaaggccctaacaagccaaattccaaaacaaaattggactctaaccactgctttccagcttggtcttcatcatcttgttccaacccaccctcatctctcactgggactagattaatgtcaggtgcctcctaattggccccagacctgtctacagaaacgggaaaagaagcctgtgttt

SEQ ID NO: 41231 - DNA, 955 bp, Bovine  19866881665465
  misc_feature (1)..(1): n is a, c, g, or t
naatggcagcctgggccaacgcactggcaggaaagtgagggcaaggcagacgataggtctgagaggttgaacacatgtgaacaggtacagagtgaaggggatgttgaagaaggctcccacgtttctggcttggaaagtgagtataagctgatgctgttcatggagatacaggaaacccaagaacaagagccatttagagaagtgcaatgctgggttctctttctgacctgttgagaggtacctgtagacatccaagcagagctcaaataggtgtggaagttatggatctggactgcagatactgatttggtattcatttacttatggaccagggcctagattacatacccctgggaatagtgtgccctgagaagggacacaagcttgaaaaactccacattaacaagtgggaagaagcagagactgagaaagagcagccagaagtccctgggggatgaggttatgaaaaacagactctgacttatctctgtacccacagtgcctgggacagagtctacaacctactgtcgtagacactcaaccaatgtttgttgaatgatttttgaaattcgtcaacttctatgattctaggaaacatgttttgctatagttttgctctgggttttgcgggcaaagggagcaaaccaaatcagttccctccatgccatggccagtaggtccatttatcacaagcattcagccttgacacctgtccttgcctgtgattgtgacacattgacctgaaaagcattgttctcgggtcttttgaagcatcctttctgtctgtagagggcctgaaacacaagcaagtaagtggaggggacagccactaaaacaggaagaaataaaggagcagggttcacaactcagggggcagagagcctgacagccttaaaagatcaattagatatttttgggggggaaattttccaagctctgtcacatttccattatt

SEQ ID NO: 41232 - DNA, 628 bp, Bovine  19866881790642
  misc_feature (1)..(1): n is a, c, g, or t
ntctagaggtcgtaagtttaaaatgaattagtagcattacagttctggggagaatccatttcttgcctttcccaactttgaaaggctgcctgtatttttaactagtggccccccagcagaggtgccagtccaccctctgcttctgtcatcacaggtccttctctgactctcaaccctcctgcctccctcttataaggacctttgtgattacattgagcccacccagataacccaggatagtcttcccatctcaagatccttaatgtaatcacatctacaaagcatctttgacatatcaggcaacatggtcacaggttctaagaattcagagctgaacatcttggcggtggggtggaggggccttattcggcctacctcagggaggaagaaagcagaggttgaaatacacttgttcttcctacttgaaattgatctaccacctgttatgcctccagagcatttacggcataccacaagctgacttttaatcacctagaatttaaaaataagtctacgtaattaagaggtacataattatttttcttttcccattgtaagtgtgagcgttataaattgctttctaagtttaagtacagtgcagttttgttcgctccttctccacaatgta

SEQ ID NO: 41233 - DNA, 1357 bp, Bovine  19866881913407
  misc_feature (1)..(1): n is a, c, g, or t
ncgggatgctttgaagagtatatttttcctcctgggaataattggtctgtgtgtgtctgttcactgctgcacagcagttggactttttaaaaatgatatttgtttatttatatgatgagcatacagaagtctttctgcagggattggtggttctgcagcaattcctttcagtaacaaagaaaacagaggtgtccaccttggtttaacaacagagggtttattattgaaacatccttagctatagccagtagcaactgagagtcagctttatgttgaaaaggaaactgaatgatgacaaggccccaggggggcagaggatgtcagtgcccctcagagcccaccctcgctaagctcatccttgggtcactttacctctggttaaatcctatctgatgttattctgggaaatattaccaagagatggatgcttggcgctgtagccaattaaatagctggactttgatgtaaaatccctgcatacaaatataatatatttttacattaatggaacctacagtgtatgaggtccccagccaccttcagcaggacagggaactaaaaaggatgtcacatctccctctgagtcctcagtcttcatcatcctataacaatgactgaacacaaaactagcaacatgtgcagtgagagaagctccatttttggagtcaggttaatatgttttcagtccaggctatacaggagcaagtgacttctaggacaaattgcttcccctttccgtacctgactttccacaccttcaaaatgcaacctccctcctaggatcaggtgagaattacataagtgttgacaagtgcctatgggtgtggaaatgaatattggttcctcttttcatctctggtctgctttctcctgtcacagatccttcagacatactcaaatgcctcaaaggaaggagattcccatgctatatgaccataccgtataactacaaatgaattttgacatgaatgaatataatgcttctaaaaatgaaagaccttggttaacacagttaccagctgcactcctgataagggctcaggttttctctaaaagttgacttaatcactgtcagacttttactacttaaaaaagggagatgcaatatatgtaaaaagaatgaatgttacggttgtataagatcatgcttgacttcagattctaaaatctctagaatgcaaatacacaatcagccttttaaacttgattgggggatgtgacctggagagatactgtttctgtaagaacctctctcacagataaactcactgtgaaggggtcttttaattccccgtattacttatgagggaaatcaacactgaatattcattgggaaggactgaggctgaagctgaag

SEQ ID NO: 41234 - DNA, 1909 bp, Bovine  19866880718880
  misc_feature (1)..(1): n is a, c, g, or t
ntgtgctccttaatgggtatattggtaccatctccagaaagctactacctcctccaggccagtggtggcctccggggggctccttgaccaccaggttccatagctggctggctttcaccccatagagtatacgatcaggtttgctttgttctaaattttgtttgtttcccaccacaaaaaggtaactgtttatagcacagtgattaaagatactacgacttctttacaaacagatgtaagaacaggaactttccactttaaaaaaactctataaatagttccactctccactattactattatcctctgaatttcctgtatcaaaggcaggtctttccccgcacactgcctttgactcttcaaacaaatttccatcatttcttcatcactcctggcccaggtgctcctgaaaagtctctaagtacaagccataagaggacagactttcagcctgtaattaaaaccagaactagagacacctctccatgaggcccgctcccccatccccaagatccctttcctatacagctgggccaccaccatcccacagcgcctcctactctggtgacccctgcagggctcccgagcctagaccctgttcctcgatgagaaggtacttgtccacaaaggagaaggcacggggcatccatgctgctcagcatcacatgatcagagggtcatgaagaaaccagtggagccttccacatcccacatcggcctctgcctgtgcgcgtccccctctgaatgttcagaggaaaccaaagacagccggtccatccctaagaggagattaggaagagatggaggtggagattgcctgcggttcagttgacaggacctgggtaaatagatagggcatttcagcccaaacattcatttggtctcactcagttaacaacagctctggtctttgcagtttatctagttattctgactgctgttgttgctgttcagttgctcagtcgtgtccgactctttgtgaccccatggactgcagcatgccaggcttccctgttcttcaccatctccctaagttggcacaaacccatgtccattgagtcgagtcaatgatgccatgcaaccattccattctctgtcaacccctcctccttctgcccacaatcagaatacctgaactgtattctgactatagcccagctcaaaatgccttttgcttttccatggacaattccagaaagctcgaagttacaggcagtgtggtttgaatgtgctcatcacacccggctgtctagctttgaaccaaacgggctcatcttggcttagtcaaaggagccataaacagagacagaaatgcagttgaaaattatatttagcattacatatgcttcagtcaaaagcagccttagaaaaagcagtgccaggagtcttgtttaatccccctaaatgtgattgaatctcaaattgttaaagctggaaggaactgctcatcttctagaggaaggaatggggcctgaacagatgacctgggcaggtgaaatgctcttgagctccctgtctgcagcagagccagaactaggacagaccagtctgaagctcagggccaccctcaccaggatcttgaggttcaggctcttcacaggctttatctcctttgatcatatgcacatgtattgtattgatgtctacacaacggtctcttatgtgaaaatggaagcttcctgaactgacttttgattcctcgatgaggaagtgcttgtccagagaagaggatgcatggagcatcacaggctcagcatcacaggaccagaggttcatgaagaaaccagtgcagtctcccaagtttgatgccattcagagaacgtggaaatgccaggactcccatctctgtgtacacagaagtgactgcttttttttttttttctccttggtgacacaggctctgggattt

SEQ ID NO: 41235 - DNA, 2417 bp, Bovine  19866880749860
  misc_feature (1)..(1): n is a, c, g, or t
nctgcccagccttggattcagtcactacttcaaggaacccttttaagggagaattgcacttagtaaacaagatctgggtgctaggtattttaaacagacacacaagcacacacacactgtgatgttaattctatgtgttaatgtgatggagtgcccaatcacttggtcacacattattctggacgtgtctgttagggtgttgggtgtttcgggtgagactgcccttcgaaatagtggcctgaggaaaggaggttgccctttccagtgtaggggcctcatccaatcagctgaagacctaaacagaacaaccctgactttcccacaaacaagggggaactcttcctgccggactgcctttgaaccaggacatccacgtttcttgcctctggactcaaacctaaacctcagctcttcccatatcttgagcctgtggcctccagatgggaaccacaccagcagcaatctggggtccagctgaccaagtgctggtcctcagacctgaagcctctgtgatcacttgagccaaattcaaataataaactgtaaagaggtacacatgagcacgcacacacacacacgcagacatcttattgctcctgtttcttggagaactctaatacacacacttatatctgcatctatttctatgttatccaaatacgttgaaaaacaggacttcataccaatatctcccatttcaacgccacaggattcattctagttttctctccctccatgtgtgttcccctttctctgaccttaagaaacctggtgcccatcaccttgacatattctcctcttggatgagactgtgtgatcagcaagcatcactgctgcccccttccccccatctccccgcatcggtggcttcctctccctgcccgggctcagacgtcacttgcagagctgtcatcactgccgtcctcactccagtcatccccctgcccactcaggcgctgcatctaactggacagtgaattatgtaggttccaccaccaccatgtggatgctgcctaccttgggtggcatgacctcctacacaatattttctacaatatagaaaatcccctagaaatagttttggcatatttagatgtaaaaaattctaattcatctgaaatagaacaatacctgtatgaatatggaatcacacaccctcctctttatactcctttcaaggcttcagaggtagttatcgctgttcagtcactcagtcatgtgcgggtctgcgatctcatggactgcagcatgccaggcttccctgtccttcattatctcccagactttactcaaactcatgttcattgagtcggtgatgccatccaaccatctcatcctctgttgctcccttctcatcttgtcctcaatctttcccagtatcagggtcttttcaaatgagtcagttcttcgcatcaggtggccaaagtattggagcttcagcttcagcatctgtcctttcaatgaatactcaggctttatttcctttagaattgacgtggtttgatttctttgcagtccaagggactctcaagattcttctccaacaccacagtttgtaaacatcaaattctttggtgctcaggcttctttatggtccaactctcacatctgtacatgactactggagaaaccatagctttgactatacagacttttgttgccaaagtgatgtctctgctttttaatattctgtctaggtttgtcatagcttatctttcaaggcacaagtgtcttttaattgcaaggctataatcaccatctgcagtgattttggagcacacaaaatattaagtctgtcactgtttccattttttcccccatctatttgccatgaagtgatgggactagatgtggctggtgatagcatcatccccatagcctcaaaacataccaagaggaccccatactatattttgaaaagtggtgttctaaacctcactcataaaagatgagtacttagatttaaaattcatgtcagctgtgctactatacttagcaaaatggtaggatagaagtttaattttaacaaatttctcaacacagcttaaatcttgctctgaaatacaaattatttaaaagcaagacctttatttatgtatgttgcttttcaaattctcagcttaaaatattcacaattttagtcctgaaggcatatatatatataatgataaataccctcatttctggtatagttcttgtgacacttttttttttttttaaagagaagaatgtttctatagagaaatactggcaaaatctttttaatcatcctgaatgtttgctctttcatgtagaaaacaatgaacactctcttttattgggcaccgaaatgctgacatatgaaatgtagttatctattgcttttcatgaggcaacatgaggtggctgatacatgcttctcaagattaaagaagaaa

SEQ ID NO: 41236 - DNA, 811 bp, Bovine  19866880792502
  misc_feature (1)..(1): n is a, c, g, or t
ncaccataatgcaggtggtgatcgtccaaaccctattcccaactcaaatccatcattttaactttcttccaaacagaacctcacacctgtatttatataagtgattcctaggtggtctttcagagtccagcccatgccaaatagcttaaatccactcacagctgctgaaaataaagtttttaaagcatcatcatggtggcgctagtgataaagaacccatcagcccatgcaggaggcgtaagagacctgggtttgatccctgggttgggaagatcccctgaaggaagaaatggcaacccactctctagtattcttgcctggggactctcatggacagaggaccctggggggctacagtccatagagtcacaaagagttggacacgactgcagtgacttagcacacacacaaacgtcattttaaaggatataagaaaactgaagtctagcttttttacttgtcagataatgcccagtgaggttaaatcagttgaacaaggtgacgtgcctagctcttatgtctcaggttgcattcaaagcttcctatcaagtaggctctgagcccatcttccctccatgtaaataaaccttttccttcttttcttcttcccttccttcttttctttccctctggaaggctttcctttcttacaggatcctgtcttagagagtgatgagcgcatttaaccctgaatttgactgtgacacgtgctaccacagggaaatacaggaccttgagagaacaagcaagcaaagggaaccctgaaggaagtagagtggaatcattggaaggaaatgccaggggacatctg

SEQ ID NO: 41237 - DNA, 1280 bp, Bovine  19866880814359
  misc_feature (1)..(1): n is a, c, g, or t
nactctttgtcctatagacagccgaagccctcataggttttaagtgaattcgatgatattgggccttgttcctgccatttgttctgccaaatcagaattaatattctgattgcagctaatatccatctcacccagtttccagtgattgttacctgttgctgggtttgtatccaaaagctaataagtggaaaggacttgcccctgctttgtcatctcctaatcttccccgctttactgcctggtcagtaccatgaccagccttttccctgaaacactggttagcattttccttcttattagaatattaacttttagtcatattaattcccaagtttcatgaattattttgttagtgctttttaactatgagttgttatttccaaagaagtaggtataatattaaatcaggagttaaatagtaagtttcatgcctgatactggatagagtataggttacagatctttttcaaattaaggtttttgaactataatttagagtatcttaattatgcacacagacgactgtaattccatgcttaatagttctattcctaccttcaaataatcaaggtggtccttctgagaaaaacaaaagattcatctttttagctttctaggcctcttatttcgtattctaataaaactcacttcatatatatttttctgttttctgcgtgtctccattgccacgttccagacatcttgttaggcactataaaacattaccgcctaagatgcccttattagagacctgttctcactgggatatttacaggtaagagtcctaacagtgagtctcagttataaactaatccctaatccccagcctactaaaaatagcaaatgtacagtccaataaaacactagcatttcctcttaaaattaattatacacagagaaacactaatgatttctaaaaataactttaagggagggaagggggaggataacctgggagactgggactgacaaataaaacactatatatacacagtactgtatttaaaaatagacaactaataaggacctactgtgtagcacagagagctctactcaatactgtcaatactcaatacctatatgggaaaagaatctaataaagagtaaatacacatatatatatactgattcacttttgctgtacagcagagacaactcaacagtgtagaaaaactaataaaaatcaattgaaagtaaaaataagatcattttaattataaaatttatgctagactacttctctaaatgaaatctacatactcaaatgtcagatttctagt

SEQ ID NO: 41238 - DNA, 1280 bp, Bovine  19866880818714
  misc_feature (1)..(1): n is a, c, g, or t
nacgttttattaaaaaaaaaaaaaaggatgataaaaaagaaaggaaaaaagaaaagaaacaaaaggttatttaataatgtatgttagttccacataggccagcttgtatgttgcatgtacttgtacagtttgcttgttaattactctactgaaataaccaagaaatctaagccatccatttttgttatagacattttgcaagttttagccagactccatctgtgagtctgaggtgaaatgtctgtagatggactttattttttaccctctggaaaatgtgatgtagtatggaccaaattccttctaataaatattttggtgtagattcctcctgtggggctgtaacacatgtagacactgtgtacacataggttttaatccatagacatactgcctgcaccaagtgaattatttattatttacacacgccagaatgacctgcccattgttcccagggcacagattgaccacgggtcaccatgctgagcaggaaggactgaagcattggtgtacttctgctagatactgttctgtcttagtggccaacgatcaactgattctaattgggtagtatctttctatttgaccacttgtcttaacacttccctgtgcttttaaatgaacttccaactcatgtatgtaaacatgtttaataaaatttacttttcatgtcagtctacagccatctgtgttctgtgttgtgccagacactcattgtgggttccactgggcaagaggggagctggattgcgggaagggaggtgggatttgtcatctgctgggggcacttgacttgtcactgcacggtgtgtgtcttcatctccagcccaaagggtactttgcatcacatacaattttttactctgtcagcctgtctaagtgagcacatgagtttacttctgaaaagtggcattactggaaacaataaatctcagtaagaatcaaatggaagattgtttttctgctgctctttaagtatgctgttgtccaactgcctaatcatttcaagcgtgtgatatgtcaaaatatcaattcctgcacctgttaccaaagcatctggttcctccttccattggttccttctggtcccctgactgattcatagaaacttgccttagggttgatcaacttaaaccaaacaatatgttatatcatctccaacagaatctttgagaataaatatatcttcaaagataatagctgagtctccaaaagtagtatgttaaataaaatttgttggctttattacttcaactttatgacattttcttttcttcccc

SEQ ID NO: 41239 - DNA, 2750 bp, Bovine  19866880819292
  misc_feature (1)..(1): n is a, c, g, or t
ntcaatggaatttaaaacttccctccaagtcatcatcattaatataaggatcagttcctaggaaccaaatgctttgaaaatttttagtttgctggagaatatttaacatgacaagaaatgtaggtcacatataattacccctgaaaaaacaggtcacacattcacaagaaactcattgcaaaaatttatctgcagttacaactttgagcataagcaaaattaactttagcttttccaatcattgtctttttctcataaaaaagtgctttaattttttttcttattcatgtggatattttaaaagactagggtaaaaatagccttcaaggtagaatcctgaaaaaaaaaaaaaatccttattaattaaaaaaaaaaaaaaacccgcaaacttattcagtgttattgtacaggtatagacttaaaattagttcagacctgtgctatttagacacccgaggagagaatttccagagcgtttatagatctagagcttgtgaacatgcttttttgttttattcttctattattagttaagcagaataataacttttaacctcattaaacaagagatgccgggatgaaattccttaaccattacagtccatataggcctgaaaaatgaaattcaccttccccagaacatggcataaggaagtatcccatgctccaaaggatagtctgagtttcctctcaaaattatttctgaaccggtggacttcactgtttgaaagaagcccctctcctatacatacagactcttcctttttaagaacacagagaggggttgattccaactgcacagatccaataagcatcaaacctggtgtctgcggtatcagtgactggtagctgcttgttatttaggttcagaattcagcttattctcttgagaagtgctgactggtgacatccagtagctgtggaaactgcagaaactatatacatactatcatttccccaacttattcatcttggaaatgttggcctgccagcagacaccacatttcactctgacaatgattattaacaatcattttggctttgtttttgcctcatattcaaacaaaagatatattgatgaaataaaaataactaccaataccagctatgtaatgcaatccctggtggcgttagtggtaaagaacccacctgccagtgcaggagacataagggatgcagatttgatccctgggttaagaagataccttggagaagggcatgacaacccacttcaatatccttgcctggagaatctcatgcacagagaaacctggtgggtcacagtctatagggttgcaaagacttagacatgactaaggtgacttagcacaacataccagctatattatgcaatccatttatgtgaatgaatgtggctttgtagtttgtaccctgaatcattttagcaaacctggctgaggtcttgcctctctctttcaaggcaacctaagggcatgggagagtgggtcagaggaagcacccactttttcacagcaaagtacaggatttggggttctgaaccattttggggttatggacttcattgtcaatctacagatccctcctcacactgatactttcaagcatagatcataaaataggtataatgatcaaggaaatcaattatgttgaaaaagttatccaggtattaaaagaacacatttaaaatgtagtaatacatatgatcattctaacttcttggacacataaaaggagaacactttttaaaaatatacaataaaatataatatgctgatgcttattttatgcctcaaagccacccttagaaggcgacattcacagactcaaaagttaacagatgaggaggccaggagccaggggaaaagtgatttacagagggaaaggcagaacctccccagtccaccagcaggtagacctttggttctgcagggaaaccaggggaagctgtttcctttggaaagcaatttgacctggaccccagagttaactcaccttttgtgaaatctaatatggccttttcaacagtgagaagcaatctgatgctcaacattaaaaaatgttttttccatgtgaaaaaaaaatgaaataagtgtgctatttggttctagatatcaaaatccatcatttggtatgagaagtatttttatctctactgaatttttggcttgtcttctgaattcatctcaatggaaaattcaagttgcattcagtgtttttctctcaacgcatctcagttttaaccttcaaatacttgttcattgagataagcgtttagctctgacaagcatatgatttgcattttatttgtatgaagagccaatactgattccacccaacaagaaacgtgtagagtgacaagagctgagacacaaaggatgaaatttccagtttaaatcttgcaggtgctaaaaaacaaaaccaaaatcacaatggaatggatgacaaaaatacaaatgctgctcaaggaaggagcaaagattttaagagacactgctaagtcttttacagatggagctctaaatattcttctgaaagcccccagaagatgtttctcacattgattttgccctctcagtgtttgcaaaacaataaatagtgtctaatgttacttgaaggaccagggaaaaacaaaatcatgtttagatcacaccctggtcatgagggttcttcctgctttgtccacggacccatctccaagagccagtacaatgctggagttcaacatggatttgttcaatgcatgttggtgagttttttaagaggaggaa

SEQ ID NO: 41240 - DNA, 875 bp, Bovine  19866880845605
  misc_feature (1)..(1): n is a, c, g, or t
nacaaaggagcctagtgtgctgctgtctgtggggtcgtacagagtcggacacgactgaagtgacttagcagcagcagcagcaatcacaagtagatacaactggacttaaaaaaaaaaatgtgaatttatcttcaaagcatctcgtaggcctaggttccaatcagatttccactccaaagctattatacttccagcaagttgctggctattgcaaatcactacaaataattatttaatcatgttataaaaacaatctgtataacaaaaccccaaccaagccccctgccctagatgctagagggaaacccatgcctagagggaaaatggcaaatggaaatgtacttgaattcatgcctggaaaccccctccctgcacgtccttgaactcccgcaatgagaactgttttaggttctctctggactctgtgcagaaattctggttgtgggagtaaaagcatgagcatccctgtgtgctaaattcacatagcgaaaattaaattccaagccttccctagaagaactttgcaacaacctgacccagcgttacccctggtatttgcttcagaaaatcgtttgaaatataactgttgtctttggtttcaagtttataatcagagcggtttgaaatctattggcactgaacataaaagccaaggatgaaaatgggaacatatgaacactgaatataggtagcgatgaatcacagtgtgtcagctttcaagtattacaattatccacctaaaaataccctaaggcaccctgtgcccttccctactgtttaccctgcttgctgcctgaaaaacctcgagagctgctacatgttggcttttaggtgataatggtagaactcttatatatatatatatatatatatat

SEQ ID NO: 41241 - DNA, 1656 bp, Bovine  19866880859434
  misc_feature (1)..(1): n is a, c, g, or t
nttgaaaaacagatttgcaacccctgcctctgtaaaacaggggagtgagttcatttgggaacctctacagagcctggagtaagtgtaatgggaatcttacctgacaccacaagagttggttttggtgtcagattgttctgtcagttcactgacttattaatcttctgatcaagtcaaaactgtcaggcaagtcctcaaaaggcaccagcttataattattgttcagtctgtcccttcagtaacaagtttataatataaaagaactgtaatgaatattctcattctttttgcacattccaccatgcacacactccatggtaccagaagttgggttatcttgccctcctagcttgcacaaaatttaatctgtatatctctgtggtcctgccccttgctcactagacaatagttgctaaagaaggttttgaattgataagtaaataagcttccctgtttgtttttaacatggtttatataaacaggtacccctcatggactaggaaaatatagtatgtattccatcacatcaaaaaatcatgatgaagtgtctcagggtacctgaatacttttaattattaagtctccttggtcttagttttattcacttcacctccttccctgtctggctcagttttacagaccagtttgctctcagctcttcgtgtgtgaaggagaggagctcaagtttactgcactctctgtttctgcaggtgattgtctggggggactacggcagaatggaccacaaatgcttcatgggggtggctcagatcttgttggaggaactcgatctttccagcatggtcatcggctggtacaagctgttcccaccatcatcactggtcgaccccacgctcacccctctgacccgccgggcttcccagtcatctctggaaagttccactgggcccccctgcatccggtcctaatgaactcacaccactaagactctaccttcaggataataatctgaaccagatatttcatgagcattgttggagacagacaatcaacctgtgttttgcctgtagtcgtttttcaataatatgtcccaatcgttgtttaaaacctggcttcacatgacagaacaaggcagtctatcaaatacaggaagaatcaacgtgctagagaatcactgatgcttctaacaaatgagagaaaggaaactgcaaattcacacacatgcgcgcacatgcacacaccaaactgaacaaactggaaactgtcactcttgtgaaaagctgtatttcatgtgttttttgcacaaaccacaaggagtgttatttccctggtgtttaagttttgtttgtgtgttgtttgttgatttcagttgatttcagatttgttttgatttaattcggttttcactgcatttgttgtttctactcgttttcagctgtgtcatgacagggctcgtgatgtttacagagacccttcctttctttttccaaaagcaccaaaaaaaaagggctgaagcagtctctgtagcatctctgcagagtgtgcaccatgagacaaagtgaggccaatgagggcctcactaacttttgcgttatgattcttcaagttctaatgagaaatccagaaaatgaaagtgatcttctgaaaacaaataatcacagaatcactgttttgaatggagctcatgtctgtttg

SEQ ID NO: 41242 - DNA, 816 bp, Bovine  19866880863892
  misc_feature (1)..(1): n is a, c, g, or t
ngaagtgccgctgtcatcaaaacagatctctgcagtgtacagattctcattgattaccgcattaccgatccaaagtgctctgtgctatgctacagagaaccctgctgtagcaagcactgaggccctggcaagtctgattaaccgtttcctgaaccaatgcacagaagatgctaccctcctgtaggcagagacctgaaacgctgtggtcccttaaagccagcactggagagaagtcccaggcagaggcttgaaaagcccctcctctcatccctcttctgacatttcagagagacattcatggactcagatgacaaacgcaagcagacccctgccagtcagtagaccccagaacactcactttagatgatctgatcccattctcaatctcgggctgtggtcctgccaagctctgtaaaccccatcacttcctctgcagtctccctacctgggactttactcagcccagggacgactggcaggaggagacgtcagccaggagctcatgagtgaccagtaacaggacacagagcttcctccagctgtgctggacggacgcccagcctgccgctcacagggctcatctccagggggcaaaaggacaacccaaattggtgtatctgagagctcgggagatgggggtgggctctcagcttcgatatttttaaagatgcaggcctctgatgactgtgggatcacacttaatggcccactagactttcccccctgagactgaatcaccctcctcttaccagatttcctacacttcttgacccccctcccccacgaccacgggatgacagaacagcaatgatcaca

SEQ ID NO: 41243 - DNA, 1475 bp, Bovine  19866880885502
  misc_feature (1)..(1): n is a, c, g, or t
nactacaatgttcagaaaagggctgcacaggggcatcttaaacaatgtaatttaaatattcaaactgtgaaacacttttcctttatctttgtcagtgcctcctacaagatggagagcaaagtagaacacaaactgctttttattttcatattcttttttgttatgattataggatattgaacatggttccctgtgctctgcattttggaatgaggggagaaggcctgagagggaggaaaaatgaataataatttcaaaacgtcaacatttctataatttttgctggggaaggtacaatgaaggctcagcttcaatcatttttttttttttctaaccaattccctaaaaagtgttggactgcacatgatctcttaaaaagtacttttgttctacaactgaagtgctgctgctgctgctgctgctgctgctgctgctaagtcgcttcagtcgtgtccgactctgtgcgaccccatagacggcagcccaccaggctccccatccctgggattctccaggcaagaacgctagtagaattaatttctgaaatggacatacttatattcacatttccttgaatgtttccgttataagagattaatatatatcgcccaaatatatgtcaggtattaatttttgaactgatatatatctattagcgtttatcctaacttattattacctatatcattttatctactaccactactactaagtcgcttcagtcgtgtccgactctgtgcgaccccatggactgcagcctaccaggcttctctgtccatgggattctccaggcaagaacactggagtgggttgccatttccttctccaatcattttatctagaacatgttaaagaggttagcataaaacttgttcttttagtgaattaattcattgatttttaaaatgatctgtttaactgatagagaatttaaaaatctgaaagccagttgtgaagaccctgaatatcttgtaacgcaaaggagccttatttagaaagcgactcgggtatacgggtttaatgcgcctttttaacatctcgctttttaattagacaaggaagaactatttccaaggatgctgcttctggggtctggtcctcgccttgagtttacacgcgattctccttctccacgtttctttgtgcatcccaggaagaagaccccagggctggctgagcagaatggcaaaggcgctccaaagggcgagcgcaaacgcgcgcccaggaccttcggcgcctcctgcagaggcgcccgcggaagaacgggagcggaaggaaaggcgggaaagccgaaggctggagaaaggccggtcccaggactactccgtcgtgccggagaaacgcgaggaaggcccggtggctgaagcggagaagcagcggaaagaggaggagtaccagacccggtaccgcagcgacccgaacctggcgcggtaccccgtccagccgccgcccgaggagcatcagatgcgcatgca

SEQ ID NO: 41244 - DNA, 695 bp, Bovine  19866880971435
  misc_feature (1)..(1): n is a, c, g, or t
ntggagattgattttagaaaggttttattcatcctattactctctgctttcctcttataccaacagccgcctcctcccgctacacacacatttgcaaattataatttctccatgtatacctgtggcggattcattttgatatttggcaaaactaatacaattatgtaaagtttaaaaataaaataaaatttaaacaaaaatttaaaaaaaataaaataaaagatgccagaggaatagagaaagaaacagtaagcactttgcttaatactcagctatttaacacaaagacaaaatctggtttcagtttccttggactagaaagtaattcattgaacaacgtcaataggctacgatgggttttaatgaaattatgaccaactacttgaacataaatggtaggtttaagatatatacattctaatcaaagtgaagaaaataattgaaagctattgtattttataggtcttttaattttgtcattagcctgagaaccacaaaatccacctgaattcttgttacagagtcagtaatcataacaagcacatatagaacagtcaacccggccagttctacggagtggctaaagttttatcaccagttctgcatgacactagcattatttatgtacttaacttttattttttaaaggatttaaaaattatctacacttcaaattcaaagtgtccaaagtaata

SEQ ID NO: 41245 - DNA, 1341 bp, Bovine  19866880975773
  misc_feature (1)..(1): n is a, c, g, or t
nacttggacacaactgagtgattgaactgaactaaactgtttcttgagagatcatggctgtcagttataagagtcacgtggcttgtatttgggcagtaagaagatcttattctgtccaaaatgtggtgcagaaaattctccaaaataaaggaatgaatgatgaggacatggaagttctcaaaagagctcaaaatgctcattttattttcttcatgtccctatgatataaacaagcagatgatttttaaaaataaaagttaaaactaaaggcacaacaggggagatttcattaaaatctgccagtgtgccaacaagagagcccaatagtaaatagaatgctatttttcgctcctcatggtccatcttgttgctacatatattttcacttataacttgtaaactttcctgcgaaaggcagtaggttaagaacacaacgagaaacatcttcattctcacggactttttaaaaagctgcctgaactccctactgagggaagctgctgctgcatctccaactggagaagaaatgatgttaacagcaaaaagatgctctaaaatatatagactatgaagggtgatataccacctctggcatcattacagtcaggcctggcactaatgctctcaatacctaggaagatagatttttaaaaaataggcagaaaatggcatcctaaagacaaaatgtattaaaatacctcagtgggactggtgagaacaaaggaccaaaagcatacggggtgggagtgcacagaaggagctagcagccacagaagcacagctttgcaggcagggaacctgcttggaggcctggagggggcaggggcagaaccagttttcactgagaaaagcaaaatgcttgtgtatccagaaacaagatcaccacggatgcccgtggaccccagtgtgaacaggtaacccagggcagatcagcggaatgcaacaaaaataggattgagcagggtaagagtggttagcagatgaagaagctgaaggtcaagaacacaggcaaaaatggaagtcacctagggtgctgtttacccttttatccctgaaagaaggtagctaaatccatgtcagaaatcccatcaaggaaaatgacccgtggagtaattgtcctcgctctcagcacagggaccgcaagcctcaggatgccggtctgtgcgcttccatcctcagggtcacaggtatgctttctagcccctaatgaggcatctgcttttatggtgtctccacagcagtcagcctgcggtgggcagagcatacgcgacttatcacgactcagtgacaagggcagagatgagggaggactcaaaaatagctgggacagtgctgacgggg

SEQ ID NO: 41246 - DNA, 1014 bp, Bovine  19866881005086
  misc_feature (1)..(1): n is a, c, g, or t
ntagcttcatgtagtttattggaattttacattggttttgataaatgactttttccttagagcaataccaacattttgtctgaaatatttcccagtgactattcagcacagaaaatacaatagtgaagtaaatcaattacttttggaaggaggcagagttcactttcatataattttacaaaagagatgaaataaacttttttgtattaatgaagagttccattacctgtccctaaaatgattaaaccttgacatgacttttcaatattagcttcattttagaattaaaggaaatagaaaaagaataacatgcttataagccaggtgatacatacaggtaacaagaattctttgcagaaagattcaaacttcttggttataaaaagcaagccagctaaaattcaaagggattgcaaaagccataaaataaaatagccatttaaaatatttaatgaagtgtaagcaaagctcttgtgctttaaatgcctgcccctttcattaatttcttctctaaaacctgagcaattaggctggaatgttaaagtcattacaaaacttaaatagcacttctgggaataaggtgttttgaaggaagtgttattgcataagaactgcaaatatgaaaatatctcatcacaagaaatcaagctgtgttttatatgtgggatgggtgaaaagaaggaaattttatcgtaattatgagcagccacaccctcacagtatgcaggagagaaactagttaatacaggctactgttctaggaatttcagtgtctctttctaatactatatcaaagcagataagggatcaaaatgagtaaatcatttaaacattgctttaaagatcttcgttttgtagttagtactgtactactctacttcagaaaacaagtaaaatcactggctcttctcagaagcttctaatgatgaaatgattttaaaatgtttagggattgaaagaagacggcatttgttgttgttcagaattatgggggaaatagcacatccacagtag

SEQ ID NO: 41247 - DNA, 1338 bp, Bovine  19866881046892
  misc_feature (1)..(1): n is a, c, g, or t
nttggttttataagcctcttcatcgagtcccatatccatacattaaaagaagatttgtctcaatgccacttgtaggatgaacaaatcacttaattttttattgcatatgctttcccacacaacccacaggagctcttttattttcatcttatgctagagaatgagatttcttgagtcttccgtgtgctcttttatttttgaacgattgccatgatctatttgcaagactggaaatctatttaaatagcgtagagctatcaacctgataactaacgaaaaatgcatttagttctgctttttaacataaatctctctgatctagatttccactcctaagaaggtcatggggccacttacttagggttggggagggttgaagaataaattatggctgcctataaattgagcgagtgaggcagcaaatgacgaggcagggagatgtggagtcacatagaccttgaagaggccacttggggatgatcttgctgccaaatcatcagtatttatgacatcttctttgaggttgtaaaatgttggccctgggtattatacggcggtaatattgcatgggtcacctatcttgcttctgaatttttgctcaaaatattccctatacctagatgtgtctctccctgctccttcagtaagttttatttatgtataaacttgatttcaaactctaaccttggcttttcaagaatcctgcctgagttgacgtaaaaagtccatcattttaccatgttaagcgcatgtcttcatttttaaacataattatttctattaaatttaaaaatatatatattttaaatgtccactacaagacaagcagcacagtagtagacaagcacacaaatatcgtaaccacatttgcagacattgtaggaatataaaattctctgctttgcttgagctgggtaggaccttctgaccccaaataaccttcccataaatcagggcaggaaatccagtcttccttggtcctctctcttgttctaaattaaacaatctaccctgggtgaggtgacaatggaatttgtcatcagcatttagaggtgataggtttactcagcacttcaaaaggaaggcttttcaggaggggaaggaggacgggccacaatggtagggcagtggtgaccatctgcatggagctcaccacacctcaaggcacacgagccaagccaggagatggctagtgaccctctctgcaaggctcctcttcagacacccggctcccaaagagaggagagaagtgtgttgcacactcagaagtgtccttctggaaggaaaagcaaagagctcaaaatagtgaattccgaccctgaagcgatattgctgtgt

SEQ ID NO: 41248 - DNA, 1674 bp, Bovine  19866881067831
  misc_feature (1)..(1): n is a, c, g, or t
nctttccctggttccttatttcttccacattgtgtttgctataaagcaaacagaaagaacactctgatctctacaatattggaatagaatttaaatatcctaccttcttattgctattgtttattgtaatttctattacattataatacatgtatttttctgtaatgatggttagctttaatgactttcttccctatgctaacacatttatttaaaattttgtagcattgttcccaaggctggtttccataatcttctccaaacaatgacttcttgtaatgaaagggagcctctttaatggtaaaaatggtgctcagaggtcttggcaaatattagcccttagaaatgaacacaagcttaactattcaatttaattgaacaaatatttattaagtattatatgtcaggtgctgaatcatattgcccaacataaaaaatctattattaaaataagtggaattttaatgcagagaagcatttgctgccttctttgaagccagtggcatgggaaagaatgattggatgtttcagtattattttgcaaacaaaagataagtattttttattacaaaacccttggtaaaaacaaatgtgaaaaacagacttcatgcaagcttcttgaatttcatgtactatcttttgttctgaaaacaattgactgcaatcagatatagtttgaactttttaaaggaagtgcactcaaacattttttttttagccataagccaccttcaaagccaaagctttgaaattataagttgtgtagtttgcattaaaatacatacttatttaaaatatggagatatgttatatcatttaaatgattaggaatataattttgttttgcaaaatatctgtaaacagatccttatggtaaaacattcctgagaaatagttcggcttggctcaaccagcaataggacaaatggatgagttttcatgaatgctccttgcagggtgggggagactggaagggcaggatgggtggttgaccaccaaatattttttatttttttttaattatattttattttaaaactttacaatattgtattagttttgccatatattgaaatgaatccgccacaggtatacctgtgttccccatcctgaaccctcctccctcctccctccccataccccagagagtcccaaacaggataagcccaaggcgaaacaccccaagacacatattaatcaaattaacaaagatcaaacacaaagaacaaatattaaaagcagcaagggaaaaacaacaaataccacacaagggaattcccataaggataacagctgatctttcaatagaaactcttcaagccaggagggaatggcaagacatacttaaagtgatgaaagaaaataacctacagcccagattattgtacccagcaaggatctcattcaaatatgaaggagaaatcaaaagcttctcagacaagcaaaagctgagagaattcagcaccaccaaaccagctctccaacaaatactaaagaatattctctacacaggtaacacaaaaacggtgtatacattcgaatccaaaacaataaagtaaatggcaatgggatcatacttatcagtaattaccttaaacgtaaatgggttgaatgccccaaccaaaagacaaagactggctgaatggatacaaaaacaaggacccctacatatgt

SEQ ID NO: 41249 - DNA, 1971 bp, Bovine  19866881206078
  misc_feature (1)..(1): n is a, c, g, or t
ngatggaagagaaagtagccctatgagatggaggggtcaaaaatacatatcttctgtataagaatgcttcccagaaattatacttcttcttcttctttttttttttttggtgaagacacagcctgagtgtgtgtgtgtgtgcatatacacaagtttttttctacattatatatatacacacgcatatgtgtgtatatatatgtgtgtgtgtgtgtgtgtgtgtgtgtatgcttagtcactcagtcatgtctgactctttgccaccccatggtctatagcctgccaagcccttctgtccactgagttctccaggcagaatactgaagtgggttaccattctcttctccgggagatcttcccaatccagggattgaactcgggtcaccatccgagctaccaaggaagacatataggtcttaaatgatcaaaaggttttggtttgtaatttttacctggagacattacattttccaatttatttttagcatatttgcaataagtgtgcagttcgagagaatccatctatgcaaatctatcccttcttcagtggatctttccaacccaggaatggaatcagggtctcctgcattgcagtcagatcctttaccaactgagttatgagggaagcccataatgtaggaagacacatcagaaataagggcctggaagttacgcacacctctgtgagcacaagactgagccctttgtgtctaaactgtagcattcatttttccaggttcctccagctctcgggctgcacatttgtcatcttaatttagttgtttacatgtttattttgggaaagcaacatttagaaaagtagaatctgcttcaagaaataagaagtgagaattccatcacaaagtaaatactgaaatcaagtggcatttatttttcacgcatcttttattgaattctgtatttttggatatcaccttttagagagcttgcaatgagcaggatataaaatacaaaccaactgtcaactgaaattcacgtgttaaattatggtaaaagtttgaaaattagaattgggtgtgagattgtttttttcctttcaacttcaagaagttgaagaactaattgttgagaaatggaataatgtttaagcaaaagcacaagctcaatagtctaaaatattgctactgaaatgcttcagtgtaatttttgattgtgtgatttattaataaatcagtgtgtgatttattcaacaaatgcatgttaaaaacctgatatgtataaaacatagtgttagaaataggacatgaaaagagacaattatagaaaggtgtaaggcatggtccttacctaagtttacaacagaaaacagtaattatctctgcaactccagtgttcctgataaaatatatgtgacatttttaaaaaacctcttctggaaaacccatgagtcattcacctgaaggctcctaatattgtaacatgaagcaggacttgtctagagaaaagtcctttaaatcctttatgaagagttcaccacaaaacaggatccccatcttgggaggaattcactgttcctgccctttattcaaacgaccctgacagatgagaaaataataagacactcttaggaaacctagggcggtggcgcattcacagccgccagcatgatataactggcgttccacattttctaaacgtgaattagtatgttgcaagtcacccgtgaggtggccagcaacatcatcaccttcaggtttatggatcatctgtgtccacaattcatgacgtgaaagttccccagaagcaaaagaagacatgtagactttgaaagaagggggagttttagaggtgacccctgattcctcctcaattccctttggggattaactctgtgggtggccaccaccaaaggtggaaattctgggccaagaattccataaatttaaacctgactccaactcggtttatttcaaaatttgtctcatttctctctgaactactcaccttaaa

SEQ ID NO: 41250 - DNA, 660 bp, Bovine  19866881214397
  misc_feature (1)..(1): n is a, c, g, or t
ntgtgtgtctggttccttttagatgtcctttcccaatagaaaggaaaatgattgctcaggttttctcagacaggaaaagcaagatacaagtaatttatttatgattctattttgttcagctcttgtatttatgatcctattcttatgtgtattttttaaaacttttctccagaaaaataaaaatatgtttctctttcccaatcggatttgagaagggagtcctttctgaatgttaccaagtaattcgtcatattacttaagacaagccaccaagttttctctgacattctaccctagaaaaacagatagtaataatttgttcctcttataggcaaaaagagacaaaaagacaaagttaataataatagtagctgataattattgatcactactgcaacttctctggtgactcactgggtaagattcacactttcaaggagagtgtgaggcatgggtgcaaaccctggttggggaaccaagaatcccaacgccggggatcatggctaaaaagtactgatcactatctatgggggtttccctggtggctcatatggtaaagaatctgcctgcaatgcaagagccccaggtttgatccctgggttaggaagatcccctggagatgggacagggtacccactccgaaacttttgcctggagaat

SEQ ID NO: 41251 - DNA, 751 bp, Bovine  19866881283188
  misc_feature (1)..(1): n is a, c, g, or t
nacaagtcagcaccacacatttttaaagagcaaaagtgactgcatgtccctcacttacatctgcacagatggaacaataattcatcaatttctgaatatgtcaccagcactccctaagcaatggctggtgggtgaccttcactggattgaattctaattaggctgagtgcttccctgaaattcctttgtgaacaattactttttgctcatgtagcatcttcccagcatgatgctaagccctttggaaggatgcagaggtctaaaactgttgagagtctagctatcacctaactgaagagacagtttacttcataaaacacatgacccctggaaaacccaggagggttactatgaagaatggaatgagtggagtttaaagtgagggtaagaagagacagagaagaaattgtccctgacaaggggttgctccacacctggtgtgcagtagccgctcatgaaatatttactgaaataaatgcacaagtaaaggcaaaacataccatcctgtgctggctggtatcctggcccagctagagatgcagtggtagaggtggatgtctactggggcatgacctacttgaggaggcccgggaagggagggaggcgttcttgtcttggtaggaaaatggaaatcaataaagatgcctgattctcagaagtggtcaccctaagagcagaacatgaagtggaacagaacagacagtgaagcggggtcaatttcaccctctcccacctgtcaggcacgtgtgtc

SEQ ID NO: 41252 - DNA, 2767 bp, Bovine  19866881285228
  misc_feature (1)..(1): n is a, c, g, or t
natgctaagtttgaaatgtgcattgggcatagttgactccagatttcaggtaacatgctttggctagagaggtgatttttggagtatttggccctggagatggtgtttaaagtggtaggactgggtgtaccgtttagaggatgtgcgtgataaaagaaggtaagaggtctcaaagatcttcatgtgatctaaagaagctctccaacagttgcaagctgggaagtcaaggaggatctagtagaggagaatgagaaggaatgaccagaatgtcagaggaaaagagtgtggtttaaggtgtgaatgatgaactgtgttggatactgagttattgcgtctggcagcatggaggtaaacaaagatattgacaagagaagattgcaaagagcagtggtgacaagtgagttgctagagagtggtcatggaaggacagaagtgcagagagaaggtaaagtcaactcagtttcaaagttttgctgcaaacgaaggaagaaagagcagagcagattttcaaaagaggatctaggtttaaatatcagttcaaaacatttttcaaagtttggataatatagatggtggggaatgatcatagaggaaacagcgatatgattttcagttattccagctgtttcatttgcatttctgaaagtaaatctgtgttttgatgcacatattatacttaaaattcattgtggaaaacttgcccaaagcacagtgctcttgtcttccttggtccagattcctcataatctttgtatctaaatattaaaataagcatgtacacatcccacttgctgaaggtagctgaattgccttcaaaataataactcagaacatttctaaatcatgagaattgtgttatacactgttagtttccttcccagaagtcatacctcttctttctttttaacagaatccccagttttgtgtagactggagatctgtttagctgttaggaaagaaaacctcattccttttagccagggcattttatgtgtgtggctgtggcagccaccttgtgatcatgaggaaaaaggaaataagccgaaaatggcagataagaaaattaagaagggccttggtttttgataacattttgagctcctgtaccacatcaatggggcttccctggaagctcagctggtaaagaatccatctgcaatgtgaccctggtttgatccctgggtcaggaagatcccctggagaagggataggctacctactctggtatttttgggctttcctagtggctcagatggtaaagaatccacctgcaatgcaagagacctgggttccatccctgggttgggaggatcccctggaggagagcatggtaacccactcgagtattattgcctggagaatccccatagacagaagagcctgatgagctacatacagtccatgaggtcacgcagagagatacgattgagccacataaagttgctaagcacagcacacacagcaccatatcagtaacactttacagctatatttattataggtaagaattaaatggttttattaattaaatcttgattactcaggtatggtgttaaacttgcagctgaaaacattcctgatataattttgattttaactgatgactaggaatcacaggtggaagcatcttagatttctcactgtgtgtgtgtatgtgtgtgtgtgctcagttgtgtccatctctttgtgaccccatgaaccaaaatgggaataactctgtcatctcttattcccactttggtgctttcatttaaaaaaccataaatctatttttaataataatagctaacacttaatagcacttactttgatccaaagactattctaaacaccttacttacagtattttatttaacccaataagatatgtattactatgttttgaatttttacatatgagaatctgagacacaaggagattaacaacctcgccaagataacacaaatgatgatcagcacagctgagattagaacttcaacgtctgcatctcagggtccagactcccagggctgagttaggaggagtgttcacctgctcctgtcctccttccccttcttcactcctgtgcctcactaccccctacagtcagatgtcccttcctagtttattccttccttttattaacatgtcttcatcatatcactctaattgtggggtcaagcacagcctttatctcccaagaggaaggagaccctcatgatatttttggctgctccacaacatgttatttggctctctttccatccagttattttgtgtgattattaggtctaatcgctcttgtctttctttggtgaaagtcccgtgtttcctggaactataccaattcgctttgcccacctgcactgctaacatagattgtgacaaacacttagaatgtagacacaacacacaaaaatagaatctctacaaacattcacagcaagcaatatcccatttcatgtacaattactaaatagggtatttcagtggacatctaaaaattctataaattatatgtttatttatatcaacagatttatacatacataaattatgtatgcatatgtacaaattgcatatctatacatattacacatactggacatattgtcatttaagttttacgaaaatcctaggacattgttgggcttctttaggtggcactagtggtaaagaacccatttgccaatgcaggagacagaggggacacaatttttggttcccatgtcaggaagattcccctggagaagggcatgggaacccacctccagtattcttgcctgg

SEQ ID NO: 41253 - DNA, 1442 bp, Bovine  19866881296381
  misc_feature (1)..(1): n is a, c, g, or t
ncttttttacttgactttgtttaaaaagtggggatcagatgaaaagatcagcaggcaaaacaagtgaaattactttgtcatacataaatatctgtgcatatgatggattattacagtaagccattttaatttttttttaattagagggaatcgatgatataggcaatacaaaacatggaataatcaagatgttaatttttgattttgtaatgtagtttgaatggatatagacctaatatactggaaagttatttccccttgatagtctgactaaagaagctacttgaatctcccttccctttcttgttctccttggtttctgtgttcttggctctctggcagtgtgggttatagatctttgtaaggagatgagagtggtgggattttatcagtttaatctttgcagtctcacttgttgcagcttttcccatatagacatgtgaatttgcatgtactgctcagaacactggtcctgatgtgatgcccacactgtcatgtgaggttgctggaggtagttcagttagttctttcatgtactctttgtgctgagctgtgccaagtttactgtaaatttgagtttgacacaaacttttaaagagcttaggtttcagagaccaaaaattagggtttgaatcctgactccatcacttccatgacaagtctctccacctctcaagcctgtgttcttacatgaaaatgacaataattatatttaaatttaatgtttcagagtaagttttaaataacaatgtttcagagtaagttctgaatagaactattactcattagtataatatgccaatcagttaataattactatgtttcagagtaagttctgaatagaactattactcattagtataatatgccaatcagttaataattactactactagtatagagatattctgtgattctaggtgtaccttcagtgaactgcttctcctcatttctttggaggccctggaaatagtaaaatatcttcatggcaaagtccttctcaaatagtctgtgcaacagccagagcaaacttttaaaatcacagaaataagttttctttgcttcaaacctatcagtggtttctttagggaaaaccctacagtaagatatgaccaaggactgctatcccctttagtgggctagttctgtgtaccctcaaagaggacactggtgaagaaagttggagaaatgaggtagatggataaaattactggaagtaaaaccccagactccagaaggggttctgactcagtttaccatccctacataagaaatgagattctcagagatgcagacctcttaacttctcattgtacatgaaagatctctcactacagtttattcactggcctaatgtgaagtcaaattaagacaacaacaaaacaacaaaaagcccacctaaatgtcccagcagagttgccaaaaatagtaaagcaaaaggg

SEQ ID NO: 41254 - DNA, 814 bp, Bovine  19866881318903
  misc_feature (1)..(1): n is a, c, g, or t
natgatattgacatatgcccccttaatttgcataattcttcagacagggatgcaccctaatttgaaggcagtgattttggtaaatgtcaatagacagatgccacactagtgactgagtttacaatttaaagattttttacgacttcattaaaactgggagaatattatggagagttcctttaaattaggtttcatttgctccctgtaattcagagaaaatgtagtctttgattgctgtatgaagtgtcagatatccttaacaacaataaatctggctctgtatatctatatacttagattaccccttgatatcagaccatcagggagagttttaaataatagtggataattgtggattacagttcatgttttgctttctgagtttgttggtttctaaaaggatcagaataattagacacactcactctacatggaaacttccacacaaaattcaatagaatattttttatgaaattgaaagggggaaggtaaattataccccttggcatatttaatagaactcagatgattcctgataggaatggggtcttgttatcaaatctttctaacaaaaattttgccttccaattaccttaatgctgtgatttccaacttatctaaatagaatttgcttctgtgggtggttctcatatttgattcacctaaaacttcatacttttaggatgaggcaggatagcaaatgaagggctaatataataaatattacatgtatatttagttgatctctttctaggcttaatattacaatttctgaacaaggaaactctacatgaaattaaaaatacatgaattg

SEQ ID NO: 41255 - DNA, 1363 bp, Bovine  19866881486846
  misc_feature (1)..(1): n is a, c, g, or t
ntattttccctctgacagatttctttctaaccgaggaccattgttacataagaaaattattagccactatagtatattcatatattgttaagtgaagtaaagaaatattgtcagtttaatgtaagatggcaccccactccagtactcctgcctggcaaatcccatggacagaggagcctggtaggctgcagtccatggggtcactaagagtcagacacgacagagcgacttcactttcacttttcactttcatgcattagagaaggaaatgacaacccactcttgtgttcttgcttggagaaccccagggacgggggagcctggagggctgccatctatggtgtcacacagagtcggacacgactgaagggacttagcagcagcaatgcagcttttataacgctatgattaccacaaaaaagatatgtgtttttattaaaattctcaaaaaatatgtagcaatccacaatggaaatacttacattaaaatgacactcagaccaaatgtccatgtttgaacctttcataaaatatctctaggaaagtggtgaaaggtgagctacaaaccacagttattttactttgctcattggcattttattaccatcaaaggactcctgtataaatttatgtggaattagataaagcttgactaaatctgtggcatcatttcaaggatctatacagtaatgcaagcatgaaagaacgcctcacacgccttcagaaccctgagccaactggcagttcatttgcttcaagactctttcactgcctctttcttttctgtgatggaggcagaaaatgtgctatttgttagataaaaataatactgatattgttctaaatttctagactattactgacagacatgcctacttatttacgttctctgatgttttagacattgaaatattttattttgaatgggataattgtttctttatgaatatctagcttcatttcctcaggcacatactacaaactgaaattctaaatatagaaatagatgatctataccccaacatatattacctgataacaggagaaaaattcctttcctcaatatgttcaaaggctggcttaaaaggcctctctgtagcggggtttctcatccttagctctgctggcattttgggaaaaggaacttttgtggggattgtcctgtgtgttgtcacaagtttatcagcatccttgacctccacccctggaacaccatggcaatgcctcccagcacctctctcaccagcactgcacctaccaacaatgtctttaggcattgtgagcaattctcatgagcaaagtcattctagtgtaaagaattcatagaggaatgcatgatgtaaaagtatattagttggccttg

SEQ ID NO: 41256 - DNA, 1284 bp, Bovine  19866881567792
  misc_feature (1)..(1): n is a, c, g, or t
ntaaaaaaaagactttgcaaattaacagttgttccaaagacatcctaacacttactgtagcatcacacacacatgctaagaaaatgccaagttttatttcggtcttctagcaaattaatgcaatgaagttttccagataaataataagaataatgtaatttttattaaaaatatacacacacattataagcagtgtcgcttttttctttcttttctttttattgaagtgtagttggtttacaatgctgtattaattcctgctgtatagcaaagtgactcaattatacatatattaatatatacattgtttatttttatattattttccattatggtatatcccagtatactgaacatagttccccgtgctgtacgtaggacttcgttgtttacccattctatatataaaagtttgcatctgctattcccaacctcccactccttccctcccccactttttttatttcttaatgcatttggggatgtgattaatacaagattttatgtataatgtacagcaatgtggctttaggagcacagccttggggtcaggctgatttgaatcctgatgcccccactaatgcccttgagaaagtatcttaatttctctagttctcaatttctccatccgtgaaatgaggatgaggacacagggttgagaaaattcagtatgatggtacttttatagcacttaacacggtgctcttttggggctgagttactggtgttatcatcatctttatatttttcttgccattgcttaatgcccttttatagggtcatttcttattccagtgacttttctgatagaatccgcagatttcagccagagaagcaatgacacagaccaattcaatcccatagggagacactttcttctgtttttctcaaaaattcaaattgtaattccaagaaaccactgatcctttttgctaataggcctcaaaccacaatttcatcaagtctttttttttccataaacaaagccaaacataatatctggttcatctgattacacacagaggagctgctatctgagtactgccctatcacagacgataatggcagtcattactaaccacccggaaaaacatcacctaaagaagacatgtggtctccatcaacataatgaaaaacgaaaaggacaaagcaaggctacccctcccacttcatgtgttcatgtctgaggaacagttcagtagcgttacagcaagtcaacaagtcgctccaaggcactcactgtgttttgcacatgatggatgtccaggataaatgtggtcttca

SEQ ID NO: 41257 - DNA, 835 bp, Bovine  19866881819828
  misc_feature (1)..(1): n is a, c, g, or t
ntcgtcacttatatggatttaattgtagcagtctaccagcctttcttaaataattgacacacgttgttaagattcagaggctgtgagtacatacattccgtccagtactaccgaaaatggatacctgaacagcaagtcacagcttcatacacagtttatgaaaagaagtgtgttcagttctgcccggttcaggaattcatcctgcaacactgtctgtggccgaaagcttcctttctcttttagccccttttttggtcatagtcattttatgcacatcatgttagataatttgattttacttcgaaaggcccacgtaggggttttatgtctcttttcatagtagcaggaagaagtaagggatttttgtcgggccctccggggtttcatcttgtgacttgtccctctctgtctccctccgcaggacgcaccggcaggcgagccccacccggtccccgcccatggacgccgccttcagcagccgcaggggcaggcagctcccgcaggtgcccgtgcgaagcggcagcatagaacaaggtatccacagagggagcctggccaaaagcctgggttcgagaaacccctctttatatatgccttctgttaacagaatcatattctggttgcatgtagtcggatgaatcctaagaactcaagttacctagatctttattcccagcacctggttataacaattggtgcctcggtgctgtttttgctgagtgagtgaatgaataaattttagatggtcggttaaaagaaaaaaacgagcccttagagatacttcttccaacggtaccaagaaaaaaaaataaaactttaaagacctcagtacaat

SEQ ID NO: 41258 - DNA, 1576 bp, Bovine  19866881273864
  misc_feature (1)..(1): n is a, c, g, or t
nccctgtgctgtcgggcgtgacacctctgtgcctgtgtgaggatgcccagtggatgggctccaccagagggcggtgcacaggcccaccctctgattagacccgggcactgaagctcaggaaagtaagagggcccgtgaggctgctagatcccactggagtcgaggctgggatgaaatcaggacctttcctactgcgtcatctggtggacaccgtgtctccaccacctctaaggactatttgcttctggtcattgagaccagcaaggagaccaagccagtcaatcctaagggaaatcaaccctgaatattcgttggaaggactgatgctgaagctccaatacttgggccacttgatgtgaatagccaactcattggaaaagaccctgatgccgggaaaaattgaaggcaggaggagaaggggcgacagaggataagatggttggatggcatcactgactcggcggacatgagtttgagcaagctccgggagatggtgaaggacagggaagcctgatgtgctgtggtccatggggtcgtgaagagtcggacacgactgagcgactgaacaacgacaaccaagatcagccaacagtatccagtgtttcaagttagctgcacacttggtcctgtcttgccacggaacaccactggccctcgaggtcctggtacctgcttccaggaagatctaaacagttacagaccttcttgaggaccggactgctgttgccccttctctggctctgtccacgaggatagtggccagtacggggccctcagccgcggtccttgggggggtcaccttacaagggagcaatgcaagatggggaaacataaagaggaaataccagctcctttgggctcctgtgatcgtttgaccgttcctctgacacatctgaggtctgtgtgaaggaggggaaggttgcgaacatgtgaagaatatgagtccagaacactatgctcggcctccgtcgggagcagaggtccccgccttggcggcccccgcgtgggggccggccgtgggcgcagctcccaggacagcagctcacctgcaggccccagcacagtaaggacaaatgtagacacgcaggaacaagccagtgggggaggctcagaactggaatgttgtctgtgcaaaagggcagcagggactccatgcacatggctggaaggttctgtgagccgctggcctggccccctgttcaagccggccagggtcggatggcgttccctttctacctccttctggtttttccaggaaaacgggttaaggagccccaaggaagcatttgggagacagaaactcccctctgagatgaagactcgaaaaaaacctttatagagacccacctcaagcacccagtaagatgtacttcaattaaagtaaccctggttgtcctactccacatcacacaaagcgagaacctcataaagaaccttctgcaacttctaacccacgttcagtgccccccacccccttcctgggacatctgtttgttaaagcggattgcattcagctgatgtattcaccagatgagtaggacgtgcccctcggcttaaaactgttgagtgtgtgctg

SEQ ID NO: 41259 - DNA, 1916 bp, Bovine  19866881536787
  misc_feature (1)..(1): n is a, c, g, or t
nacagcagcagaacacttggcctcaacagaggtggaagggagtcatgattagtttccaaaacttagaagaaaggcatgtcaagtgaacgcagggtggtggttgccaggggctgtgagaagcgggaggggagaagccgcttaatacagagcgggttttcctttagaaagatggaaatctttctgaactagagacgggggccgagtgcacaacactgaatcttccccatgccactaagctgctcacttgaaaatggttgcttttacattgtgtaaatttcacccaataaactgttttaaaagtcatttcacagttctctgccctctgacttgccaggctcatcaaccctgggtcagggtggtagaagcgtctggtgtgcgatgcagcaagcagagcttgaatctggcgccttccagactggggtccccttcccacctctgctctgaagtcgttggatgacccaggcgggtgtctaccaatgctgcttggtccaatgaggccacagaattattttttaatagttcataagtttttctggtttctaaagccatgtaacataaatatagtatgtataatacataataaagacacttaaaatcgtaatttcactatttaaagatggcattttatattttgatatatagccttctatgcctttcacatttatatgttaaggtgcttttggatctccatacttttttttaacaaatccctcctttttcgcctcttgtgggtgaagtcctgcagaagcttccagatgcccctttcccttgctcttaagatgtgcgcccccaggtgggtgtgaggaataggaaagatctctgcgttgcctgccattcagccttgctcttttaaatctctgcctttcccactccttcctttgtcttcacagttttgattgaaacaataccagtgttcaacctcctcagaggcatctgtttattttctctcctttgactttcagaaagcttagcgcatgactcatttgtatgtggtgtgtgtgcgtgcgtgtgtgactcatccgtatgtggtatgtgtgtgtgtgtgtgttaaacaaagcagagtaaaaaggaagtgaagcctggaataattatccgtacttgattctcccacaaatatttcagtaagaaataaatcttgtttcccttgacaggaatttgcatctttgctcacaaaagtgtgaatctgtccagaacaacttccaggacagctcgcagctccgggggggcggggggcatggagtgcagacctgccgggacccaggcctcctcccgcagtgcacgcagagtgggccagccctgccagcagatgctgcagagggacactctccagtcccatctctcgattcccctcttccagcccctccctgtggcttgccgctgcctcctggcccactttgacctgagtaaggccattcatgggccacagtaaccaaaaggccagctgatgggcacggtcccacccagtgagagactaaggtccacttctctctggggctggatatcagaatgcctgaaacaaaggggtggtgaacggtggagcctaggcttcgggggagaggtcctgcgctggccaccgggagcagcgctggggtgcgggctgcttgttctccgcacctgatgagggaggggctgccaggtagaggcggtaggaaaccctcgccaagaataaagccctcttcaaagagacctagaagctccacctgccaagctcacgtggactgtcccgtatctgccctggcggtcttcatctgccgttccccatcactttttgagttttactgaataggctcaacgagcaagtaagcatcctcattgtcttctgagcacccccccaaaccccagtgttgcttttccttctgcttggaataaaagccccactctctggtgttggagaaggctcttgagagttccctgga

SEQ ID NO: 41260 - DNA, 729 bp, Bovine  19866880724688
  misc_feature (1)..(1): n is a, c, g, or t
ntgcatgcatttttacttactcaattctcacgttgtcccgagctagccaacaaacctttcttgtactacgaatacaacttttacatgacatgtattcctcttcttggtctacatattctccctgggcagtctctctcatctactctcatggtttcaactaccatctttatgttagtgattctcagatctttattttcagtccagatctctcttctaagaatccagatccatatacttagctgtcttctggccatcttaactcatgtgtcccttaagtacctcaagtacttcatgtgttcaaagctgagcactactcaaggaattttcagttactaggggaaacctcactttaaattttttttttattgaattatagttgatttacaatgttccaggttacagcaaagtgatttggctatacatattattatatttctgattattttccattataagttattacaagatattgaatatggttccctgtgctatacataggaccttgtcatttattttatgtatagtagtatctatctgttaacctcaaattcctaatttatccctctcccctttcctctttggtaaccataagattgtttcctgtgtctgtgggtctatttctgttttgtaaataagttcatttgtatcattgttaaaaattctacatataagtgatgccatggatatttgtctttctctgtcagacagtccaaccatgttactgcaaat

SEQ ID NO: 41261 - DNA, 2734 bp, Bovine  19866880745137
  misc_feature (1)..(1): n is a, c, g, or t
natgcctctgctttgtaacacactgtctaggtttgtcatagcttttcttccaggaacaagcatcttttaatttcatggctgcagtcaccatctgcagtgattttggagcccaaggaaataaaatctcccacggtttccacttttcccccttccatttgccatgaagtgatgggactgggtgccatgatctttgtttttttgaatgttgagtttcaagccagcgtttttgctctcctctttcactttcatcaagaggctctttagctcctcttcactttctgccgtaaggctggtgtcatctgcacatctgaggtgattgatatttctcccagcaatcatgattccagcttgtgctttacccagcctggtgtttcacatgatgtactctgcatagaagttaaataagcaggttgacgatatacagccttgatgttctcctttcccagttttgaaccagtccgttgttccatgtccagttctaactattgcttcttgacccacatacaggtttctcaggagacaggtaatgtggtctggtattcccatctctaagaattttccacagtttgttgtgatccacacagtcaaaggcttcagcatagtcaatgaagcagaagtagatatttttctggaattcccttgctttctctgtgattcaacgaatgttggcaatttgatctctggttcctctgccttttctaaacacccactgtataatgctttttattcctatcataccagtagtaatgttccatctttcattcctgattatagtaatatgagtcttctcagattttccttggtctacttatctaaaggtttgtcgattttattgatcttttcaaagaactagtgtctttggtttttccgctcccctcacttctctgagctctaaatctctaaacatgaagctaggtaagaaatggtgacagcctgcttcccctggggagaaatcttagcccgtggtcctgaactgcagcccagaggatttgagcttccaacatgccaaagtgggagttggataagggagctgttcttactgagatttagtagatttttttttaaaataaaggtttccctatttgctgaatactctctgaactttcagagacttgaaatggttgtgtccttcagaaacattcacctttatggttgtttcactgggaagaaggaacagagctcttcatgttgccattttatacatttctgctccagcctggcattctttttgatacccaaatgaatctcttccattttaaatgagcccccgttcttgtgctgggtcctccctgaacttgtccagctctctgtattctctttacctcagtgtgttgtggagtcatgagccagcagagttcctggtttgttcctgtcagtgtgaatttggtgacaatttggttctctttacttgggtctttactaagctctttcccttccattcttcttgctgctgcccatgtagcttctaaagtggaatcttccatgcttcaggaggcaggcccctgggcatgataagccagttggggagggagtgatgtaaggtccaacttcttgccaactaaggacatataaaagcagttcagttaacatctatgtagtcgccactgtctcagaaagcatagatatttcttctcaggaaagtaggaaaattcaaaatattacattaaaacattttgaaaacattttactaatgaaacacttcacattgtcctgtggttcatggatggtcacacagcaagcactggaccatgtgaggtcattctggaagtacttagctaaagaacacacctagctgaaccctcaacccccaccctccccccatcttgccgcaataactgcaccacaactctcctaacaccccctcccctgtgctctctggcacattcttataattggacatttattgatgatgagttggactgcctttcaagacagtgaccatgttaaaagcaaggatcccatcttcctcatctctgtgtgcccagccaggaacaggtgctgggactggcagaaagtagagtctccacaaatgtttgctgaatgagtggatggataagtgaaggataagtcaatgaattgttgcccgttgtcagaatcataaaatcaacttcttagttggtatcggggccatcctgatctggccgctgcaccatgtcctactgatcttatcactgtaaactctccttctcaacgtggactccattccagcccaaccagtctgttctctcatcttcagaaatgtcccacatgatttcatcttgcccacagctccgcttcttggatggtcttcctcctctacttatgaccactcttgagcctgccaagaccttttcacagaaatggatgtctcctcagaacagaccaggcctatttctataggtttggtatgtttggggtcgtgttcctgttttgccagagaattaacctggtgtgtcttgcactggaacttgttggctcttgagtggggcttggttgcagtgtaggtatggagacttttgggtgagctcttgtttattaatgttccctggagtcaggagttctctgatgttctaaagttctggagtagggcctcctgcctctgggttttggtcctcctcttacagtagcctccagacttctctatccatacagcacagaagataaaacccctaggttaatggtgaaacaactctccacagccaggaatacccagagagattcacagagttatatagagaagaaaagagggaggagg

SEQ ID NO: 41262 - DNA, 1014 bp, Bovine  19866880886358
  misc_feature (1)..(1): n is a, c, g, or t
nagttggaacaggagctcagcctgactgatggcagagcccgtgctctttctctgtggtgctccacctctgggtggaggttggtttgtggattccagcacccagagaacattcttcctctaccagtgtttatagctgctggccatttggccttggcatagagctgaaatgtggatgatcaaaggtaggaggctggctaggtgatctctggcctttcctgggtctcagatctgggcctgaaaggtcagagcttgaagcatgttttggccttgtaaattgttcataagctctgacggtgagctccagatttgtcactccctaatctggccatggctatagctagctgtcatcaagctctggggagcaatgctgtaaatcattttcccctttgtgcaaggagaaaaaatagaaaattacattcttctcagcacttttgaatgtgctggtgcctctgtcaatagctccttcttgcgagcagaaaagcagcatgatccccaggaagaatgtgttcttatgggcatcagcccagtcatccacacacagagggagagcactgttcactcatcagagtgctttgccctgtcaggtcatggtgtgtacctcttaacagcaacctggggtacaggtcagatccccccttttgcatattggcgacctagacttaggaaggttgaaaattcactcaagctatcaggaggcagagctgcacctcaaatctgagctgaagttcagagttctgtactcttggccctgagtgtgattcaggactggggaactgcctaccgaagtgaggataaaatctgcctaagtaataaaatagcaaaataataatagtgacagttgtaaaatgctgctgctgctggtggtggtgatggtgctgatggtaaacaattcttcactgacttctctggaaatcagagaagggggttacacatgcaggggatgcccaggggggtactcacagtccataccctggtggctaagacgggaccccactggggggctccatcgtccag

SEQ ID NO: 41263 - DNA, 776 bp, Bovine  19866881624471
  misc_feature (1)..(1): n is a, c, g, or t
naatgagcctcagtcggacctcatgagtcatcgtttcagtgggaaacaaagcagctttgcttcaaaaagcaatttaattaattttgttatgtgctgtggaaataagcttttagagatgattcaaaacacttacatgaaattgtctaaaaataagtgaacaacacaattactgtctgcttttttttgatgtagaaatattaaaataataagaggagattttaaaatgtaaaataacataaagtttgcatgtaatattaaaagaggagaaaaccaaagtggattcttagctgggtgcatgtcaaaggtaaagaaaagcaaacatattgcccatgaaagacaaagctcagtttttttttttgttttctgttttttttaaagctcagttttaacagccctctgctgacctaggaagagaggacacaccttctgttccagcctttggacttacactctctgcatcccagtttccactcctggaatatgagaatggatcctgttggaccaacttccagaggtgatagtcagtcagcttgaaaagtggatgtgaaagcactttgtaaactgaaaaatggtgcacccatatatgacatggttccacttactcatgaatgactttgaacctgtgggtaactattagtcaaatcaatttcactggccttcactaaccaaggtcattttaattgtggctacaaaagacttgcaggtcctccaagtggcaggtagactaaataatatgtttgcctacattattttccaggaactggagtcagccatat

SEQ ID NO: 41264 - DNA, 691 bp, Bovine  19866880359184
  misc_feature (1)..(1): n is a, c, g, or t
nttcttgcctggagaatcccagggacagaggagcctggtgggctgccacctatggggtcgcacagagtccgacacgactgaagcgacttagcagcagcagcagcaccctttaaaagttatttcttaatcactctatgaaacatatgagctgagaaataccaaatactgatgatggctcagtggccaatctggctcaggattcaggcacaaatccaagtgaaaatcagttatttctttagaattttgatatttagtgctaatctcatctgtcttataggcattaattgcttatctctgtccagtacacatggtatattttatactcgctatttattaatttttaaaataaacttcatgtttcacatcaagtattcattgatagtagtagatcatttataattagccattgaattagcctcaaacttgaattattcagcctaggataatacagaaacgtctcatattttggacttcatagtttaagatatatcttgagattattttcatattaattgaatatttttttcagactattattagtttaatgggcttcccaggtgattcagtggtaaagaatccacctgtcaatacaggagacacagaagacctcagtttgatccctgggtcacggaagatccccaggaggaggaatggcaacccgctccagttttcttgcctggaaaatcccaag

SEQ ID NO: 41265 - DNA, 2141 bp, Bovine  19866880437637
  misc_feature (1)..(1): n is a, c, g, or t
ntgatgtactctgtgtacaagttaaataagcagggtgacaatatacagccttgacgtactccttttcctatttggaaccagtctgttgttccatgtccagttctaactgttgcttcctgacctgcaaacaggtttctcaagaggcaggtcaggtggtctggtattcccaactctttcagaattttccaaagtttattgtgatccacacagtcaaaggctttggcatagtcaataaagcagaaatagatgtttttctggaattctcttgctttttcgatgatccagtggatgttggcaatttgatctctggttcctctgccttttctaaaaccagcttgaacatctggaagttcacagttcatgtattactcaagcctggcttattttgagcattactttactagcgtgtgaaatgagtgcaattatgtgatagtttgaacattctttggcattgcctttctttgggattggaatgaaaactgaccttttccagtcttgtagctactgctgagttttccaaatttgctggtgtattgagtgcaacactttcacagcatcatcttttagaatttgaaatagctcaactggaattttatcacctccactagctttgtttgtagtgatgcttcctaaggcccacttgacttcacatcccaggatgtcttggctgtagatgagtgtgagtgatcacactatagtgattatctgggttgtgaagatcttttttgtacagttctgtttattcttgccacctcttcttagtatcttctgcttctgttaggtgtataccatatttgtcctttatcgagcccatctttgcatgaaacgttcccttggtatgtctaattttcttgaagcgatctctagtctttcccattctattgttttcttctatttctttgcattgatcactgaggaaggctttattatctctccttcctactctttggaactcttcattgaaatggctatatctttccttttctcctttgctttttacttctcttctttcacagctatttgtaaggcctcctcagacagccatttttagattgactcctagggatttggtattttgggttcatgccctccagggttggctgtgtagctcccaagcagtttcaggtgaacagatgtggtcactgctgtgcagggcaccttggctccacatctaagagctggccagctggctccccacttcatcaaatcttgatttgtaggctccacttttcaacacctgctggtaaaagtcctactgtaattccaaacccatttgtcatttgctctataaaagaaaataatatatatggttttaagagcagaacagacatttggaaagtgttcataactaaggtgtaaaaacaacagtaattattttttccacggtttatacgaacattgtgaaaatgtgtcagtagatggcactgtttcttaatagatagagaaagctctaacccggtggagtaggtttgaggaaaatatttttttgttaaattggaattaagaataaaataaataaaactaaagaaagttctgcagagtcccttgtgatttacttctctggtgagcttaattaaagtcaatgaagaaacttaagctcttccaccccctcacttgtgatgggctgttgctctaattgtgtcttttccctggccaggctgaagtaagtgatggcgtatggtgcactcggcgtggccagaataaaatcaccgagagagaagccccgggtgccttcctgcttctgcacagaaggtgattctggttgttaccagaaccatctgtgtggaagacagcatgaaacatgaaaggaagaaaacccagagcttctcctcactgtattttctgttccgcagagtggaagatctggttgcaaatcccgcctctgtcacgttctggttatttgatcttagcaaaccgtttaacctctctgacctgtttccttacctagaaaacggagataatatccacatgagacaggaggctgtgagagtaaatgaggaaatgttaatgcagagcacttaacctggcaccaaggagtgaccatgtgaggttgggtttttagtccctgctctttggagctatgaaagtggcatagagggacttccctgatgggtccagtggaagtgatggaaacactctgt

SEQ ID NO: 41266 - DNA, 812 bp, Bovine  19866880536641
  misc_feature (1)..(1): n is a, c, g, or t
nttgtcttttctgattgtgtgaaggatgggtaggcgtctggcatcacatctccggcctcggagagcaatgttaaacatttatagtgaacttaatcatctgtcagaaatgtacaaagccatcatgtctcattaataattattaaatcattgagttgcacagaaggagatgtttccctcttcacttacataatgaccagtaaccactaaaatgtgggctatttgtgatgcatgaccagcacatctgatggtggaaatctgttgaagaaattaataaaaaaatcttattaagatataggcttttagaaaggaagaaaacatgcatatagatgctgtattattcagccaggccaaagagatgctccctccctgttcagagtcaggttaaaattcagtcaggtaattgctaagagtgaagagatgtgaaaggaaatgatcttatttgctttcagaggttagataactcatttcaaaatgcccagcttcgcacttttattcataagtatatgtatcattttatgaataaaagaggtacatattttgatttggaatgaggctgggatggaaggcacaatttttcaagacttgcattttatttctgatgatgtttttttatttcataagaatttttaatatcaggcaatgtcattttagcaacatataatacaagaattgaattacatccattgtagatcccacctcctgcttcccaatattcagtccagagaatgtaaagatttagcctttaacaattttgcaagctatatttgtctttacagcagctgatattaccagcaatttgtatttttcatttt

SEQ ID NO: 41267 - DNA, 833 bp, Bovine  19866880550514
  misc_feature (1)..(1): n is a, c, g, or t
nacactgcttagatttaattaattcagtgtttcttatcaagttgaagtcgggaaggttttcaggtcaccctttctgggagggcatttttggtttgttgggtaatgagtttcataaataagaaatagacggaaatcccttttgctgtgaatcacagttaaggtccagactaaggaaaacactattgaattggattcctcagctgactgtatggctttgttttcagttttaggaaaaaaggtcagatgagactctcacagcttaatattgtgggttttttccaaaaaggaacttccaggctatgacctagaattagcacacattctccatttccttttcataaaatctttgatgttctgagtgataaattgagactgtgattctgacttattaaaggaagattgaattagtttccataggttgagttgggaccagacttagcggtcagtggactagtctttggcgattgactatgacatatggttctagttatagatcactttttaaatttctcaattgtttaatatcctgttaactgagcgccttttattcctcatccgagataaagcttagaatacaagtctgatgtgaaagaaaataaccctagacttgcacactctcctgtaaatgacctttatgggtcatttcctaattttgctgaggaggaagttaagtaacaggcactgacatctggaagtggacagggcaacacctagaggaagattggagaaggttgcagaggggtgacaggctcagccctagttttttaacctgctctctgctgctctttaaatatccagatgtctgttggctttcattcatcttccagaatcaa

SEQ ID NO: 41268 - DNA, 1864 bp, Bovine  19866880642604
  misc_feature (1)..(1): n is a, c, g, or t
ngattcctgctcataggccctcatttgcagaaagggctatcagatcaggtggcctgggagttaccccccagccatagacatgaggcccctgggatagaaggcgctgccaggaagtataagactcagccagcacctccagcaaccagggcagaattcattgaccaggtcacaagttattacctccacagaataagtcagaagtgataacacttgggagttagattttctcttacatttcaacagttccctttataattatgctaacattgctattctgcttgtcctttttcctgctcagctggttgtttttctactcatagattgtgagagccttagaagcaaagcactgaatctgtattttctcactcttgcctcccaattccaagtctatttttctatttcccatattctctgtcactgtctttctctttgcttcttttctgattccatctctatctctataggaacatccaaaactgtcctttggtccctcctatagcatctttaccagcttacgcaggaggcatggaaatgaaaccacaactgaaaatgacttctttttcttctcatctttcccctgaggacaagcacatctgtgcagcctagcttaggctctgttttggcatttcaggtgcacaagtggatacacacacatgcacacagaaccacaaagtctgtgaccttctatttacttatttagctctttaaagagaatctcatgggtaagaactatgtgattctatttgtattcctagcacccagtgtagcacctgatacctaagaggtaattaacaagtatttgttaaatgagtgtttaataaacgcagaaaatctaaactaatgaagaatatgagtcaggcatccctgaaacaaatagaataattaaatattaaagtgtgaatatgattagagtaggtacagacagaccaatgcaccagaaattgcccatcataataaacatgtgtaaccagggaagctccaggtttgggtgggagaggatatcactcccatggaaaactgtgtcatctcattcaaaaaacatttagcaaacacagtatatgtgtgcaagtcagtcagtttgtgttcaactctttacaatcccatgaactatacagtccatggagttctccaggacagaatactgaagcgggtagcctttttcttctccagaggatcttcccaacccagggatcaaacccaggtctcccgcattgcaggcattttaaaattgataatatcagcatccattatcatttttccttgttagttaaagttcctgagttgggtagtaagggggttgctgtctttaagggcagtaatacaagaggccactgcatgtgtgggtccttctgcaagattcaagttacatatcaaatatcaatccccctgtcccatccaaaaaatattcaagcttttcccaaccattccagcctaggaaaaattcaacagacatagggtagagcctccctcagaattcatcccctgacggcacaagttctttgaacaatttgagaacatggcacaaactggggaggaggttgacagatggaaatgtaaatatgaaattttaatgagggctcttccgtctcacctaaaaggagatggtaaatatttcatgccctgctcagcggggtttcaagcattgggtaccattagtgagatagtcctcatcttctccaaacaactagccctggtttgtgatatttcataatacccaaacctagaccaactctcccgcccacacacaacaaaccctgaaacttctggggtgaaaagatcacttgatcatcttgaaaatgttgtattttttcttcctttggtccagtaatttcggcatgttaaaacaaagctccaatggattgaa

SEQ ID NO: 41269 - DNA, 772 bp, Bovine  19866880743099
  misc_feature (1)..(1): n is a, c, g, or t
nagggcagaaaaggactttctaagaaagcagagggctgagaacacgtatggcatttggatgatattaataagtagtaacactctcaacttgagaaagaatctctcccccctcaccctctcatccccttatccttgaaaaagctattctgctgctgctgtgatacctagactccagtcagtcccaccagtgggaaacaatgcctggggaccctctccccaaggcctctgatcatcctatttgagacagcccccgttcccctaataaagacctctagaaacatgggaaagtctgggctgcacatgaatcatacacgtgtcagtaatgccaatgccatggccagcctgggcaagagcacagacagataacagagcaacctcatccccagggtcttgtggaaatgccagggctgttatttccatcccttcaacagggaaatcagcctgcacctggaggctccacagaggctatttaataagacatttgtttactgccttcctgctacctctgacaatataatcctttctgattctttccacgatttgactctaaatgaaaaagtatgatctcgcagttgggcggcgatgagactgcgacatcactggtaatccgccaaagctccagaatgtgatccacgggatggaataaagggaaaaacaacccatgtttctggcaaacataacccttcctcctgtctgggacagattgcagccttctggagacagtcagggaaacagaggaagcatggagtcactcttgctcatttttccctaa

SEQ ID NO: 41270 - DNA, 1350 bp, Bovine  19866880817704
  misc_feature (1)..(1): n is a, c, g, or t
ntgcccacatacttatatctggatatctaaagagaaagtaaggagaaggcaatggcaccccactccagtactcttgcctggaaaatcctatggacagaggagcctggtaggctgcagtccatggggttgcgaagagtcagatacgactgacgacttgactttcatttttcactttaatgcattggagaaggaaatggcaacccactccagtgttcttgcctggagaaacccagggatgggggagcctggtgggctgctgtctacggggtcacacagagtcggacataactgaagtgacttagcagcagcaaagagaaagtaaagaggaatctctaaatttgtgatagtctgagttgaaatgtaggcttagttcctacccataatataagaggtaaattcagtgcaaggagattactttctattatgagggaatagcttccttggtagttcagaaggtaaagaatctgcctgcagtgcaggagaccctgggtttgatccctgggttgggaagatcccctggagaagggaacggtggctacccactccaggattctggcctggagaattccattggacagaggcgcctggcaggctacagttcatggggtcacaaaaagccagacacaactgagtgacttttacataataaaagaggaaaattcaatgcaaggagattactttctattatgagggaataaggctgtaaaactattgatgaatatttgagactgtactcaaaataatggctattcttgcttcattaagcaatgccagatgcttctatatccatttaagaatgatttatttactgtgagactgtttttcctttcctaactgaaacttacatctcatggaaagattcccaacttcagaagagacacaagtaaagaagcaaccttcagaagcagtttagcaactgaaagttttgtattctcaagttggtctggccacctttttcttttcatggttgaggagactgaggcctggaagaatgcagtgacttttgcagtcactcatgttttacgagctttctcgtccatcaaaatttggtgagaaatcatgataagattaattttactcttgttatataataataaaatttgagagagtcaagttcatactctagaggaagtaatattcagaaaggaatttatattaattaaaaagtggtgaataacacaaacaggaagacaaaaatttcaagtatgtcttcctcttttgattgaagttcattaaggccaattttttattattccagtcctttatatttttcatgcatagctgacaacatgagaatgatcctggtaattttctcttgcttcaattctagatgaatgggaggggaaagaa

SEQ ID NO: 41271 - DNA, 1537 bp, Bovine  19866880887009
  misc_feature (1)..(1): n is a, c, g, or t
nttctagtctggagcactgtccctactcagatcatacgtgcttccttttatgttttaccccccacccagatgttttagtcctcacatttaattcagatgatcagggtaggtgtcaacaatggcagtttctcagcagaaaattgtttcttccctaagttaaatctttccccttaagcacggggtttacaaaagtgagccgactatggctcctgctcatgaggagcctggaaagggaaggagccacacagacaggaagagctggcatggggctgcttcacccctgccccctttctcctgggaccctcacttggaggaattcagagaaatgccccatcctgcacgctggcagggagcttcctctagctcctgtcctggcagggctatcatggctgccacatgctgccagcctgcagcagccccgcacacacggcctctgtgcaccatggatggggtttccgcgcaaatgaaagtgagcgccagccgggcaggtcccagtcctgcagcatctcagcagggagagggcacttgggatcactgacacattttctcacccatgtgcttgctgatttctctgcatttacagtttcggcagtgcacaaagaaaccaagcagttcttcactttatataataccctggatgacaaaaaaggtttatttggaaaaagaggtaagagcctttatagaaagaagataacatagatgagtgtgtgtcacgtgcccagtgctgggtacaaggtcagaaagtgcatgattcctcggggctgtcaccgtgcagagtgggcagcggttgtatggtgccctgcgagaggcaccatcctgaaaagaaacatcctggaagcacaagaggtgcatatggagaagggcctggagttggtgaaagttgagtttgagctttaaatgaaggaaggaaccaactaaaggaaatggggaaggtgggccgtcagagctgacctggggaaatggctgtttagtcgtcagcgtcagacagaggcatgaactgaaagaactgctttcaattgtacagtcgagagcaggagtggcaggggtgaccatgagcagctgctccatattgctccgactctcactcaggtcagatctgctggtgactcggagctctctccgtggaaagcagcggctcggggcgggtgtgcagctgtattcagaaacaagcaatggcgtcttcacagctgcagcatgcagcacagtgtggtggcgggggtgggcgctctggagtcattgggtttgggttttagtctgacctcctcaccctcaccacatatcctacagtgatatagaatgaatgagacagtgtccctgaagttcctagcacacagtgatatgtattagttcctgcctacccctcaccttgagggtgacagaatctttttttatttcgttgtcatcctacaacctgcactaattaccactttaataagaatactattacagatgtatcttttacctgaacacaaatggaagcctctgtgcctattgttatcctgactacctattttttattttggggtttttttattta

SEQ ID NO: 41272 - DNA, 1655 bp, Bovine  19866880894563
  misc_feature (1)..(1): n is a, c, g, or t
ntgagtggaattactctgtgaaacagaggcttgaagtcagaggcacccagcataaatgtaagccaccttcccccagaatccctcgagagactgggaatgactccaacttcctactgaatattgaacgagatcagagccaacttcatttgaatctcagtggtcaggagacctctagttaatacaaaactgtgctgagtaatttgtaggagtaaggagagcttggcttatgttaggaattacagatcgttgccagtgtaaccataagccctcctttctgctttgcacaagtgagctaagaaatgttggagctcctagctctgtgcgtactgagcatctttaagatgatgacccatgcccaagattttgggagtcatcatattttgagaatgaatatattttgcaccttcccagtatgacttgaaagctctggggaagagaagtacaagcttctaagtacaggaaaagaacattaattgactggtagtagttaaaaaataatgagtaatttgtgttggttttctgctctgatttacatgataaccttttttctcctccacaataaaattcacaaacaacagagacatctgtttattggtctcctgtctcccatcagcatccattaggcatctggatgggggtgacaggagcttctaactcttctatccctcccctagccgaacatctgattccactttccacattgcacccagaagggcccctcagcaagctgtaactaaagctaatttcttttggtgctttttaagtactaatggtgtaccccatttgcagatggaatcatcctggtggaggatgaaaaccaaagagttcctggaaacatcctccctgccccctactccctgccaagtatgcacacttaaaggtgtaaagagggagctttaggtaaagtttcacactggggatccaagggtctcaggtgcctaaggatgcaagagtgacagaaggaggaagctttacaacataccacaaagtatggtacaatcagtccagccaggtacacacttaaaaagaacattatcttcttttggatggttgctatcacttctctccactccagggaggctgtttcaacacagtgcccaatcatctcacctaatgtcaaattactgcagcaataggtccacaaaaagactgtgtggaatcgtgtgactgagctgaaaatttgataagaaatacactcaactgtgtcggagaaggcaatggcaccccactccagtactcttgcctggaaaatcccatggacagaggagcctggtgcactgcagtccatggggtctcgaagagtcggacaggactgagcgacttcactttcccttttcactttcctgcactgaagaaggaaatggcaacccattccagtgttcttgcctggaaaatcccagggacaggaggctggtgggctgccatctacggggtcatacagagtcggacacgactgaagtgacttagcagcagcagtagcacactcaactgtgtagtaacagagaaaatgttaggagtttggtattcttctttactgctatttttttcccttttgaaagtttaagaacaatttctttttttttaaactctgtctcaagatgtaagattttggttagtgttaggggttaggatcccagtagcaaatacagttagta

SEQ ID NO: 41273 - DNA, 2591 bp, Bovine  19866880924498
  misc_feature (1)..(1): n is a, c, g, or t
nagggggtgccaccatgatccccaggataacccatttctcctcccacaacctggggacaacacacaaatagtctacctgctcacaagttgttaggcctgtgagcttctcagcaagatcaccaaagtgttttcctgaacctgagatagtttacagttttaccgtccccaccttcccttgcccctggagctctacctgcactctggcaaccactggcttcagcctcactgagtcctttcaaaatccacaggctaccagcacccacccaggcggagaagtacatgatcaggaacagtgccatcagcacgtgggggcacggggagcagcctcctcactgggcgggccttgctggaccagcacagaagccaagggtcattgatccagcatgagattctttaagtctgtacacaccagccctgcttactccacacattagggaactaaaaccgagcacaatgtccctgcagctgcacgcagcatgctcactgcacgtttaagcttttatgtttcatagcccaaacctgctgactggtacctgcaaggcttgtgtggaatgatgtgcaagccttgctcatgctgggttcactgaccctgagcgattcctgagggccggggcagaaggggctgtttggatggactccttccgggagaaaccgtaaagccctctgtctttccttcaaggctctgcaaagggtgagtctctgcccaccttcccggactagtctctaaagccccctgcagagactggccaccccacccctctcccaacaagcatgccttatactctccctgcactctttgagttttaatcacatctgtactttatccaaaatggcttttccactaatctctattcaactgtgattcctccttcggatccagcccaacccagctggctccgtgaaaactcctggatctctgcacacctggctgctcttcctgctcggacaccctcagcacctgctcaaggccggtccctccaggatttacacactggcctggacgggggtgactgtgggcgagcctgcctctgggtccagccctgacctatgcacagcagggagcatgtgatgtactcctagtgaggatgcacaagaccacccacagactggctgagactcacaggagagcagggagcggtgaggtgtcattcttacgtgccaagctgaggtcttttttttttttttttttggtgagatgaacttgggtgagtgtgatgaagccaagggcagacactgagttttcattctagttgctacaccattaaggttgctgagcagcccccgagggaccaggaacaaaaggcatcacggcaagtgagaggcccaagtgaccaatattcacatgggctggtcgttcagctaaaagccttgtttactaagaaaagaaaagtccccgtgatcaagctctggggccacgtgctggaagcctgggtgcagggtctgtgtcctcctgctcagtgcttcctcctcagcagctgctcaattaacattactgaacaaatgaattcctctttattcagagtccattcaaatacaggtaccttcatatgtgcaatgttactggagaaataaaagtagaatcgacacagagaacaaacactgcccacatttcttcactggaggatgggtgttatccaagccacaatgtctgcaccgtccgatcccatggacaacagccaccatggagatgaaatgtgagcaaacaggaggaaggaaatatcccgtgttgagatcatcacacctacatctctgctgcagtgtccagaaccatttcaccatctcggagctgatacatggcgtttagacgaagacatcaatgacgtgcgatgatgtctgggaatgttcaagaggccttggctttcactttggacagcaacatctcgttcttgcggccttcctgcaggggaaacagaaagacagagcagagaggtggggaccgtgttatcgcccacctctgcatccttccctgtccctggagaggcctgtggatcagtggacaggcctccttttccattgccaccagtgtaggggaggttcctggacacacgctgaccttcaaggccccaacagtcacaaagactgactgtcagactgaggacaggagaagattaggcactgtcatccccaaagacttcaatccccaaggggcagaagcagaaagcagacacttctctgatcttggatgcctccagtgaggaaggggaaagtcttggacaccacggcccaaggagtcctaagagacagcagatggagcatgaagaagagctcttactccacaagagcgaaggttaagaataccctcagctttaacagagaaacccacagcagacagagggagagaaacgtatcgagggacacctctcccataaagtgagctgtaggaaacccatcactgagggtgctgcaggatgtggacaaggtcactggcctcatcccctgtgtgcagagtctggcatccagggtacaaggccatggctgtgttgttttgaatccccttcttccacagcatctcactgtgcgtcctcctccccgtttgcagtggccttgatagctcaggatactttcgtctgctcgcacatcatgtccacttc

SEQ ID NO: 41274 - DNA, 1779 bp, Bovine  19866880930881
  misc_feature (1)..(1): n is a, c, g, or t
nctgactaatggggagctgtgttgagatgcccatttacagggcacggtctttacctggtgtcacctgcagaggtgagaccgggtctcaggcttgggatgtggttgcaggttagtatgtatctgtgatgggttggagctgttcctttcctcctggacactgtgcagtccactcaggcagttggctcacaggcatctttggcagctgcttctgactgggcagaggtgcatttaagatataaggggaatgttttcccctcagatgtactcctgaaatagagaaataaagctctgtgagcacgtcgtagagaaaagcttgagctactgtattttttctcatctttttcccatcttcgtgcttctgcctctgtgtgtgtatctgtctgtgtgcatgcctatctgctgtttttctcttttgtgtgtttgtttgttctgttcctttctattgcttctgatgtgtgtctctgctctgtacctgtttgcatctgtttctgtctttctctatctgtccatctgtctgtcagtcacttgattcctctgttgaaacaggggctgatttatccacctcaaggttactaagaatgttagtcagggttctgcagagaaacagaacaaataggagatcatgtttgattatgtaacatgcatacagttatataatcctatggattggcacacatgatcatgaaagtttgcaagtcccaaggtctgcagtcagcaagttggaaacccaggagagtagatggagtaagtttcactttcagtctaagtccaaaggcaggagaagactggcatagcagtttgaagatgggcagagagaaattcttggttattcaacctttctactctattcaagacttcaacagattagatgggatccacccacactaagagggcaatttgctttactcagtctactgatttaaatctactccagcaacaggtacacccagaataatgtttgaccaaatatctggacaccccatggcccagtcaagttgacataaaattaactatcacattatagaagtctgtatgttcaccatcctagaacttctggggtcacagaagtcttaaaacaggctgactgagggtcaaatccaactctcaggcatgtcctgttggtctcccacccttatgcttatgttacatccagtgatgctacatccaaggagcttcactctgtatattatctgccttagtgatgttttctaggtcatgaccaggtatgaggtcactgaatatgtgacccctttcctatctcttctaatagagtataacagcactcggatggtttatttacatcactgagaatatctaaacacatttccaaacttgtgctggcaatattatacagctgaaagaattcagcaatttgactacgcagctacctgatttcttccctgtcctgtcttgagaaccccttccctgattgacatctgtggaaagaagaggatttcagtcattggcactgtttgccagggtgaaccccagggcatttcagttgttgctgttgtccatcaggaaagagggttttcccaaacttactgtctctcatcctagctccttcttttaggtcatctcatgctccttgctcactggaattttgcctgacatcctcagacatctaaatcctttatcagccagggcatagactccagggctgctccagatataaactgtcttgtggaaataccttggagtttgaaaatacaagtttgttagtatatacattctaggatgaatcaatttgtagggcaggaacagaggcacagatgtaga

SEQ ID NO: 41275 - DNA, 875 bp, Bovine  19866880992326
  misc_feature (1)..(1): n is a, c, g, or t
ngtacatgtgcctttctcttatgtgacttgagtgttgcaggtagatagtctaggctggtaaggtggctcatgtatcatcagtgttccagcctcctgctatctgccctatttctctgtgcacatggcttctactctccatgtttcctcaggggagaaaactggctgttgcagttctggtcatcataaccacttctaggcaggaaaaaaaggaaagaggaagtataaaaggatacactttcaagttgagtcaaccttctttgcagagttaccttaacacactgtacttttctacaaggaaatctgggaaatgcagtttttatttttaagtttggaacatttcagcttttcattaatatcaagtttcttttattaggaagaagggtaaagtgacattggaaaggcaactagaagtctctgcccattcatcattattatgacatgtcaaactcagtcttcaaactgcttcttttctctatttatcctagctccccaggtgttctcatacactagatttacagtcctctccgcccccttccaagttatctctctagtcctaatctttcctctaaatttcaaaattgaatatttggttatctgctttatgtctctaccaggaatccaataactatctcaagcgtgacacgtctaaacctgaacttgtgcttcttacctttaaactgtgttccctcaccgacttccccatctcagtacatggcgactctggattgctcaggccaagaaagaactctgtagttttctttctctcataatgcaatgtgcatgtgtgtgtgctaagtcacttcagtcgtgtccgactctttgtcaccctatgatcactctttgtgatcctttgtccacaggattctccgggcaaa

SEQ ID NO: 41276 - DNA, 799 bp, Bovine  19866881004269
  misc_feature (1)..(1): n is a, c, g, or t
ngcctttatcttgtccctccaagccctgtaccaccatatggtctattctgtgaaaatgattaaacagactttctgccatgggtaaaagctgtatttcccactggatacagcaaaatccctgtaactttatcccagtagagtgagtctagaattctaagtgactcaatgggacaggtagaagagaaagccagtatgctgacaggcccataatttgtggtttctattggcataaagaaaaatacagtccgtgtgctatttcttctggacaaaatggaggtcagaaggctgcattcaaaaataatcttaaacatcaaaggctttgcacaggtgatctctccctagaatgccctttcccatctattcacccaggtttcttaaactcttgtttttttggccgcatcatgtagtatgtaggatcttacttccctgactagggatagaacccccacgctctgcagtagaagcacagttttatccactggatttccagggaatcctcatatcctcaatatttgctgcagtactgtcacatgttccacgtagtgaagttgtctgccttggccaagtctccctgtgatttccaaactctcggggcttttcactattataacatttatcacactgcataagaattttgcatttacttgtctactttacacacacacacacacatacacacacaccctgtttccctaagggttattttaatctctgaaatttcaatgcctgcgtgcatgtgtgctgagtcccttcaatcatgtctgactctttggaccctaggattgtagcctgccaggct

SEQ ID NO: 41277 - DNA, 1875 bp, Bovine  19866881008921
  misc_feature (1)..(1): n is a, c, g, or t
nttttcattgataaataatattacaaatactacaaaagaatttcttgaacagctggtccaacattgtatggtgaaaataaatataatttactatgcacacagatatctaaggaccacaaaagaggaacagctttctgatattcatctccatttcattcttaccaagaaactggtaattattctgggacacagtagtcactcagaaattaataactgtcaaatatctaacaatgtggctaaaggaataatttttggtctagactataattttcttccaggtccttgggatcctttctgctcccagtgtgatagtattaggatgtgggatctttgggaaataattaggattaggtaaagtcatgatggtgaagccctcataaacaggattagtgtccttagggtcacaagagagtttgcttcctctctgctctacataatgtgaggacacaacaataagactacctacaagccatgaaacaggttctcagcagatatctgccagcaccttgatcttggactctccagctccagagttgttgaagccacccaacacatggtaatttttgtagcatcctgagaagaccaagacacaaaacaatgtcgtcaggaaccaattctcaactcttccttctctttgatgacttcatcctcaagatcctcagggctgagcccagcatctcctattcccattggtataatatgaagtccagagaaagaaactctgtttcctataatactgtacccacaacccctgagcagagcctttttgactccaatcttgagccttaggtcttaagcttgttcctgagagagtcacaatgtctgggaagagagaatgcactgattgtcagatcaggaacaaaacagtggtgcccactcttaccacctctattcaacatagtactggaagtcctagtcagagcgattaggcaagataaagaaataaaggattcccaaatcagaaaggaataacactctgcttgtactgatgtgacattacatactgacctaccttattttatccacttcactttgttgagcttcacagatactgcattttttacaagttgaagatttgtggcaaccctgtgtcatttttccaacaatgtttgctcactttatgtctctgtgtcacattttggtaactctcagaacatttcaaccttttccattattatatttgttgtggtgttctaggatcagtgatctttaaaaatatttatttatttatttttgactgtgccgggtcttcattgctgcatgcagtctttttttatttgcagagagtgggatctactctctccttgtggtgccagggcttctcattgcagtgacttctcttgttgggtcacacatgctcttgggcatgcaggcatcagtagttgtggtttgtgggctccagggcacaagtttaacagttatgatgcatggctttaattgctctgcagcatgagggaacttcctggatcagagatcaaaacagtgtgccttgcgttgcaagtcagattcttggccactgaaccactagggaaggcctgtaattaatgaccttagatgttactgttgtaattgttctggggtgccatgaactatgcccataaaagatggtgaacttaaaaaaagaaaagaaagaattcactgatttgctggctcatatcatgtgatcctccatgaagcctgaagtagactcatttccttgaagtatatggactaagaaaggaggattggggcacacctgccaccaaagaaaaggggcatttacaccaggcacaaaagccacacactttccctctaatagtataataatctttcaggcctgtagaatgtttctttaaaactttgggaattgcctataatgtactctggatagtcatt

SEQ ID NO: 41278 - DNA, 712 bp, Bovine  19866881102085
  misc_feature (1)..(1): n is a, c, g, or t
ntccttgagagcacaccctcccttgtgattgcagagtccggccgaccgcaagctccgtgggccagatcgtgggcctatgctctgccgagatcaagcagattgtgtctgagtatgcagaaaaggtaggtgggaacccagctgaagccatctcctcagtaatgcccaagaatttgtccttctgcttccctacccctcccagcactgatggaggcaggttgtaattcatctgccacatttgtcagaatatccaccgtgcagcgccatccacatttgcccattagctaaattcattttcttctacagtgactatttttctataaatataaagagaaaacctgtctcttggagcaattattgcatctgatagatggatgccttagggacagcacccacatttttccttctctatcaggcttcctataacttgggcacagtttggtggatgaggctgagggatgaagctttgccacttaggagataaaccccataactcagccaagcccaaggcaaaattttgtgtcctgctttattaaaagggtatagaatgaacaaaagcctgaaagtcatatttcagcattagattttttttccatcctaagaataggcagcaggaccttgaatatttcagggagacagtgattaatcattttgcacataactgatttctggtctggctgagatgtagtatcagtaaaatcagatttacaggggc

SEQ ID NO: 41279 - DNA, 2370 bp, Bovine  19866881105072
  misc_feature (1)..(1): n is a, c, g, or t
natattcactgtattgactgtggtgatggcttcaggtgtaaacaggacaaaatgtatcaaattatatacttaaaacataacaatctttacatgtaaaaacatgtacagattatgatgctaattatacctcgatgaagcagtaagaaacaaatcgtataaggcacggaaccacactgttatcgatataagcagtttataaatgtttcaagtactataacctaggtacatacaacttaaacataacacagagggcgccaagtcgatgactactggaggatgagagatggggtggcagggatggacaggaacgagacatacgttaaaactgtttaacttgcactgtaagctctcaaatggcaaaaccattatagtaagttaccagtaagatcgatgtatatattgcaaactacctctaaggctgaccggcacaacacctcacttggttaaattaaaatgctgacattaatagttttcatacaggaaaaattctcagctacttccaacagctgctctgcaaaccacatgaagatgcaacccacttacttggcagaagtttaatgatttgctttaattcctcttcaaacccaacatccaagatacgatcagcctcatcaataaccagacactgtaggtttttatacataaaccctggggtattctgacaagacaaaggacagaaaaagactgttagctgcgaagtgtacgtttcacacagacagaagatggggcttcacgacagtgtcctcttacctgcatgtggtccaggagacggcctggtgtggccacgacgatgttgatcccattggcaagcttctgagcttcagcagacctgttactgccacccattattaacccgtatgtgtgaacatggtgtgtcatcagctccttaaggacaccaaaagtctgcatggccagttccctagtaggtgagagaataaggactcctgttcctaaaaagtaaaacaggatatatggtcaaagtcaaactgtagttacaccaggagtgcgcccacagtcatgacagacttctagtaagattctcacagagacagcgggctcacaggcttaccattcctgggcatgaactttaacttaacaatgagttcaactgcagggatgagaaatgccagcgttttaccactgcctgtttttgcagctgctagaagatccctaaaaaataaaacagaaaaggagaaacatatttgctctactcatgcagcaagtatttactgaatacctaccatggactacgacacatgtttgaggcattgaggctggattataacaagaaaagagtccccaccttctctatcactgaaatcaatcatgtgggttaaacacttaactcagaaataacaattgtgctaaaaacagaagtgaacacttttctccaacatcaataaataacctaaagccttaaatgaaggttaggtatattatcaaacacaatgtgagatccatagaacatactggtattttttccccgaactattggcactaaaaacagagatattaagtgtgtgtatgtgtgcgtgctcaggcatgtccaactctttgcgaccccatggactgtagcccaccaggctcctctattcatgggatttcccaggcaagaatttccctctccaggggatcttcctgactcagggatcaaacccgcatctcttctatctcctgcactggcaggtaaattccttaccactagcgccacttgggaagcccaggaccaatgcccaaacctcaatgttaaccatacctgccttccagaagtggtctgatacttttatgttgaatttcagtcatgtttgtaaagcccatttcttttattgccttcagagtgttctcattgacaagattagtcagagaatcaaatgaagtatcctcaaaagctcctaaacagaagacagtttatcattaacaaatttaccttttctgaatagttaatattgcgtttcctaaatttgttttgctgattgaaaacattactgggttgatgtcaagcttctttagaagagcttcttccaataagaaaagactaaacaccaaccattcctatataacaagaaaaagatcttatacttgttgcaagtttctccactgctaacggctgtgtaatctaaagcctatactgtaatgaaataacaaagagttggagaggtggtacaatcaagggacttatgtgaaataaaaatgccaaggtgggggcacactggggcaggggtggtggtgtgaggctttcaggggaaaattcagagagaaatgaaatgtttaggaaatctgaaataaagaaagaaaacactcagtataaaaactgagtatgaaatcaatcaaaatagcaactctccaaaaaagacaactagaagagtcaga

SEQ ID NO: 41280 - DNA, 1366 bp, Bovine  19866881189804
  misc_feature (1)..(1): n is a, c, g, or t
nctgtccatcggtgattcaggctttgcaaatgacggctcttctcattttacaccccaggagcagcaggtgatggatcgaaagggtagtgggtgacaagttgttttaagactaacagttcaaagttggagcatttgagccaggctgctggtcataggggagttgaagaggcaggctgaatctcaatgtattcagcacttagtctgcaactggtatagagaccctcaactctgttgtagaaaagattataatatgagcaccaattattaatatactgaacatctattatgtgtcagatcactaaatctcatttagttgtagtcttaaatttttttattggataaggaaaggggttcagaggggtgaaacagcttactcaaagtcacctgaggagcaagagatgaaggtggtccttagacccaggcctgcctgcaagtgcctcactatatcagagccaatcattataatccttggcaaacacaaacttataagcattctgtggcccaggggtggcagtgttctctccagctcatcctcctagaaagttcacttttaggagatgcttttcaaaaggaaaaccaaaaatagataagtacgtgcatgcttggtcgcttagttgtgtgcaactctttgaaaccccatggactgtggccaaaaataaagtagatgatagcagtccagaaagctatactctcttttaggcctaattgcaattaccacataaactcagcctccaattatggtgtatttagcactggaaaatgaaattcattaattattgtgcagctaccactgaaatcttacagcaagtctattctctgaataaagtattttaaaattaatgacatacttatttctgcttattaacaatttaatagttatatgttaagcatttttaattaagcaaaaaacgaaaaaggttggatggagaattgggagataatcaaatcagcagcaccctcaactggaaagcaataaaatcaagacctctggagagacctgtcttcataagagttcaaacaaaagaaagatatttgagctcacccatagtctagtatatgaagtgcactatgtagtaagaatagaggatccttaggatgctctgaaagctcagaggaggatttggaggaatcacactgggagagacaagggagacttcttgggggaagttgaactggttatttaaagactataacagttgaccagtccatgaagtaggagaaagtaaaggagagtagatcattatagagaggcacccattatagagagcctgtgaaaatatatgggttaaaaataggaaactgtgtgatatgttgttcctacaaccagtttggtaaaccagctgtagaataattagactgggggaag

SEQ ID NO: 41281 - DNA, 828 bp, Bovine  19866881265006
  misc_feature (1)..(1): n is a, c, g, or t
ngaccctgagacagagcctagatacattttctcacttgcctaatgagcaaagtgacagacagtgaaacagttcacacttgagtaattctctagtcatcagcaactgcagcgggcccctcctgccgggctttggagggggctggtcaggagatgtaataaagagaccccggctctgctgaccagaataagttatcacaaagagagaggtcttggggtacactccccgaggacattgaaccagaaaaaagagtccgtttaaggcatctccaggcattcattcaattagaattaaattaaaacaatggagaaaaagaatcaccttatttctcatcaggccagtggcctgaagggtggctaaaaatctggaaagtgatgccctctcctcaacagtgctcttttaaaccatctcccctcttgtgggccttggtctaatgcaggtttcatttccagggagagtgggcaaatgggagtaggggatggtgtgtgtgtgtgtgtgtgtgtgtgtgtgtgtgtataagacaaaaataatcttttcactgactattttcaggggcctatgagacagttcacgggtcgggggctgtcttgaaaatccactgcttcttctgacattggcagtgggctctgtgctacttcagtagttagtgttagttgctcggtcgtgtccgactgttggtgaccccatggactgtagtccaccaggcttctctgtccacggaattctccaggcaagaatattggagtgggtagccatgcccttctccaggagatcttcccaacccagggactgaacccatgtctgtcacattgcagggaattctttaccat

SEQ ID NO: 41282 - DNA, 2133 bp, Bovine  19866880112692
  misc_feature (1)..(1): n is a, c, g, or t
nacccagcaatcctactgctgggcatacacactgaggaaaccagaattgaaagagacacgtgtaccccaatgttcatcgcagcactgtttataatagccaggacatggaagcaacctagatgtccatcagcagatgaatggataagaaagctgtggtacatatacacaatggagtattactcagccattaaaaagaatacatttgaatcagttctgatgaggtggatgaaactggagcctattatacagagtgaagtaagccagaaagaaaaacaccaatacagtatactaatgcatatatatggaatttagaaagctggaaaaacaaccctgtatgcgagacagcaaaagagacacagatgtatagaacagtcttttgactctgtgggaggggaagggggatgatttgggagaatggcattaaaacatgtataatatcatataagaaacaaatcgccagtccaggttcaatgcaggatataggaagcttggggctggtgcactgggatgacccagagggatggtatggggagggaggtgggaggggggttcaggatgcggaacacgtgtacacccgtggtggattcatgttgatgtatggcaaaaccaatacaatattgtaaagtaaaaaaaattttaaaaagaggatgaaacgattagatagcattactgattcaatggacatgaatttgagcaaaatccaggagatagcggaggacagaggagcctggcatgctgcaatccatggggtggcaaagagttggaaatgacttagagactgaacagcaacaagaacagaatgcattaggattcctaggagcgcttgtcatttgagggctttccttgtactcctgaagttctgtacagatgcaacacggagggagctctggaggcctgctttgcatttcccccacccctgcaaagcacacagggcctgccccaactgggagactcagatcgatggcccagggtcctcctggcttgtgagctgtggggacccttcaccttgggtagtcactgggcaggtgcggatagttcccctgccccagccaaaggtgaagcactgtccacatgccccacactcacacacgtgcgcctcaccccaagaacccaggatactcttggtgtatgaattgactctgttgtgttggaacatgtttctggatgtagctgctgttacaatgatgggagggggcaaagaaggcctggcatgccagtcctcagggtaagactgtgcatgattcctggaatgccgagctcctgggctgggcttcacacctgctgccttggctgtgccaggccctaggggcaagcagcagaggcctgatgggagcctgggggaggccaacctccacccagaagggtggtctcccagccccgctgattagaagggaggtccttctcccttcttggtgcaaatgcttgtaaacccacgaagcggaggtccatgccctgctcaggcccagatgacatctggacagcgcatcacactgaaaggaagaagagtagttaccaaggtgtcggggagcatcaccacggggcagcaggagtgccggagcagccggcccatcttccagacggagagcagcgccaccaccaggatcagcatgaagcccacgaaggcaaacagggccagcgccagaggcagggcctctcctgaaaacagaaaagacagaaaccggcttaggagacagccctgaagaccaactcacttaccagtcctgggcctccctggccttcccgggattggctctgcagacggatcaagagagcagactccggcaccctgagatctgacatatgccccagggacaagagtgaccaccattcaatcgtttttctagaatccagattggtttccagaaagccaaggaagattacagtctttttcttgggaaggaaaagggaggagcctcgtgcattaagcactagctgtgtttgcacacaccttggcaccactgccagaaggaaggcagagagccaggcccccaggcaggatgagggggcggtgcccaagagcacagcccagaagggagctgggcggtaactgaaaacaaagtgtgcttcacaattttctcttggcgttgatctgtattacggaggaaaatattaattcagaacacagtcacataa

SEQ ID NO: 41283 - DNA, 3525 bp, Bovine  19866880501810
  misc_feature (1)..(1): n is a, c, g, or t
nattgggaaaatttcaactaattttataattcaattttttgatacaggatttaaagagttttccttgtgagtaaataattaggagaaactctgagactattaaatctggatgttatttccaaactaaagcctaaaacctataaactatgtaaagaaatgagtatattagcttcaagcagatggatatatttctatgatgggaggtgcaaaaaaaaaaaaaaaaaaaaggggaaagcaaaagaaggggaaatatctcaaaagaatcatcttttcagtgcaattaaaaattatctcagtgcagataagaagaaaaagatatatgagaacactaaagtagttcaacaggtaaatcaacaaaaattcagatttttaataatcacatagagaaatgaggcaaaaagccaaatagacaaggatatataaagaatagtaaacagcaattaaaatattataaaagattaaagcctataatgaacacaggtgtgtaaaaactgctaaggatgataaaagtttggataaagcctgtttcttgaacccaagatagtactgctgagggacgacaaggaaaaccatggtaagctcatattcatccaaccaagtcctatttagatattactattggaagcctgccctagttgctcacttaagtgtctatatatctgtgcttgctttgtaatttatacatctatcaccacaataatcatgctgaggttttgttttacatctagtggaaagagttaagctttaagttagagaaatcaaatgtcagtttttgctactttaatagttgtgtgacctttgaaagttactttgcttctctgagccttgatttccttttctataaatgttgatttcctaaatcacagttactgcagtcaacaaagataatataaaagccttagagcagtctcttgaatgtaaatggcatagaacacaggcagctattcattattagcatgttatataatgtttacatttcagtttctctgtaatctagaactgccatactacagaaattgtatcttatttaaacctctggctaccaacatagtactcacatgggagttgtctagcaaaatatttagttactgtgtcataactagaatggagcccaaacatggacaaagacacaagtgaatgaatggcatacacaatattctgaacatgggcaaaataaaatactgtctctgacataaaaacaaggcaaaaatacatacaccgataagtatgcctgttaggttttatcataaagatttttgaggactactttttttgagtgtcagaaacaaaatggagcttctgggaagagcagccaggaagtcggagactttagaatggtgtaaaactctcaacatctccttacctcctgcaggaaaaaaatcccaaattctcacacaacatatacggtctaacctcatttaatatctttaaatcttacctctagctccattctcataagcaatctatgttgctgtatcaaattacttgcattttcctcaatttcctttgtctttgtacaggtagtccaatgtgcctgaaagccctttaactagttctttgcttgactaatgaatgcttctcatctcagacttagttcaaaaggcatgtctaatggttttcattaaccctcatatttcttaagagtgtatctattttatatatttccaggaacccctatacatatctctctacactgcagaaatgcaactgtctaatcacttgattgtctccagctttagaccactttggagtaggaatttaaaaatctttgttaactttagtgcctggcaggtagcattgtaggcacacatataaacgtatctggagagatgtcatagggaagagagagttttcttccataagaagtgtccatggctttaagaaaataaaacagcattctttcttataaatgtaaggaactcctacttaatggaattgatataatggtatagagtgataaaaaactcataaaaaagagaaattttaaatatgtcagaaaaccatcaataatatttaggtaaaagctgtcaattttagcttgctcactactctttcgtttttagttgcaaacttctaaggcacttaggtggaatgagaaaaacaagaatatgaagctactaccttaatcaatcaataaatgtccttgacccattaaaaaaaagactatcaaactataccttcatgtagtgtttaaagatgtctgcagctgcatgcatgtcaacaatatcatagatgataagtttgctgaaggcagcaagtagattccttctcttgtgtaaggcctcaattttattagcttcatcttcttcatcaccctctaaccacagaaaataaattagttatgaactttgggccctttatccaaggtaaaacattgtagacaatctgtagaacaaataactaggatataactttacaaataggtacaatttagttttagataggataaaaattattagccgtactgattattttagggtgctacacttggttacatatttattaaacactaggcactaagtttctaggagattatcatagcaaagactagttagagaagcaaaccatatataggttttttccttatacttttgtcataacaatactgttgtccttttacctgaatattccttatgtgctaatctatttctacagagaagaaatttatagaaaaatttaagacacagggaaaagttttcttttagaaacatatatggggaggaatggaaattacatgaaggagttagttttcagttcttgtcttaaatgtggttacattataagctgagaaataaagtatattttgcaaaccatgttatgtacatacacatttttaaaaacaaatcattatcaaatgctttcaaacaagtggtgtttattcctcattttttagattctcaggtttatctatttctaatccccctcaaaatatctccacaagtctcagacgataaaagatgacacagttgtttcaggttctgtactgaccctctcatgtcttggcctgcccttatttagggacagtgttctttttctcttcttcacaagtgtattcataaaataacttattctcaacttctctcttccctttctattacctgggcctgctgtgaagcatcagtgcttttggaagttggaaatctttttgcttaggacaagtagcaggtaaatattgtttcctgagattaacatgaactcagagatccttttttcacagtctagtattttctaaaatgttctgttaaataaagaacattccaatagcaccaggtagatctgtggatttgatatgccatggatcttacttaagagagcttaaatcatctatttcacaaataacctattttatatagtatttatttataattatttatattcagtcttattttgctaagttttcattctgcaggctcagaacaattttgactggtgaggtttcataatattctcttagagtttagtatcttagagtaacattttgttaatttaagtaatataggatcactcctcaggaacagaaaggaa

SEQ ID NO: 41284 - DNA, 853 bp, Bovine  19866880576357
  misc_feature (1)..(1): n is a, c, g, or t
ncttagttaagaatatgcaatcagcagataatagattctaagtttactactggtcaaaatgaagtaaaaagggtagtatcatgtgatatataattttttgttttctggcaaaagaaagcacaccaaattcatctgcagagaaactatgttttctagagctaaattccaaaaagttttatgaatccttgaaagcactggcaaattggaaacatcactttcatccttagctgtttataaatagtgtaaattgagaatttataaaggtgtatataattttctttcaaataaactttacacagatgtggttcttattgaattcatcaggagaaaaccagcatcactataaagactcatccattcatcaaaaccaagactctaatttcttacttacctccaaaccccttctcctaaacctggtttctagataaaaaattagtatcttcactcatttccactttaaaattcttggccttttcaagaggatttgattagatacataatttaagaactgggaattccccataatgagtgagcacaatttaactcttgtctccttcaaaatagctaagtcaatatccacagaaacactcaccctggtcattgtatcgagatagatcggcctggctgatgtagaggtcatgatcactatctagttcccagaatttacaataaataacatagaagtgttcataggagaagtaatctgtgatttggtttatatcttcctcttcttccaaaagggctagagtctgaaatggtatgaataaaaggattattttattttaaaaatacggagacccagctttggccattattcagattctagtacatttttattctaaactgaattaaa

SEQ ID NO: 41285 - DNA, 3190 bp, Bovine  19866880620533
  misc_feature (1)..(1): n is a, c, g, or t
ntcaaactgatgtcatatacagtcatcgttactgcttgaaaaagtgttacatttatctgaaggttgtctatctttgagggcatctagttttcattaccatgccatcctgaaattgaatggtacagttaaatcaagcccagtgtatactctgtaatagagatgtatctattgatgtagtgttgaaagtgagaaagacaattatttcaaaattttctgtaaccagtttctatgtatatggaagtacacaaagcacatagttcattcaatgaaaggcagatgcaggttattacctacacttgaagattagctgtgggaagagatgggctctgagtcctttattctttcttttcagtatgttatgaaatattttaaatgttagcttttttaaataccagaattcctgcagacagaggccacttttatctgaagcatagaacccctgatattgcatccctcaaacagaagttaaaactatactggtaccttctggaccgcaaagggatctctctgttcatggtctaagtatttctccagattaaagaaagtgtcataaaagatgtgagccattctgcatctcttcaggtctcgtagagttattttgcctgtgtaagaacaaatctggtaaatttcaaaggcttttttcgaagtgaaaaaaaaacttttactgaagtttaaaaggatatatggatatgcttacttgattataaaaatttgatgttttttgaggtaaagttcacataaaattcaccactttaaccattctaatggtttttcacacattcacactgttgcacaagcatcaccactataacattccgtagcatttccttcacccccaaaggaaactctgtacccgtcaaacaggctcactcccctcccctctgcaatcctccccaactggctaccactaatctgctttctaaatttgccattaattgttagttctatgccaacaataaaggagaaacttaaatatttctgtatttagaaagcctgtatggaagactgggaagttaaataatttagaacaatccaggattacaacccccactctgttatgtagatggacaatgcaacttggctctttattcagtcttaccatcactggctggctttaccaggtcaagcatctggcacaacaaatcatggaatggcaagggctcaatgcccatggcttccatccgttcacactgctcctcgtagaagtattccagctcgtacatggagagcactccatccccatccacatccatacagcggaaccagtactcaatgctaggaggtaaggatactcattagcaatggcctgttaaagctcttttattcactcagatttattactgtttgcttcttttaaaagttatatatgggtatactttggacttagacatagttttacaaaatttattagaaacaatggcagtcatctttttaaattttgtcttccccagatccaggcattttcaacacttgcttattttgttttttatctttacatttcagttaagatgtctatattgttcctttcttgcatttctgatttaaggactgtggtttaattttgcactatgaaagatgaggtttcagttcttttgctactcattccaccttacccacatgccctttctaacctcagcatagacaaattactcaacattcagagtttataactttacattttccttttatctcttttatttgtttagttttgggatatagtacatgctactaattcaactaattcaaaggcttctgccagttttctatgtccataatcagccccattgggtattctagcaatttcatttccttgaaatcattttcagttccctctgacctactccaatctgggctggttgatctctaggcctgatttacagtttcaccctagggattcccttcacctttctcctgttccttatatctcacattttcctcattcttggtttgcttccttgtttggtataacacattcttcagtatcttcctaaacaagggagcatagcaggtacattttttggatgttagatcattgaaaataccctttatctaccccctaatgtggttggtatttatacagttatggcttgatggttctttccttcagaattttaaaggcactgactcattgtcctcaatttatccactgttgctgagaagtctaaagccactgatctttgactgcaaccctgtttgttgcctacagaggtttctgagttcctggtgttttaaaataaaactgatgaagtgccttggtctggaccaaattcacttttgctgggctaagagcctcctcagtttggaaactagtattcttaaattcttggacattttcttaaaattgttttgtttcttctctgcttctctttccccttatccactctatttctggaattcttgttattcaaatcagcatggtccaatatggtgaccactagccatatgtggataacccaatttgagatgtctttttttttttttataaatttgttttctgttaatttttgtttatttatttggctgtgctggatattagttgcagcatgtgggatctagttctctgaccagggactgaacccggtccccctgcattgggagtgcagaatcttagccactggaccaccaggaaaatccctgggaggtctttaagtgcaaatacagattctgaagactttgtaagaaaaaaacagtaaaacatcttatcaatagttttatactgattacatattggaaaaatattttagatatatggtattaaataagagatgtaagtaaaattaatcctgtgtttctttttactttcttactgtggttgctactgctgctgctgctaagttgcttcagtcatgtccgattctgtgtgaccccatagacggcagcccaccaggctcccccatccctgggattctccaggcaagaatactggagtgggttgccatttccttctccatcttactgtggttaattttacttaaaaaattaaaaaaaaaaaaacatatttaaagtaaaaattgtatgtatttaaggtatataacaaaataatgtgatatagacagtgaaacaatgactacagtaaagctacttaacatagcatctccccacaatattactattttgcaggatagtagggatgtagagtacctgaaatctaccctcttaaggaattttcagcatttaaaacaatattaaa

SEQ ID NO: 41286 - DNA, 1129 bp, Bovine  19866880696875
  misc_feature (1)..(1): n is a, c, g, or t
ntgatgctgggaaagattgagggcaggaggagaaggggacgacagaggatgagatggttggatggcatcattgactcaatggacatgagttcgggtaaattctgggagttggtgatggacagggaggcctggcgtgctgtggttcatggggtcacaaagagtcggacatgactgagggactgaaatgactgactgactagttcctaagcatgtctgacttttcgttagaaactaacctgaagctgtggcattccctgaggtgaactcgccttgtcagcttgtctgtctccttggtcccagatggagttggctgttctacctgcccctcagaacctctctgtgcaatcaaccaacatgaagcacgtcttgacatggagcccagtgactgtgcctgaagaaatagtacactattctgtcgagtaccaggggtgagcgtttgttgttgttgttgctgttgttttgtttttcagtttctctcctttaggcagtagttgattcctagaggcacagccctcattccagagctcaagaaggctttgtgagcccagagaaagatgatttcctatgatctgcctcctctgtcttcatgggccctaagagaattgaagcaacaagggaaattgtcccatggatttggcagtgaactctctgggaacacaaaagtatataaacacattttcgtgaagtttctttccaacagtgagtcagttgtctaaagccgaagaaaatcttaagatgaaatgagtttggctctgacttgaggaagagaaattatttggagactcagatattttaggggtcggtgagacctcagttttcctgacagtacacttgcccccaggagccaaaacaaattgtgaccctataggtcagctggtccttctccaggtgtccaggctctcagagctgtcaaggagtgacagggatgcagaaggtactcagtaaagctcactaacaattcatacaaaccaagcagctacatgcatagacattctcctaggctcaggggtacagaccacaaagtttccaggcagaagaagattacatttagaggaggagacagtaaaaacttaaagaaataagtacactaggtctgcactgtccaatgggagccactagacacggacag

SEQ ID NO: 41287 - DNA, 2221 bp, Bovine  19866880887600
  misc_feature (1)..(1): n is a, c, g, or t
natatagcttgccttgcctcagtaaaagtccagagatgctgacttggtaaaaagtgctaattaataacaaatcatatgtcaatataaaaatcaatcatataccaacacaatgatgttaaacaatgagatataaaagaaatgtttactttcccaagagtctgagaggcactcattattgttaaatagtgataaccttccagcataatgaggccatctatcatatgatgattttacccatattttctaatttttccataattcattttagaaaaaatagaacagaatcaatcaagatgctattaataaaattctgtacggttaatccctctttgttcaaattagcatttttaccttagaagcgagaaatatccattattaatctatttctaatgtagaaaattatgtaggtgagaaaaaagcaaaaaataaaaaagataagccaacattcaatttctaaagtactgtcagagactataacagcaaatgactgagtataatataactataaatctgaaaaatagatcctttgagaatagaattgtctttataataccaaagaacaaagtggtaaaacaaagggaatcctacttagttttgacctggaggagaaaaatattttttcatgaaaatttcatgaaactggagaaagaaaatatggccaatcccagattgtaaatccaccgaaatattacttatatatattaattccacaaactgtgttctaatatgtcttaactatttagctatctatttatctatgtaccttcacaacaaaggcacttaactatgaagattgttaatgaaaagtttactacaaagtaaagcttctttattgaagataaatcagacaaacaggagagtatgctttacaagtacaattaaaagaatagaaaaaataaggaaaatgtaatataaaatctaattgttaacagtctgtttcaatttaatagtaaaaagaatttcaaaaataaaagggaaagttcagtttatcaccaatggaaaatgaaactacttctacctggagaacagacaaacgtgaaaaactacaaaatgatgaaaaattttaataaaaatgtggcaaaatatacaattaaatgcaatgcataaacactaacaaattgggacacactattaattaataacaagaaaatggggtattggtaaacagattaaaagtactactgataagatcactctgatgacttatgaagttctaaaacttatcttgtctgtaccctagaaaacaactaacctgattgtctctcttctcagctaagatataagcaatgtcaaggagcattttattccaaagccgataatcatatctggccataactgccttgttaactgtccatgcacatagtctttgaagcagaggattaaatgttcctgcccattttatctagtccccaagactcgtcctgcaaagtgaataaaaacgattatctttaaatctatccctcatacatatactataaaagaaaaaaaaggggaagggagaaccagagaagagattaaagatgaaaagaaaataatccttgaaaagatggaaattattatccagcctggaattaaattctcagcaagatttccacactttgttgaagggtaggactggtgtctcactttttatgaaactgaactttggaagacacgatcattaatgtacgaagagaaattactgtagtattctgaagtaaatttgagaataacttgaaaaataggttagcttttgaaaaataaggatacacataacattgatctcctatttttcctggtacaatgcatctgaaaaacagccaaataaatggaaattgctgtacacagacagaagaatgatagatgaaaagtaaatagaaaatataacgaaaagaaaaaagtacatataaagggcagaaaataataaaagtcatgaaattagaaaatatatatagtatcaggtaactttttaagtaataagtagtatatttatagtaccttgtcaaaaaagctacaacttggtacaaagtctctcacaacacagaataaaatgtgcttgatgtttgttctatcagaaaattttttcaacaataaactgtgattttacctttataaaaaagataaaattaagtaaaagatctgcctctttacctaataaataggaaagggatactcttaaatctcatttttgtaatggtaatgtgtataaattgaatatagtcagttattgctactaaaaggg

SEQ ID NO: 41288 - DNA, 1310 bp, Bovine  19866880899222
  misc_feature (1)..(1): n is a, c, g, or t
nacctttattacagatttgtaggatttgctatgtatgattaaaaatattttcctataatctgtcattggttttttaattttgttcagagtgttggttgatgtataaagctgtttaagtctatattgtggcttctctcctggaggacttccctactccagtatataaaaatatccttttatattctttcaaacttttaattttatatatatatatataatccacctagtagttattttggctacatgttcagtagggctatttatagccatttctccaaatacatagtcaatggacccatcacctattaaaaaggaggtgatcctttccccactgacctttatcaaaggctaaatatatacatacatacatacatacatacatacatacatacatacatacctatagccactactacccctcatctctactttaatactaggcatttattaggaatcttccttaggaaatacatgtgacatattttcttatttggatactactgttgccccttttattattaaatacttttgaaatgtatttttatatttgttctttaaaaatgatcacttttaaaatatccaatttggcatttcatttggtctaagagtagatcaccttaggatttcacccatttgaaatgtaaactataggactgtcttcctaaagaaaagacacataacacatctttgtaccagaaagtatccatagtaatgtattaatataatgatctaatttaaatgaggtaagataactagcatataataataagcacatgccaatactcaatagtattaattctactcatttcttttccttcaaatttcttacctgctgtaaactgagaatgagggtcttggcacactgaattttatcaatttgcctagttttactcaatgtttccttaataatatcaccatagtcattgtaatactgtaaggaaaagaaatacagctttaaaactgttgacatttcatgagataaagaacaggctggtgaaaaaaacggaaaggtgagtaaagacatgtttaatttttcatgttaaaaacctaatgagagttaaaagatattgtctaatgttaaatatatacacattggacatttaaaattatgaaataaataataaaactagataactaggaaattcaaagaggagaagtgatatatgtgagcaaaattactcattctttacaacatggattcaacagacaccacttgtccagatcaagaaacagaactctgacagaaacatcttgaagaactaaaacctaaacagtcaaaattgcttacttctggggagagggcctaaaca

SEQ ID NO: 41289 - DNA, 2289 bp, Bovine  19866881067424
  misc_feature (1)..(1): n is a, c, g, or t
ncttgaccctttgcatttcccatattttacaactttgagatataattgatatatggtgaactgtacacatttaagttgtgtaattaagagttttttgatgtatgtttatagccatgaagctatgaccacaattaagataatgaacatagccattacttcccaaagtgtcttcttgtatcattgtaattcattctttcctacctcccagccctgtcctcaggttcatctgctttttatcacactagattaatttgcatttttttataatattatgttgatataaacagaatcatacaaaatgacattttacaaaataatattttgtatgtacaaaatatgtacaaaaagtatgtactttttttttcattcacagttttctaaaaaactgagtctttgttgctgtgcatgagctttctctagttgcgacaagcagggcctattctagctgtgggtgcatgcttctcattgtggtggcttctcttgttgcggagcgtgggttctatgcatgtgggtttcagtagttgcggtcctcgggcgtagttgcaggactaatcttccgggaccagggattgaacctgtgtcgcctgcgttggcaggtggactcttcaccactggaccactagggaggtccactgtgtactctctttttgtttgttttgtgacatggggctggtttcattcacttaggataattattttgagattcacttgttgatggaattgggctgttactaatttttggctgttacaagtcatgctcttatgaacatatgtttgagtccatgtgtagagtggagaagagagacctctcctagctaggccattctagcaagattccaaacacagagccataaaataaagattgatacacacaggtaataatctaagcactgatgtcctttacataaaaacatctatccagtaagaaaataggcaaagaacatgaacagtgagttgacagaaaattgtaagatatttattgcaagattgcttgctatagcaaaactctggaaacaatctaaaagaccatcagtaggtgacagcagtaaatatgtgatacgtattttactatcctcatgtggaatgatcatcaggaagttccagaacagtgtgtggggcactgtgctagagagaaaataagaaggaaaaaatatataaatgctcccatatgcatggatgtcagagaaactgacagcagttgcctttggggatggaaattggaggcctggaaataagggctggcacgtagacttacattccactgtatcccctattctggttaaatattttataatatgtctttattatctttaagttagaaactagaaaccaaagcctatcagtgtctcagaacaccaaacattgattattatcattatctccagatggcttcacttaaagtgactggttcattttaggcgagctgcagaccagtgcctttcttcatctgtaaataaggtgataatagtacctaggctttaatgacagagtctggtgaagtgcttagaaaagtccttagtgcatagcaaggtctgcaccagggccgcttgttagggtgtggccctacagatgagtgaccctgaaatgttagctatactacaggtcattctgctgagagagaaccaggcaacaaagattttttgatggcaaggcagggaaaacatggctctttactttggttaggcatctgtgagcgtatcctaacctggttctgccaccatgtcaccaccttctctgagactgaactttctggaattctctggtttcaggacacctcctacttattcatcactggccctgacgttgtgaagtctgtcaccaatgaggacgttactcaggaggaactcgggggtgccaggacccacaccaccatgtcaggtgaggggccttgaggctcacctcactgtcgtcagacacggagaggaggcgttgctagagctgacagtctgttacaaatatcgctttatcgacagagtttatttgaatagactgtagtgtgatgtattatctacagatagtaataaatgtggatttatatctcaaactcgttaactaatggggtacttctaatgcttttctagtctttgaaaatgttgaactaactagaatgatggctgtaagaattatgattcatgtgcatatagttgaacttaaaaaattgcatttttgatgtgactttttaaaaagaaaataattatttggctatgctgagtcttagttgaggcaagcgaggatctttagttgtggcatggtgggatctagttccctgatcagggattgaatccaggc

SEQ ID NO: 41290 - DNA, 1729 bp, Bovine  19866881121438
  misc_feature (1)..(1): n is a, c, g, or t
ncaaatgtattaaggctagttctgcagattcctgggatggaagtataatagctagaatgaacagaaataatgactggcacatgtgtggtctgacaaaggatttgtaggcagttttaggatgtctgcgagttatggtttgattccagtttggggattctgactttacaggggcaaagggatagaatattcaattcagggcttgtcaggaaatctaagatacatggtagctataagcacagaataaaatgttaactagtcctcttagtttgaagtctatattgctgtagaaataggagtagatgaattttacccttatacttttaagaacagatatcctaagatatccctggtggctcagacagtaaagtgtctgcctgcagtgtgggagacccgggtttgatccctgggttgggaagatcccctggagaaggaaatggcaacccactccagtattcttgcctggagaatcccatggatggaggagccggatagattatagtccacggggtcgcaaagagttggacacgactgagcgacttcactcactcatcctaagccatttacataaaatgaattatcggaaatactttagaagttggatatttggttcaaagaatttccttattgacccattcaatcacttcaaatttggtaaagtttcctaatacgtaccatttacttttctatcttagaaagttgatcctatttattttttgatggctaaggatctcttgcagttccaggtcatgagccatcagtaattcttattttggctgtagatataaaatttttggattaaatatattctaattttgaacttgaaggaagggacagagtttatttttattaccagccacaatgcctggcataaattaccagtgcatatctactgaaataaaatttatttaattttaaacttctctggtcttctgactaacctacagtgtcgtactttccagtactaattgaactaaatgtacatctcataaatagtaattcaatatatgtttatatttaacataaaggagaaattcacctttaaaaacatccagtgggaaataattctaaattatctaaatgtccgaaggtagggaatatggatgtgttattgcttgagagagtactctgaagcattaaaagtcatgtttttgaacacactagtaacattaagcatcaaaaagaaatacaccaaagtatacataatggttatctctggatgactgaactgaggatgattttaatctttttatatttttcaatttttcttcagcaaagcctgtctttctctactaatcagataaagactcagaaaattgtgtttaatctaggttaatcaaatgtaaagctgttggtgaaataccagaatatcctgtaagaatgtatttttaggataatgtgaaagactcaactaaaaatctgaagtaatcaagtttttgtcagataggtagagaagtttgtttctaattattacaggtcccagtttctcaagatagcaacatggaggaccctttagcctacttttcacaattcttgtggcgttttaaactttattgcaaaaaccataagaaagttaattataaattaattgggtgtcatataacttgttatcttcatgtatgtgacatgtttagttggccagaggtatgtaactgttacctgtttctggcttcccctatgaccttggctgaatttatacaaatgctgttgtatgctcttatcacactgtgtg

SEQ ID NO: 41291 - DNA, 704 bp, Bovine  19866881144393
  misc_feature (1)..(1): n is a, c, g, or t
nttaaaaatagagcttggtgtataagagaatccaggcaggactcttgtagctccagtttctatgcagtaaagatttcctcaccttcacgaaactattattggtcatccattttcccctttgtttcactcttcctgcctcattcactgttccttactgccagtatccattcctgtcttgtatctcattccctcaaaaggttttatatcttgtggttgttgattctgctatgcctaatttcagtaattactgtttttgataagtgaaaacaaaaattgtctgggtggatgccgtggacttaatagcagatgtatggatggctacctgttaagtagaaagaatactaagattgggaatcaatagactaagcttctgtttctgtttgtaactagctatgtaattgtatggaagtccatcttggttaaaatgagactgtggaacaagttgatttccaaggtcattcccaactctaatgtgctttttatgattcattgaacatttattaggtgctggcttatgtgccaacactggcttaaagacacagagataaattaagtttctggccttgagtaagtggagaaggcaatggcaacccactctagtactcttgcctggaaaatcccatggacggaggagcctggtaggctgcagtccacggggtcgctaagagtcggacacgactgagcagcttcactttcacttttca

SEQ ID NO: 41292 - DNA, 1214 bp, Bovine  19866881311348
  misc_feature (1)..(1): n is a, c, g, or t
ntgttgtgaagttatatttcaaaaccttacattgtaaaagataaaaaatagctatgtagccacaaagctaaatttctgtgtagctttcagaggtaacagaataccctggaaagatacagaaattgtcagaaaatctggttcttaagagtttttgtaaggtacttaaaaacttttttatcattcagttttcaattatgaaatgaggatgcacagtgtttttagatatatgtctcccacaacattttctcactgataagagtgacgagaatattttgttaaaactttccttgaaaagtctaacatttgttactttaaaaaattgataattggcaaaactaatacaattatgtaaagtttaaaaataaaataaaatttaaaaaaaattggtcaaataatagttgtttttggtaagtttcagtaaaccagattgtgtataacagtgtctatttagctcacttacttgtggagtgtggcaactgcttctcgtgtcttgatctggtccaatccgaatgtaagggcaaagcgacgtgccaattctttaatgccactgacatgggcagatgtcctatctaggttgggcccttgctcttgaacaagttcattaaacaactggtagaaagaaaaaaagaggaaaaagttcatagctaagaaatatttatttattgttagaataggtaatacaatttaaaaaatatttaaaagccatatggtaagatacgtatttcccttcttgtattaacagtagccacactttccccttctccaagtcatctactattatctactatttctcaagctcattttcatgctagttgtgtgattacatgcaaaccagaatttatttttctaccaaaaggaacatattttgggttggggaaaatgtttacaaaaatatactatgtattctttttgttgttttcacaggaatggcaatatgcagggttcagaactttgtttctcactcattacatcttagacaagaacattatgtaaaagaagatcattaagatatatgaaatgttttttcccatccaatgacaaaatacacaaaaaatgttctaaaactgagtgatgggattttataatcacatacacattacgtgtattgcatcaaaataacagaatcaaaactctggaatactaaagaatataaaagccatcgtcattccgccaccaaagttagacactttacatgtatctgcgtcctcttttat

SEQ ID NO: 41293 - DNA, 757 bp, Bovine  19866881404544
  misc_feature (1)..(1): n is a, c, g, or t
ntcttgccggtaccccttcccactggaggatgtgcctcagcagcttgacgaattgtacaaaccatgagctctataagagcactctcctgacggtcggacattgctaaagtcaaacaaaacacattagcataagtagatagttttataatagccacatatcaaaaatgcacacaatataaaaaaaaacctgcacactattacttaaagactaaggttaagttctattctttgtcctttttatcttttcaataatatgtatctgtcataagtcaaataagaaagagatacacaaagtaaagaaaaaaaggacaacctctggtttcttctaatacctaatctctcgtaatatcatacttctgaattgggcaatgccaaaattttccgtctatatcatttcaaagtttacatatatttttctttttttagtaaaaaaaaaattaatagattctgagtatctttcaagtgatatgacgtatatgaataattaccttaaataattacaagttattacatagtttgtgtttcacagtttatccaacctgctctattaacattcactcaaattttccccaaattcttgtcacatttataaaaaattcaataacaagtatcataaatacacacattatgtaactaacacttctatttcagcagaataaatgtcaagagagggaataatgagtcaaaggttaaaatcttggtactgacaaatcaataagggtacttactgcaatccacacctccaactgcaatgatg

SEQ ID NO: 41294 - DNA, 1863 bp, Bovine  19866881461236
  misc_feature (1)..(1): n is a, c, g, or t
ncttaagacggcttccagctaaagtctgggtgggacgaaggcagtcctttgagtttgatgctgccagcattgtcagcctacaccgattcctgtgtgccttcatttcacccaggcctgctcatcctctggccaccccagacagcaggcactgcaggggccagccttcctcatccagctctcagagcttctccaaagtctaactcgaaggcccaggctgcaagtctcaccttggcaccgggctcccttctccagtaggacacgaagaactcaaaatggggccccagatcttccagcttaataagcaggtggaagccgtccatggtaatctccatcccaggcggggtgaggatggctgttggcaagacaaggggagagtcaaagccagtcccagacaggactgatttctgtccagggagaccatgaccaaaccatcagtggaaacacgccaggctcatgggaggggaggggttttgatgcggcttcatggcatgcagaagcaagactgtactcagcaggtgctcagcaaactctttgtgaatgacgcgcaaatgaaaaaaacaaacaacagccatgtagtacaattcacatagatcagtgacatataccgtctgctgctaactttcaaacatcagcagatcagcagcttgtggatgggttggcctttctagtcccagtccaaggagtcttcatctcatagcgttatggaaagtcagagggttttacaaattccaagaatcagctctagtaattacagcctaagcacaaacaccatctttcatgttattggatccaaaacagagagaccccgcaggccccatggatactttccacttagtagaccaggaaccaaagagcccacacagacagtcttcagtccctgcctactgatgatggatccagaccttcctctcagatccagacactgcaagaccggaagggccaccctaattgtgggctgtggcttgggagtgtgttctggctaaatcctcctgcaccggggtcagtggacactcaacagaaaggcagttcctgcagggagttttcagagaacaaagtatttcctggcatctaaagagctgcttggaaagaggacaggaggacttgggaagtcaggggccaactgtgcaaaacatacccagattagaggtttcatatgagcacacagcaccactagaattgcctctgaaacacctccagtaagaaaggagatgtttgactcctccacttttaagttaaacatgattagaattggatcccctgatctccatctatgtagagaatagaattagacaaaatgaccacatgtcatttccgttcagatgattttctgacaacgttggggcaggaacttctctcctatgtactctacatactcatctcatttaatccaaccagcaagcttcagaaagtaaatattactcctacttacagatgacatagcagagcctcagagaggttacatgacattcccagagtcacccagtgaatggccagactttaagctcatgtcttcccacgtttctagactctgttgtgtggggtgatttttaactcccaaggaacaggatgcacttagatcacttaaatcagactctagggatgggtcccggagatcaggggttctcaagctctcctgtgacttgaatttgcattgaggttaagaacctctgctctcaacaggcttccctttaagaactggggatcctttccaagacagccttaaaaccagatttttcatgtatgaggagaagctggggtgggggttttacaaaggccaaaaagcagacgtcatgccctgaggagtctcagtttcctcccagctctgcagctgggtccaccctgcatgaggaccctcatcctctg

SEQ ID NO: 41295 - DNA, 915 bp, Bovine  19866882031376
  misc_feature (1)..(1): n is a, c, g, or t
naaggaataatgcttacaagtaaaattgagtgattactaccaagttgtattgatgcctgcagagaaatcatgagagttgaaaggccattaacaacaagtaatttttggttaagcaagaagccataggcctttggaatagcttacaaagagacttttatgtccatcaggggtagggaatacacagctgagttgcaggatgaagacctaattgttagagtagcagagctccagagacgttggaatgctcagctaaagcaggtctgcagtggcctccaagggcactgaagtacttgatagaggcagcaagttacagtgtagagtttggtggatggggtgcccatctgatttaacacatacaagacacagtgtatgtgtgtgttaaagcagagatctctacatggtgctatgtcctcgttaggaaggatacatgggtctaggaaccaagagatagaagcagaagtgacctcacttgctatcagacccaatgtcccaccaagaagttccgtgcttcctggacccaccacacttttttttttttttaagttacttggctgtgcctggtcttagttgtggcacatgggatctttatcatgtgggctcttatttgtagcatgtgggatctagtgccctgaccagggattgaacccaaggccccttgcattggtagtgcagagtcttaacactggattaccagggaagtccctagacccacaactcttaactctgcaggttagacatccaagtccccaaacagggcacacttttgccagaagatataatgaggacccctttgaactacaagctgaagcttctgccatggctctttgagttctgtgcgtccaggaccacaggtgagaggaatcactatccagaaagggtaattgactctgtttagctgggtggggggtgaggtgg

SEQ ID NO: 41296 - DNA, 1809 bp, Bovine  19866880624917
  misc_feature (1)..(1): n is a, c, g, or t
ntgtttatatcttaaaaaacaaaccttgattttgtcaggaccaatcaagcctaacaaaatgaggaattcatggtggtcttttctaaagaagtttttggaatttggaattttcttgaaaatagaaatgaagtgccatgtttctaccatcatttcttttcttctcaatgtattttgcttaaatatcagcagcagcgtgtctgtgaaaatataattatcaccagctcgatcatatagtagctgtcaaaattttctgtgtccactaaatagatttttctatctttcttgtcttaatttaaatatgacctcatttaatttccttagctggaaatactgacaagaataaaaaaggaaggaaggaagggaagaaggaagcaagaaaggagaagaaatgacttcgtttcttctatcaaatgaccaagagaaaaactgtattttcacatacaaaaataacaaaattctcctgtacatccttaagctaagatagccactggatcttttgattattttatataattagacaatatgtgtgctcagtggttcagtcgtatccgactctctgcgaccctgtggactgtaacccaccaggctcctctgtccatggaattctccaggcgagtactggagtaggtttctgtttcctaccctggggattagacaataccaataagttaaaatagaaacaacttagttgtagtttcattgcttttcattatagaaatgctgcctgagaggaaatctggaatacagaaaaactaaacatattattcaacagggatcgagattgtaccatgtatcagtcattgtcaaatgctaagaatacaaaggagagagcttctttgcccttgaggaattcacattttctggggaaaatagagataagaaactttttttaaaaaaatgtaatttctataaacttccagaaagttgtgtcagaaacaaatgattgatatattttggtgtaggcttttttttttttttggtgtaggcttgtactgtgataataagtggaatttttcaggtgaggaggaaaagtgtatttcacatagaatcagggaaacctgcttggggaataaatgtgacagttacacaacgtcatataaatggtataaactctgtagtcatttgttcctgcgttcttcatttgaaataatgcttttggcattcatccatattattacatgtatcattaattcacttttcattgccagggaccattttattaatattgtatggatataccacaacctgtacgttcattcactagttgatggacgtttagcgaggctttttgtgaatgcatgttttcagtttttgtctttcaatttctagcaatggagtttcagggttgaatgctaagtgtaggtttaactgtaaaaaattgccaaacatgtttctaaagtggttgtagcattttcattcccactaacaatgtcaaagagcatgattgttagattatataaaaatgtgtttagttttgtaagacactgccaagctgtcttccaaagtggctataacattttgctcttgcagtgggaataaatgagaattcctgtcattccactttctcaccagcatttggagctctcagtgttccagattttggccattctaataggtgcaatagtagtatcccattggtggtgctagtggtaaagaatctgcctgctaatggtgagatgcaggagattcagtttctctctctgggtcaggaagatcccctggaggaggaaatggcaacccactctagtattcttgcctggagaatcccatggacccaggcagttgcagagtcagacatgactgagcaca

SEQ ID NO: 41297 - DNA, 1858 bp, Bovine  19866880888731
  misc_feature (1)..(1): n is a, c, g, or t
ncaaccagctccaaccagctccaacacaactttggtgaagataaccaaccccctcggagtggctggggtctcacgcaagatactgggtggtggcaggggtacgattaggaagttggcaggatgcacaacagtgaagacatttcactgtagtgcatgtgatagcaaagagaatgaatctgggctaagcagagaatgttcatgttttttcagaaaggaagaatttaaatttagaattgtttggctgagaacacgaggagcccattgctgataaggacacagacttggtctagggacttatgatattaaaaaagagacaaaagccctaccttactaattaagatagatttgatggcagaaacacttgttattttccttagttgagagagaaaacaaataatagtcatattctctatctttgtgaattcatagaaattttcctgcagaaatatgtctgaaagtgattttgactatgaaagctgaaaaagaaattcattgctcatttacctgcctttgtttctagaataagatgtgatatatgtgcatgtgtatatatgcatatacatgtatagttcattaatatatggatatctgacaaagcaccatgtgatatattgatgcatctaactttacatttaccaaatgtctgctagcccactgtttccaatatttaccttctggaaacttgcaggttgtaaagtgaataaaaattagttgtatattggtgctcatcagacattaatggaaaaggaaatggcagcacactccagtattcttacctggaaaatcacacagacagaggagctgggtgggccacagtccatggggttgcaaagagcctgatgctggtgagcgtctgaggacagcgcatgtaagtgtattgttgattcctttgctgtacagcggaaactaacataacgttgtaaagcaactactctaataaaaatttaaaaataaagactgtagttttatatgaagagttacttctcaatctgttacagtagctgggtctcagtttccacatcttctcccatgttagagcttttgaaaagctgaggcaccacatgtaagaagatctaaatgaatggtctcacaggggtgtacatggggctgttgtctttagatcacaacttccacaaatgatttttaaatatttaattaatgacctcatgtaatgtgatatatcaaaaagtggataatcatatacatttttaaattgttgaaaatttttattttatttgaattcaaatatgaatactacatgtttttttttttttcttttcctcttttgcattcaattttggaccttagtattttggttacagaccttaacattttccattttcccatgtaaataataaattaaagagtgttatagacaaacatatcactaatgaataaagtgttattgtaaatgaaaaagaatcagccagctcaattttaacatcatttcttaaagccttgtttcaaatctcattcaagtgctttcttgtcgttaacaataacagaagccagcaaaacaaaatgtgttcactgggttgatatttagacaaaattgaagactgtgtacttctgatatccatcttgtttgacccagataagacaaaagtgggggaaggggctcaagatggtctcattttgtccacaatcagaagtctttctgattcagtatgtggtctgaaaataatgggccagatgctcatctcgtgggaatcttcccatcagtctgttcagttcagtcgctcagtcgtgtctgactctttgggaccccgtggactgtatcgcgccaggcttccctgtccatcaccaactcctggagctgttcagactcatgtccatcaactcggggccatccaaccat

SEQ ID NO: 41298 - DNA, 997 bp, Bovine  19866881327661
  misc_feature (1)..(1): n is a, c, g, or t
nccccaataaattaaaacttttcaaaataactgaaatgttatcatgagatactacaacacagttctaaaaagaaaaaggacatgtttttgaatgccgtgtgtgattggttcagcaagtgtgccaagcattgggtcagcactgtgctcaaaccagtacctgctcacgagatgatcatactcttaagagtacgatgtgaaggggtaagcgttatacttaatcctgaagccagtgactgagggaccagacaggagagaacagtattactcttgagagagattagcattagtgaactacaggttggggggggtgcagtattccaacagtggaatgttttataatccccaagtttacctgtggcagtaaaagccagtgtcagtgaaaggacatagacattttcacatgtatgccttgcaacagtcacatctcattattgtctggcaaaagctttgctacatttttcatggcatcctaaggacgtgtctaattcttctacattgtatgtttttaaattctctgggctatcttttcaggaaaacaaatccctgagcgtgccgttttcagtcagtattaaacatggtggcatttcttcaaatatactttctaactttgtaggacgcatggagaatgtactgaaaacaactcgaagtcgaaatagaaacccagagataccgtcgattgaattagttctttccccgtgacaaacatgtattgcatttctttgtcagagatggcagtttttcttctgagccatcgcttaacttcccaggaacattgctataggatggctcaggaatgtgtgatatggcagaggtgggtcaatgacaaattatggggtttccaaagaaactcttcgcaatcagtaggtcatgttgcaggaaggcagtgctgtcccacttcagagaaaaattcccatctgtgcctgtggggttgtcctgatggacgcagagagcattttatggtcttcctttttcccctgcagaacagaaagggtcattt

SEQ ID NO: 41299 - DNA, 1225 bp, Bovine  19866881406366
  misc_feature (1)..(1): n is a, c, g, or t
nttctcccccagaaggctttcatttattttattttttaaagttggttcaagagattacgcagtacatttgtatcattccattcctaatctcagctccagaataaaggttcttccatctctcacatacatatctggattctcatgctcctcccgcatcagggaaaagtcaggtgtctctcgtgaaatgtgcttggcaggttactgaacattggcagaggacggcaatatagataaatacacacacacacaccccggctggaaagcatctttctccatccaactctgtcggtgagaatattctcctacacgtctcagcccacatcaccttctctaggcccttttattcccctgaagaacagtctgggatcttccaaacggatgtgtgactttctcagcaaagaaaaagaaaacagtcaaataaaataatgttaaaagtctggtagcaccagctcctccatagctccgcatgcacacacacagtgaatggacgcatgattatttacaccactttacagtggaactctggctgtttcatgggtctctgctggtgcccaggcccagtacatgtgaaatctagaagctgaaagaaaattaaaacctaggtgtgcaaaggagccagaaggaattgttgcctttccctggattagaactggaggacatttccttctgtgatttgctcttgccacaacagggctgcgaagagtctccctgacatggggccagtagaggaggggagagagaaggtgaaagaaaaatggacagccataaaaagatttataatttacttctgagataaatcagcaaagggaggtccaaactgccacgtgctctgaggccctgggctcctgccctgactaatgcgctgcagcccattttgatctacgctgaaattaacaatcagccagccactttatgaaatattatctttgttagctttaccactaacaaaaatacacttccaatttttcacatgcacacactacatctattaaagcaatctgggaaattagtttgagataaactgtacagcaattttattcatagcttccccatatctcacactgttaatctgcatcacagctcactaaatagtgcctaatgtttattgcatttaactgaatgtatacaattctgagggtacgccagggaccgattatcataattatacatgtttctatggaaacccacaagtctatcagtttgattcattatattgttatacctt

SEQ ID NO: 41300 - DNA, 1583 bp, Bovine  19866880413898
  misc_feature (1)..(1): n is a, c, g, or t
nctccgggcttggtatcgggtgttcactccgtgatggcgttgttctgctcttttggcaggcagctcatttgcagaagctcgtcctgacgcccctgtcagccctgctgtccctgttcccagggcctcagaagctaatccagaaacgctatgacaaactgctggactataacagctacttgcagcgggcggcggcggatgagtcagacttggccaaaagggaatatgaggccctcaatgcccaactggtggaagagctccaggtgttcaatctggccgcgcggaagatcctcctcaattgtctgtgcagtttcgtcaccctgctcagggacctgatgatcgtggcccagcgggttcacaccaccacggtgccggtaagcacagcagcacgatctgttagaaaccacgccgtgcaaaacagcctgctcatagcgtgcttgagtgtggtgtgcatgtgtgtggtgtccgttttaactgaagccaggcagagagtgttctgctccttatccctcttccccacaggaagctaaaagcaagtttcctagtgcaggtttactgtgacttacacacacggagttctttttggagattccttttcaaacaccgaacatctttcagcttggctctctttgttggcagagccgaagtagctccatctgcctgatgcgatcttgaagcttatcaatttatattttgtgttatcttcctattcaacagtttctaaatgttaaccacgactaagacatggatccaaaaataaggccatctcagtgtagtgacagaaataggatatccgtcaaaccagtctttgttttgcttttgtgtttctctgaggaatagaagcctgatgtgtgtgtgtgtatgtgtgtgtgtgtgtgtgagagagagaaatatgtgcatatatatgtgcatatatctaaaacagggcttcttggtggctcagcagtaaagaagccgcctgcagtgcagatgtgggttccacccctgggtcaggaagatctcctggaggagtaaatggtgatcaatccactcccatattcttgtggggaaaatcccatggtcaggggaccctggtgggttacagtccatgggatcacaaagcctcggacatgacggaagcgactgagcatgcatgtgtatataaaacatagatatagtagtacgaaaaatatatatctatacctatatagcttaactttccattagggtataattttataatcattttctgaagaagaagaaagatatttacaccctaatatcaacttaaaaaaaattagctttgttacctggcctttcaagtgtattacttatctttcagctggttagatatctaatggacatttggagaaaaatatattgtataattaacttttaacttatcctctgaattaagttggataaataggtgctacatttacttggctcaagagaaaaagctatataaaaatgtataagcagcctcacacccattctgactccaaaccacctcatctcctgctctcacccccattgatattagtttatttttattgtgccattaaaagtctaataaatgcaaatatgtgttttatttcttacacaaa

SEQ ID NO: 41301 - DNA, 1615 bp, Bovine  19866880763395
  misc_feature (1)..(1): n is a, c, g, or t
nccaaggagcatgcgtcttttaatttcatggctgaagtcactgtctgcaataattttggagcccaagaaaataaaatttgtcactatttccacttttaatatttgccatgaagtgatatgaccagataccatgatgttcatttttttttttttaaatgttaagttttcagccagggttttcactctcctctttcaccctcatccagaggctcttttgttcctcttcactttctgccattagagtggtatcatctgcatatctgaggttactgatatttctaccagcgatcttgattccagtttgtgattcatccaccctggcattttgcacgatgtactctgcatgtaagttaaataagcggggtggcaatatacagctttgttgtaatcctttcccaattttgaaacagtcagttgttccatgtcaagttctaactgttgcttcttaactcacagaagaaactgatgttgaaagcataaaaaagaagcggcaattgttggccttcatttcccggaattcttccaggtctgtctcttattctatatcctgttcccaatttcccttcatttcttgactccttttcttctgatccttagatgaacttgctgtctctctctcacccttaattttgccagccttgttttggacaagtaattctgtttttcgtcttttaagcttctccatgacttgactattgatgacttagttatccacctattcctcatgtacaaaaaaaaccataaataaaagacatctgctccttttccctgtggcagccgagtggagcctgaaccaagatgctgtttgattatgaaatgagacctggtttaaaatcatcaaaaagattttgagtaggatccagcaaaatctggcacatagctcatcatgctcttcctggataggttaggatcatgggccatcccttactaatcacacaatgcctttgacagagattggcctccattgcaattcttagtacataaaaggacttcagaaattatttagtaaaagaatgaataaattattataagcaccagctataacatctagaacccattacactggtttttgagggtgtgtgtgcgtgtgtgtgtgcttaatcactcagttgtgtcccactctttgcaaccccaaggaccgtagcctgccgggctcctctgtctatagaaatttccaggcgagaatactggagtgtgttgtcatttctttctccaaggggatcttctgaattcagggatcaaacctgcatctcctgcattggcaggcagattctttaccacaagcgccacctgggaagcacttttgaaggtgtgcatgaatttttaaaatatgatgaatctttaattagtagaacatatttggtggagatttccatttacatttcttttaaggaaagaaagcaggaaacaactcagcacatctacttgtcatcactttcagaacatctgtggttttaaaacaactttgaaaatagtcacttgcctagagtataaggtctgacttctgctgtataagcagtaaaatgttctaaattcatatgtactcatacataccctcatagagggcaattaataaaataccaattatggaccccatatcttcttcacacactga

SEQ ID NO: 41302 - DNA, 1207 bp, Bovine  19866880781381
  misc_feature (1)..(1): n is a, c, g, or t
naatttacatgtctgttttcccacttgacaataagctcttggcaggtaggcagcacatcttgttcactgttatatcactgaatgagagaataaacatattgaagtgagaataatgcggtgaactatcaccacgtaagttcaattttaagttacagcattaggctgagagagcagagcctgggaaatgccaccactagtgtgaaacaaggatgaccagatgtgtcattattattacatctttaatggatgttgttgcaatggtatttctattcccttctgatccttctgtgatctgaggatctcctgggcagaccttcataatcgtgccatttgactctggttatggtcatgtgctgattaagctgcccctcaagaatatgaaattgaaacgcaaatgacacatcagtatctcaagcaccaccacaacctatgacagtttagaaacttcagattaaccattcggcaatggaaaatgagactaggaagccttcacttctaaagctttaaaaaaaaacatttctgagaaagcgtcttgcctaggttagttttcaatcacttcaaatcgtctggtaagctactcccaaacctttgcatttacagcacaaccctttcatgagcaaagcagttcaaaaggtggggcctacaatttagtgctaaggtcaacaaagctatgcttttgaatggtatgtattatccccagatctgtaccctccatgtcaggcagcaagtctaaaaagaccaaaagtagaaatatatgccagcaaataaaataattattatcaccaagaatgaacaattctacagtaaatttattaaacttcagtgcttttctttccccctaaaaatatatggcatgtaatgaagtgctcttgtttggtaagcagccgtcttggagagcactctcatttgctagagttgtatgaaacttgccttttcatgaaatagtttaaagcaaaatgttttactcattccaaattgtatgtatgaagtttcattttgagttttagtttcattagaaaatctgtgagtttgtaactgacttaaattaaatctactaaaccccaccctctacagccctattcaataaaaggggagttatttcgataaatttcagattaaaaaaataatttgctttttatgtaaatgtaagtctatgtcttcttatctaagactttgctccattaaacccacacccacacccacccac

SEQ ID NO: 41303 - DNA, 1749 bp, Bovine  19866880888823
  misc_feature (1)..(1): n is a, c, g, or t
nccacaaatactgagcccgtgtgcccaaatctgagcctgtgctctggagcccaggaactgcaactactgaagcccatgcaccctaaagcctgtgccccacaacaaaaggagccaccacaatgagaggcctgagcacctcagctagagaggagcccctgctcgctgcagctagagagggcccaagcaacagaagacgtagcgcagccaaaaataaacaaaattattttataaaaagagagagaaaaggtctatgtttaaagttggcttgcttcccatcctgatatcagtaactaacaacttatcaaagcaacggtttaaaacagtcttcatccaagtgtggtcatggaccagggctaagctgcaagttgactgttaccaacttgttaccggctcctttagaaacatttataacaatttgaccaagtaatttttatgactgtcagacctattaataagtatttggaacttgaattaagtttttctaatagttcattttgattgtaattttttaaagtatcaatatcagttcacaaaagattagaaataaaccaaaaaactatcttttaccacagatcatttgagaagcagtgattaaatatagttattctcaactatgccacacagtaaaatcacctggagagctggaattgatttttttttttttttaagagatttctagagcccccatctcctacatatttgaattcagtggttctgtggtgaagccagggcattgcttatttctaaaagctctctaagcaattttaatatgcagccagagttgagaacctctggtttaaagcactgctaaacaatatctggggttttcttagtgaaacaggaatgctgttaacttaaagaatgccatttacacaattaaatataaatcaagccaaagaaataatgatggtttttaagttcttctagatgagactgaagtttaccacgacaaaactgcacactcataatgagataaagaacaaagttgagaatgcactctcaacaactgctcctgagaaatatgcctcatatctatcttagcagccttatatacaggcctgccgttatgtttcattttctatgctctttcatgaggtaccccagcacctgtttaaatatgtctgaagtagctgttaaaaagaaaaacctaagtaaacggcagatgttcacataatttattcatccctgaaagtctggctataagagaagaaatgcatgcagatgaatactcagaggtgacagagaagacaaagctggtgccaatccttttacagaatgacacccaccaaaacctctcacagagacttgaattacgccaggagaacaatggatcaggtttgaattttaagcctgcaaactacactcttcctcatcatttgctcctgatctctaggagtgtacttccagtctgcttttcttctctcgggctaaaatgcacatgacctgtaattttttaaagccaatgtcagtctgtttattctaagattaatgttaattacaaaccaaaagtagcctgctgaaatttattagaaaatcacaaagacacaaggggacatgtttcaaattcagaatgttgggttagggacatttacctcttccttcagttcttttttctatttttttcccttctatttttattgcagggaaaaaaaaaaggatgaaaaagcagtcagtagattttatatgtgtgtatgctcagtgctgtgtgactctctgcaacaccatggactgcagcctgccaggctcctc

SEQ ID NO: 41304 - DNA, 1711 bp, Bovine  19866881054243
  misc_feature (1)..(1): n is a, c, g, or t
ntcaggtggccagagtattgaaatttcagcttcagtgtcagtccttcatatgaatattcagggttgatttcttttaggattgactgatttgatctccttgctgtccaagtgactcttaagaatcttctccaacggcacagttcaaaggcatcagttcttcagcgctcagtctttattgtccagctctcacatctgtacatgactaccagaaaaacaatagctttgtctatgtggacctttgttagcaaagtaatgtctctgctttttaatacactgtctaggtttgtcatagcttttctttcaaggagcaagtgtcttttaatttcagggccacagtcaccatctgcagtgattttggagcccaagaaaataaagtctgtcactgtttccattgtttccctgtttgccatgaagtgatgggaccagatgccatgatctttgctttcgacatgtatataggcaatgataaaacactctatgttgtgtgctagagtatagtcagaagggtacttacctcatacttgcaagctcagagcaaactttccatgaaagtaacatgatactgagatatgagagcttaaagatgaattggaattattcaagccaagtagaaagtcagagaccacttggtggagatcaaagaatatatgaagaatagggacaggagagagcatgatgcatttgagagaaaaagcacattccagatgactcgtataggaagtgaagaggaagagggtgaccgcttaggctgtggtggcatgtggggaccagctcttgagttagtgatagtcatgataaggggtttgggttgtggccttaagtggagtaggaaatcaatggttagttttgagagggaggaaaatgatcagctgtggatgttggaagtatatgcctagtagcactggggagagtgaattgagagaacacaacagcaggggctatggcacccatggggagactggggtagtgacttaggaaaaattagagtggccttgaattagagattaggcaataaggagcgaaatggacagctccattggtgtcacagaggcagaagaaacagagccaagtaaactgcttggaagcaagatgaagcagagacagggctccagaatgtcacctgagtttctgagctggccaagggtagttggtggtaaaattcactggagacagaggtaagagaagaggacccagggggtggggggtggttgagagctgtgggagaaaaaagaaaccagtgatcaaaaaatcaagtttgagtcacccgggggacatccatgtgcagaggggcagtaaacagttaggtaatgagcctcaaacctggattcagactggagttagaaatttgcaaaccatctgcataaaggtagcagttgaggaagatacccttacactctgagtgagaagaaaagcggagctctagcacagaaccagagggacaccccctgtgaggtttgagagaaagaagagggacccccaaagaaggaagccagaggtgtgtgctgttgtaggagccaagttaggacaaacctcatgaaggaggtctgacctggttagcagctgtcacctgagacaagtaatgagaagtcccttggatataacagtggggcattcattggaatccttggcaaagtgagtttcaggagaagagtcctgtgacagaagccagattgcctgaggttgaaggataaacaggaagtgaggatgtgga

SEQ ID NO: 41305 - DNA, 1209 bp, Bovine  19866881105914
  misc_feature (1)..(1): n is a, c, g, or t
nactgtcctggaaatctggtagatgtctgggtgtaacaaagaagtaatttggtaaccgtggatgccattttcctcccaataagtgtgctctggctctgcaatctcactggctattgaaatttctcagtggaatatgttttctttgggatggaaatttaaaaatccttttggaacagaagagttgctccttattgatgttagggaggaaaagagaaaagagattcttcccagttggaggaagtacatgacacttcccatgggcctctatcaccccctcttcctctacagatcagctcaaggttttattgtcaatcactttatgctcagtgttgtatgggtcataatatcacctttaaaaaggccttaaagcatttacatttgaaaatgctagataattttattaaactggaacctaaccagggtcctcttggctagccaacagaattttattcaaggggttttagtttcatggctgaagtaatgttacgtgaagattatcaacctttaaataatattccattcatgatttaaatttagttcaagaccagtgagtgttcaaaatgagacacagaactatagtctttaattctaggagagttgctgcagatgctaatttaactttatggagaaagacaatggcccatagcaaactaagcagagcatttgggaggccactggtattctgggcgaacacttcctaattaaactgtacacctccctctcctcttctgaagcccagcgttgttgtttatgacagaaaacttaccgttttttattgtgtgcattttcctccaagtttctggatttttatttctgctagcaaattttgaaatttatctaatttactggatagctcttcccctaagtggggcataaacttgaattaaaaatgaacttttacttcttggaaatatagaaatcttttccttttatggacatatgacataagaagtttgctttaactttctttttgtgcagtttcccagatatactcagggatacaccaagaattgtgagggagggaaagtggaatgcaagcacaggcaccgtgttgttgccatttcaaagcatcgagagaaccctactaacttgggagaatctgaacccttagagaactcaccccatccctggtgccattcttaatttctttctttatctggttctctttcccttgtctcacactttcccctacttcattagtgctggcat

SEQ ID NO: 41306 - DNA, 931 bp, Bovine  19866881198935
  misc_feature (1)..(1): n is a, c, g, or t
ntgtaatcaatacaggtacagatccacaggacttttctacacaagcaaaacacttagggggatggtgtgcaatcaactgtacaattatgtcttagtctgtgtacatttttgctttttaacatttcaaataaattctttatcaatggaggcctttgagttttattggtcaaatcttaatggatttttttagtcaaaacatggcttttgtctttaaaataaatttttcttctctagtttttggctgtgaccagtttacaagcatttcaagaacatttgctttatatatttcaaactgcatgatttgaatgttttgcctatgccatgtatctaaccctaaatatttggttactacatgcacatttgttgattttgagtcaaccaaatccctagatgagtgaatatttggtttctgtatcaatccactgtcatttgtcaaactgctggccaacagagcaggacgtatagtttggggggttgaggagaggctaggtaggaaggagaagaaattaagtggcatattgtaaatatcagatctataattgtaaatatcaaacctgcctcagaatgaatggaaagcagatctccaatttgcttatataggaatatcaggttgactatatagccatacttgaaaatgcttttgagtggtgtcaactttacttgaatgaatttttcatcctgattgacgcacagtggtgtacagttcacttctaaagctagtggttaaccttgtgtaggaaacttctgccgtctgacactaagataatgagttctgtgtgcatttttctacgctttttttaaaaacttattttatggagatgttcggtttgtctataaaaatctgaggatggttataaatacctgtaagtattgtaatgttatgaatgcaggttatttgaaagcgtttattattatatcattcctgataacg

SEQ ID NO: 41307 - DNA, 1333 bp, Bovine  19866881244313
  misc_feature (1)..(1): n is a, c, g, or t
ntgaggggtgagcaagctgggacactaaaatgatgaacttttgttgttatgattggaagaagagcagtgagctgaggtatggcctggtgtgctctgaaaggcagaattatttgtcaaaaaggcaattctgagcactgttacctcgaatatatttgtttatttttattgaagaatcttgtttatgaacagagacatatatcctcacatatgaagacacagggctcttaattcaggccttcatatctttcctcctactgattccctgcctagactggatggttcaaggcattcattctatttgaacattactgagggcttcccatgtgttgggcatgattctaagtacaaagacagaaagttaatgagacagatatggcctcttgtaccaactggcaggggtgggagtggcaagagatgggagaggaaatgggtcaataataagcaataaacaaggaaacaaacaccattatttcagacagagataagctcaacaaagactttaaaatgcctttctctcccaattccgcaccttcatcccattcctaccttatcatctctgagtgcagtgttttctaacaacctctctgcccaaccctgatccaggcgcctttggagtaaaggtcagatgctttttcttattgattttgtagttgtaattcctggcacatattgttttttgcttaccatataacatattcaataaatgctaattaactgaaatgaatctgttgaaaaaataagccactaacagtaggcttagcatcgaactattattgtacaacttaaggcttagtaagaatgatgtgattataatctcttacaaagattttatgatgttctcataggaatcatggtctatcgtttaacttagtagctctcatccctcccttaccatttttaaaatattacaacttaagattcacactactaaagtgatgttggtcagaaattgaatagaacagataaactgtatagttgagaggtgagcccagagatgctgaagacagatctaacatcttccagaaccctagagaacttgcttacagggacagagcaatgaattgtattactcagatagtgacacagtcctgaaggacaagcagtgctcaaccaataatttgaggctgctttccactactggaaaaccactgtgacctcatgatggctctggccatctgtctgtgggctctaaccagctcaggtctttgttcaatgatgttccaaggtaggcagaagaaaaactcttggcattgcaataataaagagtttcttagggtgacttagggcttcacaggtagcgctagtggaaaacagtctgcccaccaaggcaggg

SEQ ID NO: 41308 - DNA, 856 bp, Bovine  19866881259141
  misc_feature (1)..(1): n is a, c, g, or t
nataaccaaattttagggatattgtaaacatctagaacagtacctggtccaaaagaaaaaataaattaacaaatgttaagtccatggctatagctgtgaaagcaagactatatttttatttttaaagctctcagtggctgcagctaatgaggttgtgactagccctcttaacatttcattcacacattttcagtaaaccgaatgcaatgagagcaaaagaaatcattctgaactgagaatagggttatagtgactgtcttggccaccaactgatggtgatcataaatgatttgggctctctatttccttatctgaagactgaagggagtaaaatttatatctctaaggttcctctagatcttacaaaagaggctgtactgactatcttgaaacaattgggatgcaattttttaacaaccatttttcaacaggtatgtttccatgcttgcttttagatgtttttcttcttttaaactttaaattgaaggtttgtgttaactgaaataggatttcatgaattttgaaccagaaatacaacaaaatgcatttttataccagagtcaataatagcatattatactctaaatgaagataattttttaaaacataaacttctagtttagggcaacttggaaaataaggacttcaattaagagctatataaaggaaagacagagagataagagaaaacaagtggaactcttaaaggagaatttaaattacacttttagaaagcatttttaaaatagagtcatctttgcagggagcacatagtcttgaagggaggtgctaaagagtcagaaagaagacaaatcaattacaatcttcaaagatagtattatctcaaggaaacaga

SEQ ID NO: 41309 - DNA, 840 bp, Bovine  19866881297501
  misc_feature (1)..(1): n is a, c, g, or t
nagcttattgctttaacatatatttgtttatttaacctttatctactgtaagggttgccattttcatgtaaagaaataaatggtaaagtaataagggggaaagaacctagtaattgtaatcctcccataagaggatttgttacgatggtctgaggctgttgctgttgcaatttttacctttttgatacacttattaatagattctattttgttaattaagacatttatttatggagcaccccatgtctgtgtagtaatgtgctaggcactgtagataattaggttcattttctacctttaggccactcgtgtattaatgaaaaaaatagaacaatatgtaggcaacaaatataaaggaatttaatagaggtacaaagaagatgttatgagactgttggaggatgagccaaggtctactgccttctgggaaaaggaaaaaaattacaatggaaaatgctaagaagaagaatatagccaagtttagtctaagtcgccttatatatttcttactggttaaacataacctttaaaagaaatgaattgtttgtgcaggctacacattgggatttgttattttgctgtttggcttctctgatatatctttaagatatcaaacttcaccagaagaaccctagagtggctttaaattgttgcattcaaataagtgtcatatctaatgatatattttcgtaggcaaatgacagtggcatccggtaaccaattagtagaatgtcaggaatgccataatctctaccaccaagattgccataagccccaggtgacagacaaggaagtgactgaccctcgccttgtgtggtattgtgcccgatgtaccagaca

SEQ ID NO: 41310 - DNA, 847 bp, Bovine  19866881409400
  misc_feature (1)..(1): n is a, c, g, or t
nctggcactgggtaatggaaagtcatgattacatctgaaactaacatggtagattacatggatgggaggaaggaaggggctgggagaggcaaggagaaaggagagggtttttataacatgttaaatggaaaaaatgtgcctagttctttatatgttttctggacttaattacagtgagcacattttagaaaagtcctcatgggtttgctctctggtttaattctgactcattaaggtgataaatatttattgaacaccctgtaagaccatagtatatagcttccccatcatcaagcatgctccagaacctgacagaatgaagagataaggtatccttccctaccttgcataaagccacaggatgataaattaggctaaattagaaagctcaatataaaagtacctttgtatgaacaaagtgtattgaactctctttaaaaaaatcaaatattaagcactcaaatctatctaaaggcagagcaattatttttatctaaccatgagaatatctatctacacattttgtatagcacaaaatatgagaataaaatctgattcttatctgttccaatcataattcctatgtacagatgaactggttcatgtctgtgtgtcacagaacatatatattgtaactatattctaatattgtaattagtggagtaggaaatgacaacccattccagtattcttgcctggaaaattccatggacagaggggcctggcaggatatagtccatggggtcacaaagagtcgcacatggctgagtgactgagcattgtaattagattattcattcaactatgtcacaaacacagtaattcatcccagaacagtaaacagatt

SEQ ID NO: 41311 - DNA, 765 bp, Bovine  19866881847572
  misc_feature (1)..(1): n is a, c, g, or t
ntactcttgcctggagaatcccagggacgggggagcctggtaggctgtcgtctatggggtcgcacagagtcggacacgactgaaatgacttagcaagaacaacatattctaatttttaggaggagccaaagtttttccttgaataaacctggatggcactgaaagagatgaacaatgtcttcatcaactattccacaacaaagaccaaagcagaaatctgcaacagcctttgcagtgacattggagacctaacattaagaagcattcagaaaagacaatttctgtgaggggcacagtgtctcagcgtacttaaagcaacagctagacgacatgacctttaggttttcttctttaagagctaggtgtcagaccgtcaagatcgtatctactctcaagggcctcagtgcaggtattactaagtctccatttcttctctgactcattaatcaaggaaaaaattgtttggaacaacctgggacaaaggcttttaatcataacattctatttcctgctgcatttaagactggcaatttagactagctacatagaattctacggaaatatcacctacccagataaagaactacttgttttcagcatataattccatttttttcatttgcaaatgcacgcaccaccaccacccattgctataaaataggggttttaattttttagatgtgtttaaattttaatgagatgcaaataaaatgataacaggcataaaattaaggaaatggtgtcaagatacccaaggaagtggga

SEQ ID NO: 41312 - DNA, 1281 bp, Bovine  19866880515795
  misc_feature (1)..(1): n is a, c, g, or t
ntgtatatgtgtgtttactggtaaataagaaaagagaactcctcatttatttcatatatgaaatttccgggaaagagatggtaaaagatatacattttttaaagttgtatctcaagttgtactgattccagaaatgactaacggtggacagcttttctccctgttagcaatgttccctataaatcaagggcaaaagttcaaatggcccaatcaccagatattcttatttggtagatgtgtgatgtcccagggcaatttcctttctaacaacacacatctctagtagcaagaaaagacactttcttaggtatcactgtagccccagaagactaagcaccacttgacacaaagtgaaagtgttagttgctcagtcatgtctgaccctttgagaccccatggactgtggcccacctggctcctctgtccacgggattctccaggctagaatactggagtaggttgccattcccttttccaggggatctttctgatccagggattgaaacttggtgtcctgcattgcaggagagctctttccctctgagccaccagggaagctccaaagcactgcttggcatatgataaatacctaataaatagctcatgaatgaatagttttggaaaaaactactaccgatagaataagtgaataaagtactcatgattccaaagtaaattgtccatgaaccaagctttgaaaaacagggatcaggagtcttctttatccttctttatttttggagaatagtgaaaaataatatttattgccataacagaaactgtttagaaagtatgatttgcaatctatggcatctagttgcttgagataattctgatttactgctccatatttcaaaaataattggaatctaggcaatgatttctatagagacatttccttcctctctgatgaaacattatttttttttttcaattggtaactcagacattaatgctaaagttaattggatagaggataacttgcctaactctataatgattcctcagtgtcaatcttttcatctccatggttattgtcatggattctctgaactccatgcctatgttgacaagcaaaaaattaaataaattcagtgataataactaagcaccaatatgacaagttaacagtatgcttacttatatggtctgctcatgattactgatctcaaatatcatttttcattctcagtgaaaggttagggaatgagtcaggtaaaagcaggacctctggaaaggattccagaagttttgaatgtgaggacttaatattctgtcaag

SEQ ID NO: 41313 - DNA, 2020 bp, Bovine  19866880601441
  misc_feature (1)..(1): n is a, c, g, or t
ntctgactcttttgtgaccccactgactgtagcccacccaggctcttttgtccaaggattctccaagcaagaatactggaatgggttgccgtgccctcctccaggggatcttcctgacccagggatcaaacccttgtctcttacatcatctgcactggcattcccactagtgccacctggaaagccaaggcagaggggttaaaaagtctgagtatatagtgacagaccaggcatttattcctcaactttcccatatcagaggtcattggtttattcacaagtctagccatattagtaagtaatttaaagcctcaatttccttaacattaaagagaaggggtgaaatagacaaccaatggaaacttactatatgactcagggaactataactccaactatagattggagctctataacaatctagagaggtgtgaagaggtgggggatgggagggaggttcaacagggtgggggcatatgtattcctatggctaattcatgttgatgtatggtagaaaccaaggcaatattgtaaagcaacgatccttcaactaaaattaaaaagcaattaaaaatcaataaagagagaaagggtaaaatcatatactgcctatgtgatagtctgcagcacctaaaagagcaaaagtgaaatgcattctacaagttaaaattttaatttcccatattaaattttaattctgtgataagctggaggtaactctgccatgtttcatggggtcatgaacctttgaaaggagttagatccatcccacaggtcaggctggtttgtctgagttcacagggtttccaagaagttggaaatggcctcaaaaaattccttcttttcatttgatggggaaaaaaaatcatgcaactggttaataagtatgaagaatgttatccagtttcttgatggaatagcaaaggctaaatggaaaatgataaatctaacatatgtgctctgaaaattcacctattcacagatgaattcctcatttctgtgtaatctctctatatgtattcctaaaatgaatatgagatgagttcatttttcaacatattttgaaataaagcataattgtattttatatgtaggcagaagcaagaacttctgaaaaatcccatgcattaaaagaaatgtaaggtcatgaaactgagactattactgttgcctcctaggaaattaaaactgtactagaggaaaaagaggaaatatcagaaagcactaaaaaagaaactgtaatccaatttacttaaatgagtgtagataccacttttgcccattgtatgaacatggtttttaagcacgtagttctgtatgtatgtgaagaaaaaagcacactaacctattgacttatttagttgactaaaaatgatttaaaatttcttggtcatttatttatatgcatgcagtctattttttctcctacccacatgtgagtattctctgtttcactatccagaaattgtatagataattagaggaccttattatctgtggaagccaactatttgagttaagtcaaatcaatgatcttttaccctcaggagtctaactcatactcagagggagctattaggcaaaatttttccataccagttttgtacgtcttactctatactataaatctacttcatagaaattggaacaattattacaaagagtaaacagtactgaaaacatcttttagacttgatcttttatccaagagggagacccattagcaatcatatctgggttcataacaactattggaaatatttatttacaatgtaactgtacatacaaattcacataaaagctatgagtccactagaatgcattttccctcaatccttagagaagatatatcaaatagatttagttttttttaatgtaaatcatcttttgtgttactgttataaatgatccataattacatatgatggagatgtaatagtcttaacataaatataattaacaatgggagaatagattgttctgaaaaactttctatgaaggtcaatttctgtcattgcaa

SEQ ID NO: 41314 - DNA, 706 bp, Bovine  19866880640348
  misc_feature (1)..(1): n is a, c, g, or t
nacacacacaaacatatgtacgatctgaaagacatcagaagagtatcaacatcaaccacaaaaaaaaaacagtgggtaggaatggaattgagatgcaaacatttctatagaagcagaaatggaattttcatgaagcaccaaagtcctgtataatcatcccttgaagatggcttctgttttctgaaagcacatcagtccacagacttgtaagtattaaaacatcaggatttttaaagaaaaatcatactctaaaagagcacatatgaattgactaccttcttgaaaatgctaaaacaaagccatttattcaccatgaaaagttaaattttattttcagaagatggactctaaaatcagcgtcactgattattgttttcaaaataaggctcagacgtatagcaagaaaataagatttatttggaggctacaacttaacattctcttagactttacctgctatatttgaaggtgtggttgtcaaatactcattctgggaagtcttgatttttgctactttcaacaaacatttttcatttttatgagaaaatgtttcatgaaaatcatattatattttcagtataatagcctaaaataacattgcagtcatatactctaaaattttcttgccatctcacccaaatttcttcatctcctttactataactcttctgtattttacttcctagagtcctctgatatttctttc

SEQ ID NO: 41315 - DNA, 1564 bp, Bovine  19866880723079
  misc_feature (1)..(1): n is a, c, g, or t
ngccttttatataacagaaaatattattataaaaatatccacagaagacatttttagttccttgacataatatgtggaaaaattagagatttctatagaaattagaggtttaatacccaacactatgaaacagtaattttctttgaaatctatgcattaactattctgtcatttcttagagaactttttatagttaaaagtcatctggtattttcatctctctctctctctcattttctctctctccctccctttctaccatctatttagattcaacctaaatctatatgtttttatacaacagtcaaatcacactatagtgtgttgtggtgtgctacaaatcacattttagccttctccaatgttattacaaaagaattgcctttatctcaaaggggatatttccttatagatgaggtttcttgcaggtagaagtctcctgagacctacacttctgagtggcatgttcttaagcatattgcattatatgtcagtacaattagcatattcttccggattgtaaaaagtaacaatggctgaccgctcaatatgtaaggaaatggtctgtacaactatctaagaactaggaaacccagtccttgtgtggaacaaacaggaatagcaggttttgaaactattcgtttgaaaatgaatggaggaagcttagattcccagatggatcgaccgttcctgtcttatactgagacatcatgttcagtgttgatacatttctgaggaccaaagggaacccagggggtagttgaaagagaatgaataggaatggaaatatcctggcctgattttggcaaaacacagaagatgtacccatagagcaatggtacaaagattttcaaagactcttactatctgcagaaaggtccctgtgttcccagatatgttctactgcagcggtgcatgctcttgaaccaccaaagcactgagtctggatcttcccaccagcacgcgcctggaaatgtggtcagtgagcaccactgcataactaaacacagattcaggatgtgcaaaacccactgctcggtagaaaactataaggcaaaagagccacagcccaaaccatgattttggagaattttatgaggccatcctcttaattatacatcctggaagagtcattcaaagaaccggaaggggaactagggtggcctgggggacagcaagccgtcttaattccctggtgcagacttgttattttggtgtacttgtttaattcaaaagtaaattcagggagtaaaaatgcccaagatcatttcgacagctagctctttgtcctaaatctcatattttttaggtaaaaattattgaaattcaaagatttccatttccaagtaaagcagaaaaggaaaggaaaaggaaagtgaagatgctcagtcgtgtctgactctttgtgaccccacggactgcagcccatcaggctcctctgtccatgggatcctccaggcaagagtactggagtgggttgccatttccttctccagggggatcttcccaacccaggggttgaaccctgggtctcccacattgcaggtagacactttaccatctg

SEQ ID NO: 41316 - DNA, 1776 bp, Bovine  19866880888826
  misc_feature (1)..(1): n is a, c, g, or t
nttgtatcattactatttgaagtggcagcagtgacctgatctgagcacagggccttcttcccaacctttgatgtgctgtcggaagataagttaaatcccaggcttttggcatcaggttttaatttgatattgtggaaatgaattgtgtactcagtattaggacagatagtgactgcctattacctatctagtgaagtcattggaggcactgctcaggtggaacaatcaggaaaaaattagaatttgtcagctgcagtatgtgtctggtaatttgcctcattcataataagtgtttagaacatttctgattagctgtcaggaatttattgcttctgacaatagactgttgccacgtgtactctgggagagcactggttaacagcatatgggaactgtttctcctgctgcttgaagaaatatttagcagtccttcagttttagaaactatgagaaaacaaagtgctgagatcaaaacaaagaggatatgagcttcttacaatacagaattcataaacgtcttccactctgtgtctgacaatgatatatatgtgtattatatgtatgtacttaagtgtgtgtgtgtgcacataattttaaaagaatgttatgtattttttaaagtaacaagaaaccttggaaattgaaattcaaagtggatttatcctgaacagcagggcaaagctctgttttaggaaaaattaaaagcatatgtttcagaattcagctctaatttgcaatgaattgcttcagtaaaaccacttatatcagtattgttaatcttaatggttacaagtgacccacgttttaataatccagaccatcggtcgagtacaaatcttttttttcccctaattaaaaatgtttgaccacaagagggagttccttgccaactgtttacttatcctcaacagatattacaggcctggatttccaaagaaaaataccttcagatatatttagtttgttctgtgcttttggactaagaaaatgatgacaatctatttaaatttaggccttcatgaatttccagattaaaatataatttgcagtatgaaatttttaaggtaacatgctaatcacttttcaagaataaaatgatgtaccatgcttttgaaagagcttccaaatttgtacctgcaaaattgtgatgcactcgtttgcgaacagaacccatacagacgcactgaggagcttttgagggtggcaggttacctttatgtacaccagtttgcttactttccatgagtaaagatagcttcacttacataagttaatgcatatatttttgctgaactcggtaccatcagtgaatagtgtgtaggatatgcaatgtgacgttcaaactacaaaatttacatatttcaagaggaaaatgtgttccaactagcgacctccttagaatgtaagtaatggccatttccctaatgattaggtgcataatatacacagtaatttatccaaagactataaagctaaaaatatttcctagttcataacaatttgacttaaaagtatatgtaactcagagcatccgagtgaaatgtgcacttgagaaaactttgaaaaagaatcagcataattaggaaatgtggttagttattgaatactgttccaggctactttgcatttaaggtaaaagggtagacttcctttaaaatttgtgaacaatccccccaagagcatgatttctcttgtgactactcccagaaggctacaccatagcattcagaagtcacgctccgcagcatctttccttatcttttgattcgagcaaga

SEQ ID NO: 41317 - DNA, 3226 bp, Bovine  19866881007677
  misc_feature (1)..(1): n is a, c, g, or t
ntagagaggaagtctgaaaaatccttgaaaattgagactgaactcaagatgacattaagctagagaaatggagaatctcactcattttttcagtgacatggttgtaggatattttgtgttatacactgtggaataggagcctggaaattctctctctctcacacacacacacaccacattgtgatttagttatattgattttcaatgggtgtattgaaaatatgcctagcactaaaactcagggaaaacatctggacattttggtctccgtaatgcaagagatccagttatttgaaaatacgcttagtgaccgatgtgtgtatgtgtgtacgtgtgtaattttttcttccctgcttggttccatgaagacaaaacctttatcatcatacattgtcattatgaaacatggtaatttcccaaatttacctcgtgaacatccaacacatttacctctcgaacactacttggtaggtccctcatactatcaacataagcacatttgaaggtgaattaaggaatgatgtcaactggaggagtgtcagaatccacaagccaaactcttaaatataacagaaatagcaatgggaagccagaggcacagagtgacttgttcatgggccactttccagaactttcaaagtaaaaaatttgtaatttagcatccttacatgataagataaagactgacagaggatgtcagccttaatagctgcactaagaatttacctctatgtgaacttttaagaaggcatcatgtgttatttctagtaatgtcttttttttttacttgattcataaattttgaatattagtactattgatgcctttatcatcatgattatgaatcaattttgatttcacaaaaccaatttacaaacaagtgcaatagacaaatttccttagtaagaattctgaaataagaacagaactttctggccctgtgtaccaagtcagataaggtgagtaagtttttaaaatcaaaatatcttacataaattacaataagccattcaaaaaaagcccagtttaaaatatgccaaaatatccacacaccgccactggactgagggcttcagttaacactgcaaaaagctatctttaatagctattggacgctcagcaggatgagcaaggctgggattagagataatgatacttgttggaacggcagggaggcaaaggaaaaagcgatcggcctcccttggctttgtaaaagcatattgggaagaaacttacattcaggaggacatgataccagacagtgatacatttaataatctcaatatttcttttttcttttaagttgatctgagatggctctttcgaatttaaatatagcattgaaatacattgttaaatctcttcatgttgatgccttcttttttttctgtttctttgcctacattctatctcaatccttgtcatcgtaagtgaatattagtgtgttgatgttataagtagattgtccaacaccctaacctctagtgcaagcgaattggggaagccagattgatgtgtctcatgagttgttgtggctgcgttacttccttcttctgaaacttagagaccttcccattatgttcaacaaaatacaaatatcatagactggagtttaagttcccctcctaaaagatattagtcttcccttttaactaacactgcccccatgtgaaagaaacactctttgaaacattcctttctggctcttgtaccatgaagataattttcctcaggcaggaaaatccatattttgctgatagaaatttatccaccatttaaaacctacatcaataggcatgtgttctatatgtcattctccacattctcttatgaatgaagcacctactgcccatctcttgatagcaatcattttgtaccactgaaatagcatgtatgccagaattatagatatttatgtaaggggctatcttcccatcatattttgggcttccctcatagctcagttggtaaagaatccacctgcaatgcaggagaccccgcttctattcgggggttgggaagatcccctggagaagggataggctacccactccaggtatgcttgggctttccttgtggctcagctggtaaagaatccgcctgcaatgcgggagatgtgggttcgatccctgggttgggaagatcccctggagaaaggaaaggctacccagactccacataagttatctgtgaattgatgagttagtcaaagtttgactaaagtaatatattgcactgatatgtttattaaccaagaaaacctaacttgttaagattttgcatctatttaaattcattacatttatcattacttattgttctagattgttcctccagtggcctaggaagaacttctgtttgttccctcattgccaaggatgtacattataagattaggtccagtgagtaaattgaggcccaagtgtttaattttctggctcattctctgacaggttaccttgggatggctgtttcttttgatcaaatgtcagagctcccatcaggaggtcctcttcccatctctcttcaggttccactaactgtcctctctcctcttaacccttcagacttaggtctgatactaaatctcttttgttactaatcctgagagaccgcactattttttgtggccattccccattccacacatgccacagatagtacctttaaaactctcttgaggtgtttcctgtttaattgtgtcatctgctttccaaaaggatcccagattataatacttctaaaaacatgaatagtttttggggcacatatacattgtcattgtataactacaattgacaatactcaacagccatggggacttacataaattaacaaataaatatgctttcccaagaggactatagaaacaatctgaaataattcagtcaccaataatatgattgcctgtggcgtgagcattagcttaggtactatttttagccattactatataaccaagaccctggcttccctggtggtttagaaagtaaagaatcagcctgtgatgcaggagacccaggttcaatccatgagtcagggaagatcccctggagaagcgaaagtctacccactccagtattcttgcatggagaattccatggacacaagtatatataaatatacctatctttccttttcagtatttaaagtagctgaaagtgattataacccttgcacagccaacatctcttgtcaaccaatgcctatataaactcaatacact

SEQ ID NO: 41318 - DNA, 1494 bp, Bovine  19866881020692
  misc_feature (1)..(1): n is a, c, g, or t
naatgtctggaagcataatatagatacatctttataaaagccttaaatgtataaaataagctaatataccttatatgctatgggattctcaggcattcttttccatatttgaaaatatatttccatgtttcctataaaatcttaattttgtacctactctattacaaggaaattgaagagctttctcacatattcagaaatgtttaaaaagctaagcactgtatcatttaaactttcatttaaatgttttcaatttatcagaatgtagagtaatagatgaaaaaatttgaagataaacttttatgacattttaagattaaaaacatgggaattcttttattctaaagctctgcttacctgaaaactaattatggaatgactttttacaaaataaacatttctgtattcatttttaaaatgcaacttcattttaagttgaacagctttgtggatatgtcactattttgcctgtatggcataagcccagaaatcttctctattaggtcaatctgcattatgcttggccaggaagcaactttttgttaaacaacaacaacttgatacagtcagtgcagcaggaatggtacttgttagatgctgcccaatccagactcattctcagaagctaaggctaatcctaactggcagaaagaacacagcaatacaaccagtgttactatgatttcttagatggaacatgatggaaacttgtcttttcaccataaattctgtatcttattacaattcacttggtgaggtaataactgacaaggttttgttatattaaaaaaaaaaaagtttttcagtgtttgaatcttgagaggtaaaggagaaattttcatctatgcatctagattcccatccttacttctgaaatgttatccatacagatttgaagaataaaaagattataaagaatcttttgttgtgttgttcagttgcccagttgtgtccaactctgtgaccccatggactgcagcatgctggggcttccctgcccctcatcatctcctggagttgcccaagttcatgtccactgaatcagtgataccatccaaccatatcatcctttaaaagctctacacaacccttataatctcaatttttctataaaacattttaaaagttgaagcttgttatttttttaaaaatacattgaacttcttttatttaaaaagaatctaaaatttattatatttatgaattaaagatacagaaatacttttaaggttatgtttattattctaaatccccacatgctttttttaaagtttcttgataaatgatgacctgttttaagtatattaaaatattaaaaaacttataagaatataattatttcttataacaaaattaccaggaaatatgaattgaaattaattatagattaacaatttgggttaagggggaggatcattttctacgttacatttcctaatatgacatagaccatgataccaattcttggtcatatttaatcacataactgaagta

SEQ ID NO: 41319 - DNA, 1057 bp, Bovine  19866881034212
  misc_feature (1)..(1): n is a, c, g, or t
ncccgattttttgtgcatatgcatgttttagttaaatcactgacaaggaaaccaccagccttatgctttcactaatgttaggaacagcacacagaatttgtaatgttaggcacagcagctgaacatactacagaggagtagaaaaggagaaaaaaatgatgccattaaccatgcaaatgtgtgccacatctgtactaaattgccatttgcatgaatacagctaaggcaagcaggattactgtcattagagcaatgctgtttgcactgctatattgcatttaaggttgtgtgggtgtttccatttatactgccccccttctttttaggggtttataatttggttgtaataatctgctttgggatgaaacattactacaagttcacagagggggagcaatttttaattataaaattggattcaaattggttcagccatattgtagctagagaaaagcatttaagcacactaaccaaaaaaatatgttttcttttaaaatacaagtcttttgacttgaacttttttttcactttaaggcagaaaactatttttaccgtagcattttatgtttgttgatttttgtgtagtgtcccaccagaagattgatattatatacacaaattgtccactttaattctcaaacttccaaaagaggttatttcaagtacatgctttattaattatttaaaatatacagttttattgtatccactcctgataaattgcatactgcaatagggtctcttcagcccgtaacaagaaacaagacatcttacacatgttaaagaacaattttacaatcagtgttgcctacttatggataaataacaaattacatgagcaacttttcagtggcaagtagctcaagttatatagaatttttttaaaataaaaggtgtttgtctttatatatataaattttatatatatatataatttgactaattatatatatatatataatttacatatatatatttataatttgagtatattgcaagagtacttgccatttccttctccaggggaatcttcctgacccagggatcgaacccaggt

SEQ ID NO: 41320 - DNA, 965 bp, Bovine  19866881062211
  misc_feature (1)..(1): n is a, c, g, or t
nttcacccaaaataaaagaagtatggattgacaatgctcagagcacaggctgctgcaaaggcaaaataagtctttatatagctcacattaagtattattattttcagttgaatggcaaaatggaggttagcccgaaatgaagtacaaagatatttctttctagccgtcaagataattagaatcaggttggcatgcacctgtgtttgatgctctaaatatgttgtgtcaaagggtcccagaccctgggtcacctagctttcagtgatttccttcaacaactgttcagctacagattttaaaagatgagtgtcaagaggttccctgtcgcctgtggtcgctttttgaaatggattactgaaaatctaaacgacttggccatacacactagggtttcccgggtggtgctagtggtaggtaaagcatccgcctgccagtgtggaagacgtgggttctatccctggttgggaagatgccctggagtaggaaatgactacccactccggttttcttgcctgaaaaattccatgggcagaggagcctggtgggctcaaagagttggggtcacaaagagttggacacgactgagctggccctgtaaggagaatgaatgtaaaacacaacaacaaaaggaacacatgttattttattttcaaggcatcccattcaaactagtcactaacagtctgaatggagaaggcaatggcactccactccggtactctcacctggaaaatcccaaggcggaggagcttggtaggctgcagtccatggggtcgctaagagtcggatatgactgagtgacttcactttcacttttcactttcatgcgttggagaaggaaatggcaacccactccagtgttcctgcctggagaatccaagggatgggggagcctgatgggcagccatctatggggtcgcacagagtcggacacaactgaagcaacgcagcagcagcagcagcag

SEQ ID NO: 41321 - DNA, 863 bp, Bovine  19866881098483
  misc_feature (1)..(1): n is a, c, g, or t
ncaggcactcaactaacatttctgaatatctttattctgtaagaggtaaaatcgagacctcacagagacatagcttgtctaaagctgttttgctgtaagctgagtcccgattcttgtaggtctagcaatcttcccacagaactacatcacaaaagacaatgcaattggcccaggtatattcccactatttccattttcttctatattccctaaaataatatcctaagcatatttgctctctgcactcctgaacaccaaaacttaagatcctccacgaatgcccacctttgccccatctggtgggctcattttgcacactttagcatcttgcctatgctttcagagctaagcagtccccctattctaattgcctgagtgtctgccccatggccattagccatataatcccaaagcagctagaaagtaaaatttctcttagcacgtatttcatctttattgatacacagtgtgattatacctctgaagaggtaatgctccagaaatattaggtatgttcatatgagatccatgagccatttcagatgataaaaaaaaaagtaccactttatggaattcgaaccactccattaactttgcattgcataaaactatcaggtagaatttttaattgaacaggcttgaactttcttagtgcctatttcttcctttctgtattaaaatctcacccttattgcttctgaatatacaaacatgcatatacatatataaacactccacttaaagaaagctagaaaacccattcacttaattagttagcaccctttggaaaagatgctatcaacttttgacgctctagaaaagctatttaacacgtaaaagtgaatctgactctcttttgctct

SEQ ID NO: 41322 - DNA, 1113 bp, Bovine  19866881140349
  misc_feature (1)..(1): n is a, c, g, or t
ntggtaatgatgaaaatgaagagttcagatgagagaagcttgagaaacaattgatggatttagtgactgattaaatacaggggaagaaaacttggatgggacaatggatgctctgagctctcaagcctgggtaaataaaagatggaaccattaattgaaaacaggtcaatcaggaaatgaagatgtttgagagagagagagaaatcaggttttgtttaagataatactgagatgttcaacagaaaatatttaccatgctgttggaaatttaaaatcattctttaatttgagagcttcagagtgatttgaactgtatttttggatacaaaaaacaactttttaatgcatcaaccacaccttttcttctgcatgtagtgtagatctcagtagaggagctctcatttggttagcactaatagacatttgaaactcctacatcttaaattttagctcccatttattatatagtagctaatttgttctcaagtaggtgataatagagattgaactcttaaaatagaggctgattattatatcattagaatgtgactttttaaaaaactcctggagactgtagaaatgaagaaaaatacattggcgacaaaggtgttgaaaggtatgattgtatataaaatcattgtgacccagccatgtgagggaaaaaaaaaaacacccatttttattaactctggtaaattgaataactgtttttgacatgaaaaggaaatgttgttgtttttattatcctatttggaaatatcagttgtagcaaggaaggatagaagcaaaaacaaacaaaaaaaaacacccagcaacatatttttctgcaaggagaagctatagtagatgaagctgctgtagggcctggaaaaatgagatgatgaaatttctggttggggcactctttttttttttaatggacctaagaaaaacaccaagagcagcatcaatgtagatgtatgataacacaggaaggatctttggagattggacagtctgtgacttggttcagttgctagaacattatgtaaactcaacatatgttgaccaattcagtgcagtgactacatggtttaaagagtgctggggagaactcaacacatgactgcagaa

SEQ ID NO: 41323 - DNA, 1470 bp, Bovine  19866881395824
  misc_feature (1)..(1): n is a, c, g, or t
nactggaggaggtccaattctttcttcttaactctaaattttcacatactatttccttttagccagtgaagatgcactaatttttttttttaaaattgattttttttatcatcaggataaaaatattgtctacacgattgcctactgtagagtaaaaactgaagacgtttgttgaatacagagtattaaagcaaagtatcatgcttacttttatgaacaagaacatgttaatcaaatgattactgttagctaaaaatatttagtcattactcaaaatttgataaaatgtagtttatatttctcacatatacaataaattaatttcactatggatatgaaatggagaaggaaatggcaacccactccaagatgcttgcctggagaatcccaaggacagaggagcctggtgggctacagtccatggggtggcaaagaatcggacacgactgagcaactaacacttttcacttggatacgtaaagcctgtggtatgatataaagagaaagatcttatataggctaagatttaaaacctgtaggttttcgtcctgtggctccactaataattatgtgatacagaaaaaacacttaaccttcctttgtatcattttatccagctggaaaatagtaataataataactccctatgcagcacagatggctgttgtaaagataaaatgagataatagatgtagaagtgctgtcaaatataaaagtacataaacgtaggataatatatagatatgttcaaacaaaaggaaaaccagaacaagcccacaaaggcagaaaagctaaattggactgcagtgctttcaactctgaatagagttagataaggaaagataacctaaataaaaccccaaagaactaggttttcttttaataagcagcagtttgaaatagataacctctaaatgtccatattgtattctggatactggccaaagctctgaagtatttctaaacaggaataggtaggagactgcaagtgtgaagtctgtgattattttttcttacaaagtgattttattctcttaggtctcaaagaaatgcacgtgtaactgacataggaaatctcagctgtagtcacagttggcccatgcttgtacagtgatccagaacaattatttttcctaatctttcaagcttcatttttcacactagaaaatacagtacttccataaagacttctataattaaagatacacacatatataaactgggggcttcccttatagcccagtcagtaaagaatctgcctgcaatgcaggagacctgggttctattcctgggtcgggaagatcccctggagaaggaaatggcaatccactccagtattcttgcctggaaaatcccatggacagaggagcctagcgggctatagtccatggggtcgcaagagtcaaacaggacttagcgactaaaccactaaatcaccaccactacatatgaagtatggaggcatgcgta

SEQ ID NO: 41324 - DNA, 1082 bp, Bovine  19866881547061
  misc_feature (1)..(1): n is a, c, g, or t
ntttgcatttccattaccaatgaatgagatttcctcttgttccacatccttgtcagcatttaatgttttcagtgttcaggattttcactattctgataggtgtgtagttttatcttggttttaatgtacttttacctgatggcttatgatgtgaatctgttcatcttctttggtgaattgtctgttaaggtctttagtccattttttaatttggttgtgtgtttgcttattgttgaattttaagagttctttgtatattttagataacagtcccttatcagatgtgtcttttataaatgttttcccctcttctatggcttgtcatctcattcttttgattgaatgtgtctttgacttacgcagtttgtgccttaggctgatgtcaccagatcctaagattattcttgcagagctgtgtatttttaccagatgttgcttctagagatcaaaattatttataagccggagtgtcaatggtctgactaaatttctttttataaatttctttttataattgtacttcagcaaagtgaagatttccagtaccttgacccctcttgttttttttccttagaattaaacagtcctgccttaatttgctctactatccaaggtagtctacaacctatcacttcaatcactctcttgtcagttacctcccttcccatttctgtttgctgttcaaaattctaactttatatcaatccaatgttggtatttccctcagctacaccagggatgctgaatgctgatgggaggaaatcacactgaacaaccactgcgggggttttccagatggtgctagggtagagaacctgcctgctaatgcaggagacataagagacatgggtttgatccctggggttgggaagatcccctggaggagagcatggcaacccactcaagtattcttgcctggagaatcactcagacagaagagcctggtggactacagtccatgggattgcacagagttggaaatgattgagcgacctagcgtgcatgcacccaaccactgcagatccatgatttccacctcaagtgatcctcatgatgtctggagagcctttcttcaattggct

SEQ ID NO: 41325 - DNA, 732 bp, Bovine  19866880715579
  misc_feature (1)..(1): n is a, c, g, or t
ntgagtatgtctggtttgatttgaaggaatggcctctttttatttcaagcttactcaacacgtgtcaactaccccgcacggccgccctggatacgcaatgactggaaacaggagcagatagcaaaggacaggacggtactcacttccccactggtcagcgctttctctttttgttgacagcgtctgatcacttctaataataagggtccacccacagtaccttcggcttcaataattcctaaatctcgggctaaattctctcgaccttcaagaccttgaaactgggaaagaaataagatgtaagaaagtaaaacagaaatgcacaaaaacatagcaaaactattttcagaggtgaaagaaaactattttcaaacttaaaggcatctctaaactcaaagacaccatttttctaatgaatgaaatctccattttttaagattacacatctccacgtttcaagtcccccctagcaggcgcaggccaacacctgaacacactaactctgcaagaacaattctggcaagttctgtgaagcaaggacattggcgccagctgtctaacagctcagatggcttttaagaaactaagacatatcagctataaaaacaatccttatgcaagacactctacattgtcaaattttgttaattttcaacttgtaacgaacgcatctgtgtcaaaggcagcttcaaggacagacattaaaaagcatcattcttactgtgctagttt

SEQ ID NO: 41326 - DNA, 1434 bp, Bovine  19866880765722
  misc_feature (1)..(1): n is a, c, g, or t
naatgaataactggatatgtatttctctgttcttagaaagttggccttttacagacttttaaattttgcaaaataatgtttgtaaataagcagaaacaatgtttgcttaaacactctatttccaagttttctgcatcctccatttgctcagaaaaaaaaaattttttttaaacgttctctgctgtttctgaggagatccattgccaaatatttttataagcccatggcaattgtttttacctttttcaaagaaatggaaatagtggcagataaacaccacctcctgctccagtggtaagacttcaaaacgcacatgggtgagtgacctagtttgactgggtgctgctacgggcgtatcacacagacggtgctgcttaacacctagacacgaacagaaaaacgtgactcaggtttaggtgggtggggttttttagggagaaggttgcttttaacacattgatttcagtaattcttctcagtaactctgagcaagacttgctaggcaatagtgtgtgcccctgatgtgtcctcagagcatgctggctgatggcagagatgtcccctctgctttctttacaaagcgtggctttcctgtgcctggtggttacaccttctgggcagcatgctgaccccaacaacagaggcgtccaggccagcagctccccacaagggaggtgttaaggaaaattgttcaaatttcagaacttgattgtatattgggggtgggggatgggggaagcggctttccactgccccctcctcggcccacggatacagagtacaaccacataaaattactgaagcttccactcatgaaagacatttcaaaaccgtcacataggtcagagggttggcattcatctcctgtagaaacatgtgtccagaggcgtagggagcaagggaccaagctccaaaagtctcctcaccactcaactctctgtttcaacgctgcctcctgctctgagtctttgcagcacacgccccagaccaccttcatcacattttggacatttcacgggttcttaaacaatcacagacagctatacaaggttgctgcctacactatatttaaattcaagtggaggaatccaagttgtgagaaatcccagtacagagcacagtgtatgacagcgtcagcacagtagaaacaagcgcaccctgagccattctgcgaccctgccccggaacaagcgcctggtaacggaagggctgaagcaggacacgctgccaactaacagaggcgggcagtggtgccgttcactgcagagtcgcccagcagaagctcgtagagccgcctctagcaacagttccggggactctgtccactcagaggcacagctccctgttcgtatgctttttctgaatccccacctcactttatggccatgggtgatccaaaagacataaaatgatataaagtaaaagttataatag

SEQ ID NO: 41327 - DNA, 1142 bp, Bovine  19866880889151
  misc_feature (1)..(1): n is a, c, g, or t
nactttaatctgtggaatggttccccacaggggagcgtttttgctccaggtctatcttaccgcaggaaagatcagctttgcttctggtgagtgattttaaaagcatcctaaaatatctttacgacttaaacacagttgccatcttggccaattttcatgaaagcagatatgggaacattaaaaagatggacttactaacatgaatcaataaagtcatatgccatgttcctgactaggaaaactgaaaaatgtgcacaggtatattctgcaaaaattaattttaactgtattgtgattatagtcaaaaagccagttgtgatttataatttaagaaaataaacaagagtttaaacaaaaaaagaacaacccttgctatatcagatacaacatatactctgaaggcacattaattaaagcagagtggggaatgggtcaaaaatatatgcataaactgtggatgagaacagttcagttagtaggtgcagaaaatatacagggacttaaaatatgatagaaaaatactgaacttcgactatagagggacagattatttgaggctcttgtggggaaatcaaccatttggggaaaagttaaagtctcacttcccaagtacacaaaattagttagggataattaaagtcattgtgaaataggaaatcataacaacaaaaagaaactataggtgaatatatatgtgacttggttgggaaatagctttttaagcataaaaatggagtgaattgcagagagatagactaacagatttgtccacataaaatttaaagactacatttcatatcccaaagtggatggtaaaggttttccacaaccaccatttcctaattcatgcaattacatctgaaacagatgagcaaactcacatctttgttaacatgaacatgtatatgaaatcttccttctcatttttttcttaggaacaaaaatttctgcctttcttcctatttggggtgggggcatctcttcaaacatgaaattgaagcattatccatatattttaatacatgtctataacactttttgatgttttctactacattttaaggaaccatctgtccaaaaattattttcaaaaattgaaaaattagcaattgggcaaattatagacttgtttatgcttacat

SEQ ID NO: 41328 - DNA, 1454 bp, Bovine  19866881092027
  misc_feature (1)..(1): n is a, c, g, or t
ngcgtctgctggaaagaggcagctgaacaacctctgtggaatctccgagtaactcccgtcactcggtctcctcattcgttagacgcacaaggaggagggggctggacaacccggagaggccacgatgcttctcccatccagtgtcagacccaagaacctcataggtctggttcctgctgaggactcgcaagcgtggaggggctgccagcccatggcccggtgcaggggggctggacggcggcaggggacgaggaaggctgaggacgggaggaccgcgtgggccagcaccccttttgccgtgactacgggacatcccgtctagaaggtgtttgctgcatgctctgcgaacgaaagatccgaagaaaatccacatttctagacgtagatgtaaaaatgctccactcgtgtattttggttcatggtgacttttatgactaagtggagggattctgtgattgaagtaagaaaagcatctttaatctggaaatgaccgcaccctttaaaataacattaagagcgttaaggataaagaaggtctgactcttcacacatctgtatccttagctgaatcccagctctgtttcccgatgctgggagcctggggaggatggaggggaggctgccaggaaatgccaggctcaggaatggatgagtcacacaatgggcattgttttcctgggttgttcccggatctctgtgctatgggggtgggtgggcgcacagggcacagcgtcccgggcgcctgtagactgtgggtgccccaccgcgcgcacgccctaccacgagcacgccccaccgcgcgcacgccgtaccacgagcacgccccaccgcgcgcacgccctaccatgagcacgccgaaggaccaccagtccgcactctgcgtgtggcccctccggttcaccacctcaggcgccatgtactcgatcgtcccgcagaaggagtaggctctcttgtcgtggtcgatggcctctttactcagcccgaaatctacagggacacaccgcacacagcgctcagtctctgggtggtgctcagacccctggctgcccggccagccctccccacctccctcccggggccacgcggcctgcagaggctgagccaggccccgcgcctccccgtgagattctgtcgggatgaacacgtgcaggagtgctcgcaagggtaccaagagtctgtgttctgatgcccgacgccacttccccagaggccgtttttggcaggacacccttggatgtcggcggcctggggagaggctctggagttgctctgatggacgggcagggagaggacccctattccaaaggaagggaccagaaaagggtcacgggcacaagggtactcacgaaggtggcccccagtggtgaggcaagaagcagaagacagacaagtctgacggggctttggagctcctgccgtgggtcaccgtccccagatctcatcctcaaagccag

SEQ ID NO: 41329 - DNA, 1117 bp, Bovine  19866881344985
  misc_feature (1)..(1): n is a, c, g, or t
nttttgttaaggtgaggactgagacaggtaagggagtagttaggagattgttcctgacagcagcaaaagaaatttttaggtgtaatttaggtgtaatagtaatggattttaaatgttaatgaattagaggatccctggagcataaaggactatgaaaccatttattcaagtgtttccaatttcccctaaggaaagggatctatgagatttagtactgacttcagagttcctgtgataactttctttaggttactccaaaagtctaaagtatacatgaaaagagaacgaccttcactctcccctaacagtaaagaagcataatctttaattcaaaattatccctggctatacactactataaacggcatctcagaatggcttttaagcaattagaacttaaacataaatgaatacggtcgttaaagtttgtagatttcatacctctactttttcttgctcctctagtgctaaaaacacagctgctcggagttcagcctttacaaagcggggtggagaggaggaaaagaacaaaaattatctccagacaattttcatggcaagaagcacaaacaccgaaatttccaaagtcaaaacgaaaaccagcaagattacaatgcttaggaggcaggtgcagagagaggtcagagggcatcctgacgcactctgaagaatatgacacaagctctcgagtccactgttcgtgcccctggcactgtctctctcagcacccatgcctctggtttcagctgggatctccatccttaaccatgcccaccagtagtgtgaatgaatgagaaacacacgccaagaagcaagcccttggacatccgcaccccgcttgttacagaaagctggaggggctggccgaccggcagcacaggccagaggcgggggacagccaaggagtggggagcaactcgaccaccggactgtgggcgactgtacgatcggaggcggggcggggaccggggggagcagtgggcaaacgagccccaaacgtgcagtgggcatcagaggggacagtgagcaactggaccccaaacgtgcagtggggaccagagggggctgcggagactggaccccggacgccggggtcggcctcctccgactaaagccg

SEQ ID NO: 41330 - DNA, 2370 bp, Bovine  19866880392907
  misc_feature (1)..(1): n is a, c, g, or t
ncttctaggtctatcctgttgctgcaaatggcagtatttcattcttttttatggctacataatattccattatatatatatatatgtatacaccacatcttttttacccattcatctgtcagtggacacttaggttgcttccacatcttggtttttgtaaataatgttgctatgaacactggggcacatgtgtcttttcgaattatagttttcgtcttctctggatatatacctgggagtgggattgctagatcatatggtggctctatttttagttttttaaggaatctccatactgttctccatagtggctgcaccaatttacattcccaccaacagtgtaggagggttcccttttctccacaccctctccagcataaattatttttgatagactttttgatgctagccattctgaccagcggagaaggcaatggcaccccactccagtactcttgcctggaaaatcccatggatagagcagcctggtgggctacagtccatggggtcgctaagagtcggacacgactgagcgacttcactttcacttttcactttcatgcattggagaaggaaatggcaacccactccagtgttcttgcctggagaatcccaggtacgggggagcctggtgggctgccgtctgtggggtcgcacaaagttggacacgactgaagcaacttagcagcagcagcagcattctgaccagtgtcaggtgatgccttattgtagtttttatttgcatcctctaataattagtgatgttgagcatctcttcatgttcctgttgtcttctctggaggaatttctgtctaggtcttctgcccttcatgagttgttttctattcaactagtttattcttcaggaagctggttctgaatcaactggcaattgtactagttttatttccagcccataaacataagattgtattattttctccagctatgttgacttgtttaaaaggtttgtagtggtgcctcaaagtgtttttttattagtatttttaactgctgaagattttcccctctatttttaattttcccaagtcatttcacacacaggtggcatcctgtttacttgacagggcatctaatttcactaaagtgaaaggcaatcacttcaatgtacagattgagaccaccagcatgtttaatggcttggatatctgtgtacaaaaagcaaatttgttgtgtctactgaagttgcaaagagcagcatattgggggctgtcaggtggagaagcttgttcaggaggatgttttggttgttttcaagtggtactagatgagaagacaatatctgtactgtcagacctgggtttgtactatctaggtgaaaataaaaaaaacttgagttttcttttcatggtcaatttttttctgtttattaaatgtgtcatcaaagacaaaattctatacaccatgattataatattaatatatcaaaaggcaagtatcccttttggcactgcaaggctggaaactgacatttatgcgtgggatttcatctgagcagaattctgggggccataccagaaaagcagtgtccacctgagcacaggaatcacttgctgtgaggagacaaagcacaaagttgggagactcgggctgtgggcttcatttgttgggttaaaatgggaaattctgagttctggtcctgcctctgacatttaacaacagtgaccccgggcaagctacttgatcacttttcctcatcctccaaatgggagtgacgtctgccttgggagagagcaacaagatacccagtgagggggcaaacgctccagaaacgggtgcacagtgggtactctgtgtgtataaagaccctctttcctcccatccgtctgttgcgcttttaaaatattttttaatgtggataaatattttaagtctttattgaatttgttacagcattgttcctgttttgtgttctggttttttggctgcaactcatgtgggatcttagttccccaaccagggattgaacttgcaccctttgctttggaaggtgaagtcccaaccactggactaccagggaagtccctgttgtactttttttaaaacaatgacctggatggggggagtgagtccatctcttgcatggcagccctgcaaccatttgagaccagccatccagtcctcacttcccaggactgccatctccctttagcctcagggtcagccctccaggttcccagggctctgagtgtcctgggatgcttatcttagaacacagcctatcaaacctcggggccgtagaccaccagtttcatagatgcagttgttcccatgcagagccccggcgggaaatcaccatccttatattagggatttttctagtaaccccaacagtgctaactttttggc

SEQ ID NO: 41331 - DNA, 1372 bp, Bovine  19866880406280
  misc_feature (1)..(1): n is a, c, g, or t
nccaaggaacaaaaatttcagagttctgaagggatgattgaataatataatgaagcaataggcttcataactgaagacaattctggtaaggccgagctggatagaagaccattgcctcgaataatattttccctttatatttctcagtctgtaattttaacctgttgaccctgcattttgactaagagctaaaatggttcaagatcaacagactagccctcaacacctggaagatcctgttctcataagcatatcccagaaatcataagcaaatgttgaccttctttttacaaggcaaaccgctgaggcagaaaccaaaataccagcaagtacgcagacatctaaggcttcatctaggcaggatgtaaaatgtcaggccattaatcttatatttttaatgcagtggttacaaaggatggggctgatgtgggattggaaaacaatactgagtttagagaattcctccccgcctcccttttttttaacccttaaatactgacacccactcaccagggttgggaactagcaaaagctacatgggattccagggtgagcgttcatttcccagcctccattccttggctgtcaacaaaggcagaaaatgcctagtcagggcccattggcgcttgccaacacagagacctgtttcttatttcatccggcagagtgcagagctgtagttaccatcactaaggtggagagcttggcatccctccaacaactgataccgtgaattcagcaagacaaacgaagcaatcagttgtgagacagaaaaacaggggtgtgtatattctaatggtaagccatggttaacacacagtgttaggtatcagtattttgtgtacttttgagtccagccacctcatgcgaagagttgactcattggaaaagactctgatgctgggagggattgggggcaggaggagaaggggacgacagaggaggagatggctggatggcatcactgactcgatggacgtgagtctgagtgaactccagaagttggtgatggaccgggaggcctggtgtgctgcgattcatggggtcgcaaagagtcggacacgactgagtgactgaactgaactgaagaatataaatgaatctacatttctctatgtgaaaattctgtttccacctacattcctcagataggttgactgactcaaaaacttaaaccccagaattctagtagctaaggcagttaaaaccaaaagaatgcaggtttgccttgactagtaagaaacaaaacccagtatcctctaatgtagcggtcctcgaccttttttggcactagggactggttgcacggaagacgacttttccttggactaggatggggtggggtgggggatagttttgggatgattcaagg

SEQ ID NO: 41332 - DNA, 966 bp, Bovine  19866880442316
  misc_feature (1)..(1): n is a, c, g, or t
natggggtcgcaaagactcagattcggctgcacgcctgaacaagaacaacaatgttagtcatggctggctggctcctagcaggtattcaataaaaatgtgtctgatcaaataataaatgaagtgctttccctgcccagtcctgaagcaggggttcactcccatcactgcgggaggatgttgctaacagaagctctgctgggaactggatttgtcggaatttactgggcggcttgggcagagagcggagtcctttgctttgcatttgttcctgggcttctcaaagggcagtgaggggtcagagagggtcaacaggcctttagaactagcaagaaaagctgtagagccaggagaaaggccatgatcccaaaaccctactctgttacataggtaacagtgaggaggtgctgatgttcacacggcattcctctaaacccttcacgtaccattgccttacctgcagggttcatgaccaatgctactggcctttccagcctggatgggagaggagtctgacggagaatgtgctcatgctaagtcatttccatcaagtccgactctgcgaccccatggactgtagccaggctcctccattcatgggattctccaggcaagaacactgaagtgggttgccattcccttttccaggggaacttcctgactcagggattgaacccaggtctcctgcagctcctgcactgcaggcagattgtttacctctgagccaccagggaagcccttggggggagaacagatacatgtacacatatacatgatacatgtgtatgtatcagccgaatccttttgctgttcatcagaaaccatcacaacactgtctgttaactggctatacccaaatacaaaataaatagtctaatttaaaaaaaaaaagaaaagaaaagaaaaaagactgttggcctttcctaaaaaggctcttccacaccctctggcttcgttcatactgtccc

SEQ ID NO: 41333 - DNA, 2585 bp, Bovine  19866880579030
  misc_feature (1)..(1): n is a, c, g, or t
nctgtctagtcaggctatggtttttccgtggtcatgtatggatgtgagagttggactataaagaaagctgagcgctgaagaattgatgcttttgaactgtggtgttggagaagactctttagagtcccttggactgcaaggagatccaaccagtccattctgaaggagatcagccctgggatttctttggaaggaatgatgctaaagctgaaactccagtactgtggccacctcatgcgaagagttgactcattggaaaagactctgatgctgggagggattgggggcaggaagaaaaggggatgacagaggatgagatggctggatggcatcaccgactcgatggacgtgagtttgaatgaattccgggagttggtgatggacagggaggcctggcatgctgtgattcatggggtcgcaaagagtcggacacaactgagcgacttcgcttcgcttcccttcgcttcgccatataagcccccaggatcctggtgggaacagaggcactggggcaagggactcgcccagcctctaagtcagtgaatcaaccagccatccttccccgaccacagcatccacaggacctcctgggatgtgtccacaggctctgcctacctctttgttccctcagaattccacagcagcactctttggaagagcggctgaaattcagcaccaggggaaataagcccatctgaacaattggttccaagtacatccctgaggcagttttccatggtcaaaggacacgaggggaagtgcagccttgaaacgaacgcagtggcagctaactccgatccagttacatcaaaaagacaacagtggtgggacctccctggcttaagctattgcctccagcatctttaccacccaacctaaaatgactgagtacagggtcacggggattacgaacaattcctgacttggttgagttgctttctcaataaacacgttaaccattcctggttttaatgtatgtctcaacttaaagctttcttcaaacaaaacccacatcaaagactaaaacttcaattcttcagtggttccaaggcactgtttttgtagaaaatgcctcactcaccttcggtctgaggtttgtattactaaaagttttcttcagggcagatcccagaaaccaccagctgtttgccaaggacagggggatgctgtggtcctccaggcccccaggaggatgggtgtcagctgaatatggttcatgcaataaacacagatactgtgtgctcagcggctacgtcatctccaactgttgtgtgaccccatggaccatagctgacaggctcctctgtccatgggattctccaggcaagaacactggagagagttgtcatttccttctgcaggggatcttcgtgacccaggtatctcctccactggcaaatggattccttaccactgcgccacctgggaaacccagaacacaaatcctagtgggcctgttagtgacctcccagcatcctgattctctgtgagatctcagattctccaagggggctgcgttgccccagggcccaagcttcagctcttccctctgttttctcggctgggaacatcagaggctctcaggcagccccccttattcccaccacactcccccacttcaccccctggcttcttaaaggagcccagcttcgtgtttttcctaggcttcttggatctattcaaagccatcaaaccaagggcggctcagattcatcggaactgaccggctttctgcatggagcaatctgaagttctcctggaaggggtcgctggaagctttcaggaaaagtcactggatttgttttcggaaagcttaatacaggctcttggcaaagcggaatgccgacagggccagatcgtgcacagagcagaggagaaaagaggaacttgcggttggagaggttcagagggtgacctcaaggccacatggctgggtcagaagggcgctcagatctcaggattgctgctctgcagcccgcctgtcccctctccttctcaggaaatcggggattctgaaaaacaggattttctctaagggaagtagctcagtgagagcagagcagaggcagcagggaagcctgggcccaaagtggacctttcgtcgggggcacagccagcctgccgggcgccagctccggctgaggtgccgagggccactgtggacggctggggctcatgtcccggcctgggtcctgcctctagctgggcctccacctggctgttcacctcccactgctgccacttcacacgctgcttgccgctcatcctggctgcccagagaccaagcctgacctcccgtccacggatccccagacgccttcctggcctcagttttcgattcctgccaaggttgctgcaccgaacgttttgggttaatcagacagtgctctgctgttttacgtgagggtctctacctggaattctttcaccttctccaggccccagatggacaccaacttggtcttcaagacttggatcagagacacatcatccagtgatcccctttgtacgttcgtctcctacaggccccaccatgctctctgaggaatgttgcgtgtccctctcaactgccggcctctgagctc

SEQ ID NO: 41334 - DNA, 1696 bp, Bovine  19866880633531
  misc_feature (1)..(1): n is a, c, g, or t
naagagaagagtcacttgggagagatcccatggcgctactttagagcttcccgatagagtgggtgggaagacaggaaggatcaccaaagtcctccacataaatgcagcagcagagaggcgggaacaggagccatgacgcgagaggggtgggaggcagcagtcggagcacaggctggaggtggaggataggaggtggtgtatattgactcccaaactgggcctctctgcacactctgaactcaggacagatgtttctttctatggcaaatacactccgtttgctctctgcaaggggcagggaaggcggctgcacacaagatgccacgcccggggacattcctgccaagaggaagggtgctcacttactgtagccggcctccttctctggggtctggaaggaaggaaagagaagaggtcactggtgcagctctgggggccatccacatccccccttagcttgttcccgtcccccttgagtgtctgagaggtttggaggtcatagaggcaggggaacctggggactccctgactggaagtgacttggggagggggcggcttgtgccagagcggggtggcgctaagagtacagatcaagtgtgagctcagcaaggagactccaagatcagagtgaaatggaaaaaggtgctctcgtggtgagaggcagagagggcgaggtgggcaggtgtggagtcggaggtcccactaactacccctacaagccctccctccaggtagagtgctctcccggtgactcaccaacggggacttgtcgttcatgtaaaccatggggtcctgcagagggggaaaataaatcagaggacttaggattctataaccaaaaactccaaggatgcctggagagcagttcactccagccaggtggggagccgaaaggggacaagatggcatggatctctcccaggggagcacggttatcagaacgcgttcaggggcttcccggctggctcagcagtagagagtccacctgccaatgcaggagacaccggtttgatccctggtcttggaggattccacatgctgcggagcaactaagcccatgcaccacaactactgaggttgtgctctagagcctgtgagccgcaactactgaagcccaagctcccaaaagcttgtgctctgcaacaagagaagccactgccatgaaaagactgggcattgcaaatgtagagtagcttgccacaactagagaaaggcccgtgtgcagaaacgaagacccagcacagccaaaaataaaaaaaataagtaaaattatttaaaaacagaaggtgtccagcagtggtgtcggggcatgtcctctccctccccttgctgggctttctcctcaccagggctttctcctcctgcctcagccactggtaatcttccaccatctgcttctgctgcttgtccaggagttgacgcatcttgagcctctcggcctcccacagctgctgggcctcctcccggctgctgggccggacgaagtcctcctcctgggagcacagcagaggacacagtcagcccagtctccggacccagggaggacagtcctctggagagccttgtgggagccacacgccttggcctcactggcctcagatctgcagccatctatgcagatggttattactgttggctccatcaaccccagtcacatgcagtgtgtctgtgaaatgctgaatcgcagggcatagag

SEQ ID NO: 41335 - DNA, 2846 bp, Bovine  19866880644346
  misc_feature (1)..(1): n is a, c, g, or t
nttctagtaaccccaacagtgctaactttttggcagctatttcatggtgacacaacttaaactccactttttaatccatgctgttgctcaaccacatcttcctcatcccaggatggaggagatcttttttctctacatgaagaacttcacatttagcccatttcactggttgcattctttttcccttggtatgtcttccctctcgtgcagatgtcaagggtccttcagccagagccacaatctcccctaatcctgtgctgatcttagtgcttcttgtctgacaaccacaaactccttaaagccaagcgcagcggtgtgaacaagggccagttcgaacagccattgctcctcaggttaacacagacgtttgatcagttgttggggaaaccatctgaccagttgtgaattcacctgcttgtcatctggcctcctcattcacttctcaagaaaatggggaagagctcaaaacacccaatggagcatggattcatcatggtgccgaatttcccagcccaataaccaacacttaagcacgcacaaaaagagaaatggggtttgctggagctgaaagctggaagagatggaaaaggctgagactgggactgatagtggagaagttggagaatttagttgatggttaatgaggacagggtgtggctttgaaaactacaacttttaggaaattggagagaaacagaagttccttgaaaaaaggagcgaatcttaacattctgtgcttctgggtcttccctcgtggtccagcagctaagactccatgctcccaatgcagagggccagggtttgatccctggtcagggagctagatcctacataccccaactaagggttctcctgccccaactaaagttcccacatgctgcaatgaaggtcgaagatcctgcctgccacaactaaaacctggagcaaacaaatgaatacaataattatatattttttaaaaattctgtgcttccatacaccttatagtgtgttgctatcttgcagcactggctggccataccactgccaagagcaggcaacatccagggtcagaggtgggcttgaagcaagtgctctagtctctgcccccatcctattcccaggtctcttcctgataaagccctgcagggctgggaccagcaggagacacccttctctccccgagtctgctgtcagtgaggtcacactggtagcttgaaatcagagatgccagaagcatttacaccagagaaatcaggaaacactgaaattgagccatctttcctctggattgctggttgtgaaactcatgttcatgctcagtcacttaagtcgtgtccaactctttgcaatcccatggactgtagcccgccaggctcctctgtctatgggattcccaggcaagaatactggaatgggttgccattcccatctccaggagctcttcctgacccagagatggaacctgcatctcctgcattggcaggtggattctctatcactgatcgacccgggaagcccattgtgaaactcatacaaaggcattatctgagcctctcctcctgcctcccatttctcacctatgcttcattgtatggcccaaattctattttctaaatgaaaatctgcctctccacagggtggtatgttgctaccacctcatttcccaacagcccttcagcaccctcctggccagctctgtatcatgtcacatgatttcctgatcttgctgtgttcccctttcctgagaccccagggacccagaggcaagtccttttctgtgatcctctgacacctaggggagaccccattagatcctgtatcacattgtggctgctttgcttaatccttttcctttttactggatgagtccctgcttatggggaccctcttccttcttctgtttatcttcttatctctggattctggcatgcctcctgaaacatagcaaagcagaaagggagagagaaaagtagggggaaggaaggggaaggaggagaagggaagaagaagaaaaagaaggaaggaaaaaaggaagggagggagggggagaaaaaccagccagcccaaatcactcatgaactggccagttagaagcaaggggagggggattttgtgaagggttggggaaacaggggcacccagaagtcacaggaggtaaaaatgctctgcccagctgtgaggctcagagcctttgaactagtgagagaacagaggttctatgaacaagaaagggcaggtgcagcacctcagccagccccctccagccccctgagagccagcccccatcaggggacctctggtcacaaagtgctggcaagagaatgagccggagtgggtattgtgtgcggaggtggcaggctgaaaacgcgatagagtctcagtagaggttttttgaatgacattgaattagagctggcattaatcacaaccttcctgggtccttcctttgcaagatagtggggagggatgcttggagaggaggggaagggattaaacaagtgatggattgggcttccccagggcaagcagaatgcctccacccagtgggaactggggtttgaaagggcttgggctggggaggggcactgtgtggagccagtagggcccggcttcccagaaacacaggcctggctccccaagactgcaaggtcattgccaattcgttaagtggctgttctcagcaggcctctgcagaggaaaggcatgtgttccccattttgttgatgtggaaacggcaagaggaagtgactcagagacagagtggaaataaagtgtgtgtctcatgacattctggcttctgctggacgcagaggactggcctttcaactgtgtcctggggggcctccttccacgtacagaacaga

SEQ ID NO: 41336 - DNA, 1114 bp, Bovine  19866880723337
  misc_feature (1)..(1): n is a, c, g, or t
ntttgcactggtgcggtgttgtcttcctgaggtggagcatgaccatctactatgtgtggagagattgtcatccttcatggggctcgtagttctctgacggtcagcccaacatttaaccttctcctttggtcagccccctccctctgagagtctcaggacatattagtttgtgttgatggttgttggggtcacagagatgaatagggaataattgtgtcccagtcagagctgtacaaagatggaagagaatgctttgggtggtagtgagttccctgtcactggaggtgttcaagcaaaggccactgccactttcaaaacgtgggactagagggcccctaaggtgccttccaactcagacatcctatgaactgatgtgtatgtatcatttctgctcacatgaaattaaaccatgtctgagaacctcctgtttatatttatcccggcaagggcaggaagggctctagtactgagtcctgaagaatatgagccgcccagttgattcctggctcatctcccatcagagcccagtgtaggtttgtcttgaataaggcagccagggaatgcaggcctgaggcaagggatcctgtttccagctgactcagttaggcccagaacgcctgcccctggccctgccccgcaaagcccacttctcctttcctagcctcttctgcacgatggagccggagcccatccagcccggcatgctcatcgacgtctgcaaatacctggactccctgaagtaccgcgtctggaggaagatggttatgtgtgttgaatctggtgagtgggggccccaggcaggtgtaagaggctgggggaggtcatgctgggcagagggccagctgaacgaactccttcccgcttcccaccccataagacctgcaccacctccctgcactagtcacctttccagcctctttcacgaaggtccctgtgccctgctccgctgcatgtcctgctgctcaaaccattcctgacggagcgctttcctattttgggtcctgacacttggccacctctccggaaagagcagctgacttccctttttcttcagaaccatattatatatataatgaaagagaagagctcctcagtttagggctgcctctcccaa

SEQ ID NO: 41337 - DNA, 1295 bp, Bovine  19866880775457
  misc_feature (1)..(1): n is a, c, g, or t
ngtagcaaaattgctgttagccttttacaagggctatgcaaggaaaaggtctcatgtacccaaaggcaggcatacaaatgatgccaggtggccaggctaggatggggaagaactgacccttagggactcaagtttgagtcatgatttgagtaggaggccccgagaatgggggtttatgggcagaaagctcagcaatgtgccatcaaaaaaaaaaaaacaaagaaaggaaggaaggaaaaatgaaagagaaagaaagaaggagcctggtatttctccatagttttgtctttctcacccaggtataaaatttcactcatacattactttccatctgttctcaaaagtatttaataaagagactacttaggcatatacaattaaagtaatattaaaaaaaaactccagagattcgatgcatattcattacacaaatatatatgctcccatggttacaaccagctgcatgcagaaaaggagacagagaaattaaaatggttgtggtaaagaggtgagtaagcattctcttttaatgcgtttgatttcagtgacacatatttctcaagaatcatttgggctacctcccgaggcatagtggaccccagcccaggcgtttgtgttccctagagaccaggtaggggtcagaaccttggggtctggttctataaaagtcatgaatctagctccccacatgtcagatgtaagtctatgtttggcataacggttcttggccctttcttcctttagttggtctttcactgaggtttctgaaagcacacaggaagtcagaaaaaagaatagcaaccccactcctccacagcttcaccacagatgagaggcagtggggggtggggtgcagagcacagcagatcccagaaagggccccgtgtcagaggaggggcgtggggactggtgggccctccgtgccccaccgggcagggatgggagacggcagaaataggtgggagggtagcagcaggcaggggttacgtccacagccaggtcttgtagggtctccagaggaacccagctccggtacctccctccttctgttggctgagaattttctgggtacctcacatacacccacaaaagctatagcatgtgaattcttttgaatcccatctaacttaaatgccaaagaaatgcttggttaactatgccaagtcaccttacctgctgggacctcaattttttcatctaaaaagtgagggtaagaggaagattttttctaacaaagtctagagcatgaacatttcactttaaaaggggttcctggggtggctcagctcattgtt

SEQ ID NO: 41338 - DNA, 1122 bp, Bovine  19866880824657
  misc_feature (1)..(1): n is a, c, g, or t
natcatggttttatagataaatacatcttcacagccagcaagtaatgcttccattattattgcatagtccattgattaattttcttctttaagtccaagtggagggcagaactcaatggagagctcaataattaggatccctaaattgaatacaccaaacagcttttcagcacatgggagatatggactttggagctcagcagtcttagggtaagagagtaggtccacaaaaaaaagcgggactccctctgaaatcttctattttctcattagtaaaatccttttaattgttaaaaaatacaagtgtgattgtgtacttatgatatgtcatactaacagaggcacaaaatatgttacttcactttcatctcttcataacattattctgtgactctaaggttttcccctggctcttgagcaaatagtactgtagttagtaactcctgtgccctggagaacctaatgtgtggaccactattagcccttatgcgtgcacgcatgcgctcagtcatgtccaactctttgccaccccatggccaggcttctctgtccatgaaattttccaggcaagaatactggagttgattgccatttcctactccaggggatctccctgatccagggatcgagcccacgtttcttgtgtctcctgcactggcagcagattctttaccactggcgccacttgtatcccttaccttgacctcaaatacttatcctaccttctcccataacctgttgtagtaaaatcacagtggagaggggagtgctgctggtgatccgcacatttatgcccctttatgagccgatgtccatttaccccaaaaacgtatgctgggagatgtaatctaatctttcctagcagatcttggttcccacttgcttactgaagcatctatgtgattttagtggtttaaagaaacattaaaaaatatgatatgatctctaaatagaaaccaaatactttggtggtcaactgaagaaatacttttagcgtggaagggaaaactgactttttttggatctatggagggagagttggaatgtcagtcttccgtgtgacttgagatatgaatatgtttactactgtgggctacttaagcatttttcaagggttttttt

SEQ ID NO: 41339 - DNA, 1221 bp, Bovine  19866880883339
  misc_feature (1)..(1): n is a, c, g, or t
nctaattattgatatgattgactggaggtatatattgaaataaaatatacacacatgggaattccctgccagtccattggttaggtctctgcactttctgctgtggcccagggttcaatccctggttggggaactgagatcccacaagccatgtggtatggctaaaaaaaaaaaaaaaaagcatacagtttaaacaaatacttcacctttgttcacttcaccttttgaacaaatgcttcatgattgtaattgttcaattgtaaaacctgttaaaagtgtttttaaaaaaagaaggttaagtgaaatatgctaaagtttactgtaagttgggaagggaaaaaaataccagtcttttccacaaaactttttctctctcttaatgaagaaaagtgtaattcaaaaaggctttgatgatggaaaattaaaaaaaattttttttgaacagtttttgttttatttaaaaattatttattttttattgaagtatagttgatttaaaatactacttaagggaattccctagcagtccagggttaggactcagcactttcattgccagagcctgggttcagtcgctggttggggaactaagatcctgaaagctgtatggcatagccaaaaaaaaaaaagaaccaaagaataattttaaaactgaattaaaattttaaaaataaatattatattagtttcatatgtacaacatagtgattaggtatttttatagattgtactccatttaaagttcttacaaagtaataaaatttaaagttattacagctatatttctctgtgctgaacagtatatcttgttgcttatttgttttttctttgttctcttctgtctctgcagatgaagatctgataaagtatggctggcctgaagatatttggtaggtaacaaattttggttctgctgtttacagatcgttatttactttctgagacttggccaaccacctgactcctgtgattaaaactacaactcatggtttgccatttgtttatgactgttcagtggtaaaaagctgaccaccagctcccttcacttataagtaccacgttaactgggaaggaggcctcagagatggacctcaggcctgactgaaaaggtcttcagaacataggcttacttttactgcctgtgtgtctcctcagagtaggtggctgagaccgccacactgaagccccagagatctccagatctgtcatgcaagagataag

SEQ ID NO: 41340 - DNA, 825 bp, Bovine  19866880890396
  misc_feature (1)..(1): n is a, c, g, or t
nttcttccctcccttccttccttctcttttcttactgccttttcttacttgtcttttctctccccttctctcgtccacgccctgtctgcctccctctcttgtgtttgtgcagagcactcttttatctcctttatatttgacttgtggatgaattaaaattgtaccatttgctttgtggtttgattgttttttttgtttggccttctgaggccctgcaaggaatcaattgtgctgtgttgggcagagatcaaaaagctaaaagaagccagggctcaacccccagggtacaggtaaagccagggtggtggggtcaggtacctgtgtgctccagcccttcgccccagtgcctgacccgagggcggctttccagtggggacccagacagcccttccactgccacaaagaaaagccaatgcaccctcccagccaccatccacgaaaccagggctctggggggctggagaggggtcccagctgcctgagcagtgactgcggctttatttgctctctttcctcatttgcaagttggttgggagatggattaaccagaaggagcatctctatatcaggaggtcaaggctgggagcatccctgcttcaggagaggtgggaggaggggtagcggggctggggctgcatccacagagcaggaggggtcagaaataagaatgacccccagggggttggttattggaatgaactgaggcaggtggactgggcctgcggtggccagctttccctggagtgtcagggagagcatgtggaggtgtgaaagggtgggcacctgagctacctgtcccctgaggcaccctcaccccacacatcc

SEQ ID NO: 41341 - DNA, 1001 bp, Bovine  19866880977845
  misc_feature (1)..(1): n is a, c, g, or t
ntgtgtgtgtccttaagcctcacatgggaggtcattgcccaaccactcaggaaacagtaacacagtatgagcgtaaggtgtctgcccatggcccggcggagctggctagatgggcgccgtgtccaggcataactctgttttctgctgaactgaaacgtggcctcacagtccttctcaacccaatgttccgggctctcagaatcattgcctagggcagcacatgagacagcataaacttgtcattccttaatatcagttttgcaaagggtagctttgcatattaaccttaacatttgcctgtattctcagtcactcagttgtgtctgactctttgtgatcccataggctatagcccaccaggctcctgggattttccaggcaagaatactggaatgggttgccgtgccttcctccaggggaatcttctggacccagggaattgaacctgtgattcctgcattggcaggtggattctttaccaccagaggagcccattacgtattacatattaattaatagtacatattaataatatctccaataataactaacaattataattattatatataaataaaacaattctaattaacaataatattatatattaattaacattaatgaccacattaacacagtacagctagaaagggtagttgttggaacgggaaggagagagactattttctgctgctaggaccagggaagtctccctggagaaggtggcatttgaactggccttgaaagctggggaaggaggggaggggcccttcgaagcgcagggacctgcttccgcagccctgccccttcactaccgccttccccagccccgccctgccccgagcgaaccactcacctgtacatgatgatgttcatgtagcagctgtcgcgctggaagcaggggctcagcaggatgtcgtccccgcgagtgaagcgtacctccacgggggtagtgggccactacctttggggttcgcctccagcatggccttcagctccag

SEQ ID NO: 41342 - DNA, 1673 bp, Bovine  19866881001781
  misc_feature (1)..(1): n is a, c, g, or t
nttgttccactaggctcagaaaaattatctccctcctccccctaggaaaactaaaggggggcagttactcatctctccatctcttgacctcttgaatgtagtcccaggacctaagggtggtaaacagatattcctatagaagcaacatgaagcaagattcaccacccttcttggaaagctttaaagccaccagttcagttcagttcagtcattcagtcatgtctcactctttgcaacccgatggcctgcagcacaccaggtctctctctccatcaccaactgccagagtttactcaaactcatgtccattgagttggtgatgccatccaatcatcttatccccttctcctcctgccttcaatcttttccagcatcagggtcttttcaaatgagtcagcttttcacatcagatggccaaagtattggagtttcagcttcaacatcagtccttccaatgaatattcaggactgatttcctttaggatgaactggtttgagctccttgcagtccaagagactctcaaggtcttctccaacaccacagttcaaaagcatcaattctttggctctcagctttctttatagtctaactctcatatccatacatgactactggaaaaaacatagccttgatcagatggacctttgttggcaaagtaatgtctcttgattagcagtgaatttgagcaacctcctccagctaccattgttacatccttcaggagcaagaggttcatatgggttaaataatgaggtatcagccaaagatttagggctaagggttcatggactgcattccgaagtaggaccaaccagaggatcaggtacactggtgtaggtgggcattgcttcttgtgacggtcatttcagctggatctgtgctctggaaccaagagcaaaatcatctctggatataagagctcagagtggtctaatctccactgtatttggcacctagttttccataagcaaccccccttttacttacaagactcagaaaaacctctggaaactattaatataaactggatctagttttgcaggtgccaaaaattgtctttttaaaaaattcattaaattctgtatcctatcattcgtgatcatgtacatttcaattctagtccttcagaaggagaaaaagactaactttcaggaagtagaagaaatatcagcgttttcaaacaatttgtctttgatgggacagatggaagtcagatgacctgactggtgcatctgaagaggatttgaagaatcttcaaactaggaactttattcactcgtctatattgagatcaacagcttggaagagtctattttccctgatttacaaaaaataagttgtctttcggcttagaaaatactttttattttaaaaaagaaagactttttgagatcgtgagaatgtagaaaactttgaagactgacatcatttgtgaaattattggagtgacccttgttcctaaataaggtctctgttttgagatgatcttttctgaggaatgttttaaaaatactatcgaataccttaagcataaccttgctttctcttagccaaaaaagaacatagaaaattcttaactgaaactgttaagtctacattaagccagtaaaactcttaccataggaaaagacacaatacattatcttgctataatactgtattaggcttctta

SEQ ID NO: 41343 - DNA, 1559 bp, Bovine  19866881028053
  misc_feature (1)..(1): n is a, c, g, or t
nctcctcctcctcctctctctcctccacatccacgttggtctccagccagtgataggaggggcagggcttcagatccggagtgtctcggagctccaagggtggcaagggccggcttatcagaagccaccgagacacacagcccagaaaggccacccgcacccagtggggcatgttgtgggtgctggcggagcggtggtggacattgagcacgaagacggtgatgacaatggacagggtgacgaagatcatggtgaagagcaggtactcgctgatgagcgggatgaccagcgaggtggacgggatgatctcggtgatgagcagcaggaagacggtgagtgagagcagcacagagatgcacagggtgatcttctcgccgcagtcggagggcaggtagaagacgagcacggtgaggcaggagatgagcaggcaagggatgatgaggttgatggtgtagaacaggggcaggcgccggatgacgaagtagtaggtgacgtcgggcgtagacctcggcgcagcagtcgtacttcttggtgttgtaggtgcctgtggcgttgacgatggcccactcgccgctctcccagtagtccttcaggtccaccgtctgctccatctgcaccaggtcgatcttggccttgtcgtacgaccaggagccaaacttcatcttgcagttctgctggtcgaaggggaagaaggtgacgtcgatgctgcaggagctcttgtagatggcaggcggtgcccagtgcagcaggcccgaggagaagaggtgggccttggtcatgtgggtcaccacaaactccccatctgcactgaggagaggagaggcattggggggcggggggctggggcaccccagctgcccaacccaggctactccagataactaccagcagggggaccccaataacacagccagaccacaccgggttgttgggacttgaagaagcaagactcttcagcacacagacagctagagctacctgagttgtctttcaaacaccatcttcttagctacaaaagtaggaattttgaagaatataggaaagtaccaagaatttttaaaataatcactgctgttgatgatatatatatatatatatatcacatatatttcatcatcatctagacaacacatatagaatttttatatatttgtgatcatagggtatatacatagtttgatggcctgtttgtattcatttaatattttagggtaattgtgctgcaaccccatggactggagccacccaagctcctctgtccatgggatttcccgggcaagatactggagtgggctgccatttccttctccaggggatcttctccgggggactcagggattgaacccatttcctctatctcctgcattggcaagcagattctttatcgctgagccaccctggttgtttttttactatatccccccaccatctgccgcaggtggtgatgaagcccctctgctggaggtcttgtcttttctacctgggattttagtttcttcctcagcatagacctgataattttgctgagaaggaggaatccatccagttaacagccatat

SEQ ID NO: 41344 - DNA, 1405 bp, Bovine  19866881049392
  misc_feature (1)..(1): n is a, c, g, or t
ntcatgagagccctgtgaaatatggcatcatgaggatttctagtttggggatgcagaaactgatgattaatgggaattccctggtggttcagtggttaggactccatgcttccactgcagggggcatgggttccatccctcatccaggaagtaagatctcgcatgtcacgtggcatggccaaaaggaagaaaagaagcagatgcttaaggagattcagtgacttgctcaaggtcactcagcgggtcagtggcagaaccagaatttgagcccagtccatagtccagtgcccaagttggtgttcaggggcgggtggcaagcaagcatgctctgagatgcagtgttacctttgaagccacgcatgcccattggcccagtagctcccagcttcccttcatcacccttggggccgggcagtcctggggtccctctctcccctggcagacctaggggagacaagaaagttttggggcctcagactcagaactggaagggccctcagtgaccactgtctggctcaaccatgcatcttcctgttgcctctgcttcttgatttttttcagttaaagatgctgcaaaaacagacctcaaaaggccaacacaaactctccccgtcagcacctttaacccaatgagtctggatccctccccaagaaaggtccgagtctattgtgagcaatgtcggaggtgccaaactcatttgggcgagctctctttagctttacctatgctggagatttagatttgcaaaaaaatcttgagccttttgaatgtgccaggcactttcctgaatgctttttattaagtatcttatttaattctgcccataatctgaggtgttattccacctgtattaccaatgagaaaactgaggcccagagaggtgaggcaacctgcctaaggtcacacagcagacactgttggagacaggatcttagccctaatgggttggcttcatctcatgctggatgaaaagggcttattggtacttagggtaggaagaagaggaaatcactccttattccatagaaaaaaaaaatagaaaggtcccttccctgcaacaaacacagggaagtgtagagaaggggatggcaggctgacaaggagggaggaagtccaaaagctcaataattggggtgagacaggctgttgatctatcaggccccagggctcctggccccaaggcccgtgacaccagctgcaggtcaccatagagaccagaagtcaacaattgcttttacccagtgaggcctccacccctggaggcctgacctaagcccaaagttatctctgcaaagcagggcactctgattaactaattaattgttctttcctgctttgaatgttagttcgttttctttgacctttttccaagacatgaagaaatctgcctttcacttatgattt

SEQ ID NO: 41345 - DNA, 1812 bp, Bovine  19866881069997
  misc_feature (1)..(1): n is a, c, g, or t
ntttcctcggcaggcgacctgctccagaaagccgtcctctaacctgagtgccatttgtcaccctttcaggaccaccgggccccaaaggtgatccgggggatgcagggaaagaaggcgagcctggaatccctggactacctggacttcgaaggtaatggaggccccgggagggacctggacataccaggaagggaaggggctctcccatccatccctgactttctgttttattgttgatgtcggtgatggggctctcaggacagtccccaattgactcagcttcagacgccctgttctgttaaaagactaagaggttgttggtgtaacgtggtgtgttttagtctctcagtcgtgtccggctctttgtgaccatgtggactgtagctgtcaagctcctctgtccatgggatttcccaggtaagaatactgaagtgggttgccatgccttcctccaggagctcttccccacccagggatcaaacccaggcttccgtgtagcaagcggattctttaccatctgagtcaccaggaaagccctgctgttaatataagtcagttaaaaaaatatataagttctttctgatttggaaagcttaaaacattttttaagtagtgtaacactaagatggagcaaatccttttccatagaaagtaccaggatctgaaggacaagagtgcataggagtcttacagctccctgaaccccaggtcagggcccctgagaccaggatcatcggaaggaatcaagggcgtcctctgatccagagcaacccttcaagtatgccacaccccctcggcatttcctgggtccccagcacttgaccccttgcttctgcggaaaccaccccagtcagtagacacccgtcctctcctgccctctgctacctgccctagtgacagcctggaaggtccagtagctgacagggagggtactttgggaccttctggaaagaatgtgttctccttagatgccttgtctcaggagttcctgttccattgccttatcaaactttgcgtcccagcctgtcaattctggagcctctgctgtgaacagcatttttctaggagagtgtagagtcttcttggggcttcccagggggcaggagacgaaggagacatgagtttgatttcctggattgggaagatccccagggggagggcacagcaaccctctctggtattcttgcctggagaatcccatggacaagagaagcctggaaggctatggtccataggtcgaaaagagtcaaacataactgaaatgactgagcatgcacacacttagagtcttctaagtcagcagtccccaaccttctcggcaccagggaccgatttcatgggagacaatttttccttgaacggtgaggtggggagatagtttcgggatgagtcaagtgctttaaatttactgtgcactttttttctattattattacttcagctccacctcagatcatcaggcattagatccttggaagttggggacccctattctcagtgatgtaagaaaaggggaggcttatcaggggaaaggtatctgcttatttatgtcaggaataacacctccaaaccctctccttcctaaatctctaaggaggctgcaaacagggggaggaggcagaggcttggtggaggcggagctcacagcctggccttcactcctggcctccgcctctcagcgcagctccctaaacttcagaagttaaggatccccaagggcttccagagcagtctttttcttcctcagtcagtgatgggatggggggacccctgggcatatcgtgcatgagattcagaattccatgacagcag

SEQ ID NO: 41346 - DNA, 1422 bp, Bovine  19866881071884
  misc_feature (1)..(1): n is a, c, g, or t
ntttaaaatgattaaacaaggcaatttaagtgatacagacaaacttgaacactgcgtgaagtggccatctccatttccaagggccagagcaatggcaaatgggagtggaaggtaggacacttttataggataaagaataaggaacaaagaagagataattagagaatgaatagggaataggaaacaagtgtaaagctgaatgggcttccctagtgtctgagatgataaaaaaaaaatctgcctgtaatgcaggagacctgagtttagtccctgggttgggaagatcccctggaggaggacatggcaacccactccagcattcttgcctggagactctgcatggacagaggagtgtggcaggctgcagtccatggggttgcaaagagtcagacactactgagcaactaagcacataaagctgaactggcatttggattggtatttgggttggcgtttgggatgctactttgattctgataaagcatagcatttagaaggacgcaaaagttatctgcattttgacctgctgatgtgacccccctgggcaggagcggttccatcttgggcctagaaatatatttcaacaacacataatccctgtctgcagacaatgcttggtacacttgtggattcatggaccctctgcctttattcgagtccttggaggtgtgtgattcccaggttgggaaccactgttgggtaaaagaaaaaaaaggcaagaagcgtgcattcaactaacctgggaggaaatccatggccctttcctatgagcacatatcaggaatatatgtgtaccctttcccattagcacacaacaggaatgcgtaggttggggcagctgcagggtccatggtgctgtggcctgtctcctagggatctccccagtgccgtctgcaaaggacgtcggagaagacttgggagtaggatcccggctgcagtggaacacagaggggagcccccaggagtgtatctgaccttgtttctgtctccttatctgacctgacttcctggcagtgacatttaccagatggagaaggacatcgccttagagcaggagaggaatgctcgctaccgacctcccaaaatcttagagcccacagccttccaggaacccccacccaaggtgagccaagccccgaactcattggccccagtggccccatgaatcacagcagagcggggaccctgtccaacccctcccagatctgactgtgcagctccccttacagtggtggtcagatgggcccctgcgtcttctcagcccttccacccaaccatccatcagccctgaggcagcccccatcagtcacctcggcagatggaacctgagacagccagagagcaggcaccttgtggggctgctggagcaggcagtcaccctggaaacatttccctcgggagacagtagcactttcccttttt

SEQ ID NO: 41347 - DNA, 1368 bp, Bovine  19866881136650
  misc_feature (1)..(1): n is a, c, g, or t
ncagtcattttaaataagctacataccctagcttaggactgttctctggttcaggatttgtgctgaaaatattaataggtacatgaaaggcctataggtattgaggtcttgggggccttttcccatctagctcttcacccgtagagcaaccattaaaaaaaaacaacggaagatcatgttgctggaaaagtgatttctggttaagggcagcctggtggtaacaagcctctgggcttgtttttatggctctgtttccatgagatttaatatatggtacgtgtgtacagcccgaccagcttctccatttaactagatccccagaggaaagggcctgaacctatgattttcttacgtcttgagaacatctggttttttctcttagtctatttagtatatgctgttgccttagtggcaggataatttccaacagcatgccgtaagcaggatttgcatttcatctaaactctctatgcattccacataggtattgggtagttgaagtgtaaaccaccaaaacctctttcctgtttcccactgtattgagttcaccctaagaggctgagaatcaaaatgttttctggctgaattcgaaagcaaagaacatgggagagcaaaaacaacagcagggtgccgaaattgtggccagatgtcagaaccagctcagaagtcttacacaatcactgaggatggaatactcatctttgttaggcattaagtaggcgtcttccctgagggaaggttcgaattccctgttccatcttcccagtgtcctggaccacaatggaggaaggaactcatcaattacagaccactcagatcccagcacatgtttccaaagcacttcttgtttttcaggccccatattcccagaacaagcaaaatttcatttcttgttgggtggtaggaaaagtcagagctgcaagtggaaatctttagccattgaggatgagtaaaggctggtggagtttagtcttcctaacaggcagttgtgtggagggcttcccagctcctactctgctccaagcttgcgctgcactcccgaccccagatccccagtgttaggaagctgctccagacaaaaatattacctcttagagttcacccatattcctgttcttattttcggtctctctcttttttaaaaaaaaattatttatttatttttggctgcaaaaataagtattttattctgagttgcaacatgtgcttcttgctagtcatgacctgtgggctctgtagttgctacgcgcaggcttagttgctccacagcttgtgggatattaattcctggataaagggtcaaacccacatcccctgcattgaaaggcagattcttaaccacgatccaccaggaaagtcccgtttttt

SEQ ID NO: 41348 - DNA, 923 bp, Bovine  19866881349594
  misc_feature (1)..(1): n is a, c, g, or t
ntgtgtgtgtgtgtgtgtgtgtgtgtgttcagcttctcagttatatctgactcctttgtaatcccatggactgtagcccaccaggctcctctgtccatgggattttaccaacaagtatactggaatgagttgccattcccttctccaggtgattttcctgaccccagaatcgaacccttgtctcctgcattggcaggcggattcctttacccccgagccccctgggaagcccttcatacgtgctcacagaaaacattaagaatgccttacccagacaagcagaaactgtcaatggattcagagaatggtttaaaaatagtgcttaaccttattaagaagagactggagatatttggaccatgtctccaaagcttttaaatcaacattatggaaagcaactcccacaaatctttctaaagacagatatatgggttggcattttgacataaaggggcgtttgagaatgcacttatgtctaacgggtcccagattattaattacttttttggttggagtgaattattatgccttttacattttatttttcagctgtgctgggtcttcattgctgtacacaggctttctccagttgcagtggtcaggcgctactctctagtttcggtgcacagacttctcactgtggtggcttcttttgttgcggagcgcagctctagagaacaagggcttcggtagttgcagcacgtgagctcggtagtcgaggcttgcagggtccggtgtactggcccagtagctgcagtgcacatgagcttagttgctctgtggcaagtgggatcttcctggaccagggattgaaccagggtcccttgcattgcaagggtgattcgtaaccactggaccaccagggaagtctatgacttgtaaaatagagaaatgaatacaactgcaatggaaacaaatagtaa

SEQ ID NO: 41349 - DNA, 1430 bp, Bovine  19866881367921
  misc_feature (1)..(1): n is a, c, g, or t
naggagcctggcgaagctacagtccatggggtcccaaagagtcagacacagctgagcatgcaacacattaatacagcatagtgtaataaacagtaaaacgctgtctgttattaaagcacagggggtggtacttgtgacttcatgaaaaatttgactatgaaataatgaagtggaggaaactttaatggtcttcaaatatatgcttgaagtaatgaaggatgatgtttaaattggaaacatgcaataatcgaatttaaccatggcagatctgacagattgtcaatcatgaagcacttactgaggatctcctctgctcctggaactatcctaggtgctgtgattcaagaaactgtcagctgaccatcatgctgggtctgtttctgttgtttagtcgctaaattgtgtccaactctttgtgactccatagactggagcctgccaggctcctctgtccatgggattctccaggcaagaatactggaatgggttgccatttccttcttccggggatgttcccaactcagggatcgaacctgcatctcctgcaccgacaggcatattctttaccactgaggcactggagagccctgctgggtctgtgatgctccaccacctacctcccagttcagttcagttcagttcagtcgctcagttgtgtccgactctttgcgaccccatgaattgcagcatgccaggcctccctgtccatcaccaactcctggagtccacccagactcacatccattgagtcagtgatgccatccagccatctcatcctctgtcgtccccttctcctcttgcccccaatccctcccagcatcacagtcttttccaatgagtcaactcttcgcatgaggtggccaaaggactggagtttcagctttagcatcattccttccaaagaaatcccagggctgatctccttcagaatggactggttggatctctttccacaccccacccctcccccccaaaaaagagcataaattcctgctttctgccttcgtggagcctaaacctcaataatccacaataagagcttaggtacttacgaaaacaactggatttctctactttaccccactagcatgccgacattctggccaaacctttgaaggaggttgaaggaggaagagagagtctgttggataactcagagatcatccctagcctctgggagcttgcaccaaattctttgggagaatttgtgtcctggttcattcctgatatcacagaatctccctttttcagaagctcttcatcactctctgttttgtaggcagctcttggataggagccaagttctaccaagatgggtgggatgatttgatttatgacagcagagaaataggctttcagtgagtttttgagtcagaaccattttcgactccaaaataaattggacaggaagtgcgatccatgccaagcac

SEQ ID NO: 41350 - DNA, 1817 bp, Bovine  19866880358804
  misc_feature (1)..(1): n is a, c, g, or t
naaggaaaccaaaggtgggaaattctagccctgcttcttgagttataactggctgttaggcaggggtctatcttatgcgtattcggtgaatgtaacactagtttttcctacacaagatgctgtaattcactgctcaccaggttaggtcctgccaggtggctaagcttcccccctggtggttttgggtcttcaggaggtgccatcattccctctggtcccacccagctcttcagattgctagtgattttaagtacagagcgctcagtagcaagaggatcactgagttcacttgtttggaataatcctttcccagactgctaacatgttgatgatgtgctgtgagacacatcaatcacggtgttgtgaagaccacatggctgtgttgaccagcaacgtgtgactatttacattttaattatataaaaaataaaatcaagtggcttagtttcaacagcaacatttcaagtgctccgtagcacctagtggatagtgccattgtgaaacacttccatccctgcagaaagtccaccaaacaggactgcttcttagtgccctggtgagcaagatttcccaaacagctttggtgtctgccttgtgggctgcctcagagctctttcaaagtccaggcagaaactggctctaccccttgcatatcactctcttcctgagggccagggtgcctcttgtttgtctctgcattcccctacttccacgggaagcctcttcaaattcagaaattcgcaggtgtattggagaaggaaacttctgggcaatgactttttagagcaaggcgacaagaacgctagtctcatgagtgcaagctacgtagttctgttggctttgtttagctcttcatcgcttggtcacccagttatcttctgtcagctgggtgtcacaaataagtgttcctggttacaggtgagcatagggtcattccttaccaccccccactcctcgaggtaccctgccctccaggtacctcatgcaacctgatgacattcctcagacttccttgtctggtgtctttgtttcttccttagccaaaccctccgcgtttatctaatttatcttatccgatttctctctggataagcagctcggtgtacgcacttaacagagcagaaagagaacttgtcatttctgaagaaagaagtgaggcggcaaatgtacagggtggaacaagattaggcaggatcaaaaggcaaagcaggatgctcataacaaagacagtttaaaaattacagccttcactgttcaccctattggaatttaccggctgtcagcgcaccagcgcaccgtgggtgtgaactgttaggcatccggatgagagatcggcctttattccttctggctctctgatgacatcctctagcaaaagctcaatgtcatcattaaaaagaaagaacagcacactgatgaattaatttgaaaatatctgaccagctcttccagtcgcaaatctggaaataaattaataggtgttttgcatcaagtacaacagcatggagttaagtacctggaaaaccagtccttactggctgtgttagtcagagttctccagagaatcagaaccataggatgtgtgtagaagtatgtgtgtgtgtggtagtgaggggaaggtatttttaaaaataggtttgtgtacctgtggtgactggcaagtctgctgtcctcagggaaggctggccagagttgatgctgcagtctggagtccaaagacagcctgaagtcagaactcctttctctttggggatctcagtcttgccaatccttcaactgctagcatgaagcgcacccatattatgcagagtctgagt

SEQ ID NO: 41351 - DNA, 1103 bp, Bovine  19866880395344
  misc_feature (1)..(1): n is a, c, g, or t
nctggttttctttaaaactgatagaaaacattagaaagttaatacactgatttatcacagaaaagcatgttgtgtttagagctcagtgttttaagattataaaactacattcatcagtgaaatatgtcttgaacataaatgatttgccaatttatctttctagtggatctcttcacatctgccttaaaagtgctatttagagatacattaatagagtttcagataataaaacagttgtaaaatctaatttataaacagaaactagtttgagacacagtgctagattgtgaatgatacttaatggctcaaaagcacttataaagcagtgtggttctgattttgttttctgaattaaactcagtgtcatgtaaggagttaccctataattattcttaacacaagatgaaattcattaggtaactgtggggcgtttgattatttcctagctgaatgtcgtgctacctctttagctggttgggtgttacaaagcacttgagaattacggtttgaaatgatttctatgggagaggatcatacaatgtgtactttaaacatcatcaagctattaaaaaatataccctttgtaatcttttttttttccctctcaaaaaatacacgttcataccccagtcactcagtggtaaagaatctgcctgcaatgcaggagacacaagagatgcaggttcagtccctgggttcggaagatcccctggagaaggaaatggcaacccactccagtattcttgcctggagaatcccatggacagaggagcctggagggctacaatccataggattgcaaagagttggacacgattgaagcgacttagcacatgcagtttcaaacttttgcagaaattctagcctgaactttaattaagttttaaattcttaagataatccttaatctgaggtacacaggcttcttagaaaaagttcatagttactagaggagtagtcatagagagtctgtatataacagtagttgtagattaggtcttcaggttctttcactcaaattttttgtattccttattagtcaaatagcattattcttttgcgatttttgactatggcctatatctccctgggtttgtattaat

SEQ ID NO: 41352 - DNA, 2257 bp, Bovine  19866880540969
  misc_feature (1)..(1): n is a, c, g, or t
ncatctgagtactgagctacgtggccccttttagaagcttcttcgttccttaatttgatgagcactccccaaagcataccctccctgtggtcgctgtgtccatctcacttcaagagaataacctgctatgaagatttactcactttcaaagataaaagaggatagcatttttatccaaaactctcctttaagaacccccctggggcagaacacagcccttttgcctgcaggctgccttgaacatctctgattctctgcaggtatctgaggcctgtttggaatttggtctttggattctagtgatcttacctcggtagagaacaaactctgtgccttgttcctgttgttttaaaaagaaaaaacaaaacaaaactccaagtattttcagtgattaaacagcggaaaatatacagcaaaaattacttcttgactacattttctttcaaatgatgattaggctcaagaggtgaaacttattttagccctacccttgttttttttttttttttataaaaagctttttatagtttaagaattataattaaatttcctctgatttattaaacttaggttttcaaaaagagaatgatgggatttcttaaactattaagtttcaaaaacgaagactacttatttttattctaatataagagatgagagactgagagggaaaattttttccatctgtattttgattagaattttttaatgttcaaatttctggtaataaaccacagtaaacaaccagtcattcattaagaggcaactattgaaatggcgatatttagaggagaaaaaataaaacatgatgtgattaaaaccccacgcacgtcttcacttcaaggcaaacgctgtgcccatctgggtattaagaaagtgccaaatatcactgggatctagatttaactcatgtcataaagaagcactgtgtttcatttgtttacaaaggacctggaacctcatggaaatgatagtggtgatatggacctgaagagaactcaacagtaaaacgaggtactgatttataaattatttaaatacggaatcagtcacaacatgaactttcaatgatctactgctccactcttaaggataagaggtaatattaaagaatgttaactttcggctgtaataggtctctgctctaattttctcctctggaaatctttaagggttagtcagtttaaaaatcctggctacttttaagtcagaagggccaaagaagaggagacacagtttgtcctgaatgggctcaaagaccgtcctaaggagttaagccctggatgtgttccctgaactgaaggtgctgtctctgcttgctttatggtgaggtttgggaaggactgagctccagagccctctctccaggtggcgggaagtaggaagtgccctgagccagccacttccagcacacgttccaggtatgcacattcagaaatgaaactcaagctggccaccctgccagccaggatgcccaccctcagcagggatgggggttttccttccacacttttgtgcccactgagtctcacgtgaacagaagacctgatccctgatttcagtataagaacaatgatgggaattttccgtgaattttctttaggaaccgatggctaccataaatcccacggaaatgagctttccctttacaaattcctttgaaaacggcagacaaaggcatatccttgcgctaaactcatttgtaaataagtttttcctgtaagtttattacaacacaaccaacagtcatcatccaatcctataatgcacatgtgagacattggttttcacaaatgatcttttgtgatcgttaggaaaaactaactttctatctattctttacctacatgagaacaaacatctccaagagtgattctaagctaagtagctttataaaatcagtctttttttttttttggccatgccgcatagcatgtgggatcttagttgcctgaccagggatcaaacctgtgccctctgcagtgagtggaagaacagagtctcaaccgctggaccaccagggaagtccctaagaccaggctttatgcttataaacctatcctccaattggcaacaacagctctatcattccccttagtttctactatgtacacggagaggcaaacaccggctttattgatactctttactgtttccgattttcttcttcttagcacatcataacctgcgattgcctgtgtgtgtgtttgtacactgttttgcacaaacactgtgggataaatggaaggaagggagg

SEQ ID NO: 41353 - DNA, 1216 bp, Bovine  19866880556959
  misc_feature (1)..(1): n is a, c, g, or t
naagggaatgtgatattcagacttccccccaaggctgatggaaaaggtgctggattagacccagcactggggtcaggacagcttgggctgctgtgtggagcagggtgttgggggctgaccaaaggcaacatgcagctggtcatgggtaaggccctgtgtggtaaacatggtcagaattgggttgtctgtctttcaaagaagtaggttatttggtctggctggtggctcagctggtaagaatagagtcggggtccagcagggggtgggtagtgctgtgtgttcaacttcatggtcacagcgcataaacagctttaagcggtcagtgcccaggaactggtgctgggtccagagggacatactggagcctatggacagctctggatgccaacagctctctagagctccactctatcgataaagtcacttttctgcctgacattcttaatgccttatttaactggggaggactggggcagagtagaagttaggtatcacaatctgagaagtctgttactattatcatacctaatcttaaactctttcctgaaaatgattataggatcctatcttacatgagctctatgcattttaatattacaaatgtgctaaaagtgaatctgaaatgcagtaaagcttaaagtccttttacaagacaacacgatgcaaactctgtccttactaaacaggttcagttcaattcagttcagtcgctcagttgtgtccgactctttgcgaccccatgaatcgcagcacgccaggcctccctgtccaatgtgtgtgtgtgtgtgtatgtgtgcgtgtgtgtttaaagctggtgaatctcagctccattaacaggggaagttagcaaagaaaatgcaaaggaagggaatattggttataatcaaaggtatcccctcttttggttctggacaagagtcaaattggactaaggcagtgttcttcaaattgttgggtaatccattagtgggctgtgaaataatttcaatgcattgcaagcaacacttttataaaaatgaaacaagagaataaaatagaaaacaagagctcactgcacttagtgcaactattagttcataaagcactatttcacacttatgtgtgttgtgtgtattttttcctgacacaaaacataatccttttcatgagttccaggcaagaaaatggtttattagaaagaagatgaaggatcatgtttgagatgaggtaggaggat

SEQ ID NO: 41354 - DNA, 796 bp, Bovine  19866880596770
  misc_feature (1)..(1): n is a, c, g, or t
natttaggattgggggttgtgattcaataacacggaaggctctaaaaaccgatggtatggattcacacataactggacttaagtctttcagtgtctgttaaatgcttcagttaaatgctacaaatgatgacaaagttattggttcaaaatatcatataaaggcacagactttttctctgtatagaaacatatatataaatctataggtaatttctagcgtctagcacgtccactatgattaaggggaaaatgtgtttttctgattatttgatttcccaccaaacacactacgcattttacagcagatcagctgcttctatttgaaagaatgtggtcagaaaagtaatgcaaaagctgccactttggttttgtctgtaccttccaggtcatatcgtcgtacctcacttcctgacacaaacaagtttttacttgttgtcagcaacaaagtcctaatatagctgcggaagagaaaaactgcattgcatttgcctcctgcaagcatcatcaacacagttaccggaggaatgttgattccagaaaagctttaaggctggtacgatggtaattatgtatcaaatgcctgattctatttctgttattattggtttgtcatttctgagccacccaagaactggctgaactcgcagagggacaagtccggttcttctttttgcctcggtaaaatttaatcagacctgatagaaaactcattgctctagggggaaaataaagtaggagccacgaaatgtcattttacagagcgggggggttttgtgactgtaggaaaggatttaag

SEQ ID NO: 41355 - DNA, 1835 bp, Bovine  19866880623132
  misc_feature (1)..(1): n is a, c, g, or t
ntttaatggtcactccttctaaatcttatagaactaagatgaatgatatttttaaagttagggttttaaaattttttccgtattttcccatgaaagcaagaatatgaagtgtgacatagaatgaaagattcttctaatgctgagtgttagagcttttgaagttagttgtcagtgtttcagagctgtagtggtgttgtcacctcctatttttgttttgtgatcttgattaacttcttagttaatttttcttttggaggcttaaaaaataaatggacaaagcgtatagtggttcgaaccaaaaatgaaagatcttacaccctcaacattttcagtttgttgttgttgatactacataagtagtttttcctatctgaataacgagatttgtttttataaaccgttccttcttttaagagtaatttttaaaaatattctggtccataaaagcaaattctgtatttttagaacttgctttatttcatgaagtacgttcactaaatatactttgagtgtctctccaaaaagggtgacaaagaacctcctggtatgatttagcaatagctcttatatatctgctgcaagttttgtcgtcatctcctgtatgcatgtttgacttgatagtgggagggaaagctcacttaactgctcatccctgtctctgtagaaatcacactggtgtccactaagcccgagaagctggctccttccaggcaagacattttccaaggtatgatgatttgatgtgtagaggaagtagcccagctccctaggcattgtaactataatgaaggcccccactttttattcaattttattagttctcagtatgggaaatctttatatgactgaatataatttattgtcatagcttcctgttgttaggactactggaatctgtgggagttggcaatttccagttgtcagcttactgagaatgttgttcttaccctgtatcttggttaacgggactcaaatcagatgaaattaggaattgagtttcttttttattttttgcttttagtaattaactgtgaagtgaagtgagagtcgctcagttgtgtctgactctttgcgaccccctggactatacagtccatggtattttccaggccaggatactggagtggatggcctttcccttcttcaggggatcgtcccaacccagggattgaacccatgtcttccaaattgcaggcagattctttagcacagctgagccaccagggaagcccaattaacagtataaactcttacttaaaagattacttcactaaagcctggggacacattattaattgagtgttcttaaaacattttagctacccagagtaatatcttcccttgtcttattttgcttccttcttttctttccttttttcttgatagagcaactggctgccattcctgagtttgtgaatctaggacccttgttcaagtcttctgagcctgttcaacttacagaagcagagacagaatattttgttcgttgtgtcaagcacatgtttaccaatcacattgtgttccaggtgagagaagtgtcataactggctctggtaagggatttagtattaattctcctttagtttagaatacacagaagaactgtacaaaaaagatcttcctgacccagttaatcacgatggtgtgatcactcacctagagccagacatcctggaatgtgaagtcaagtgggccttagaaagcatcactatgaacaaagctagtgggaggtgatggaattccagttgagctatttcaaatcctgaaagatgatgctggggaaagtcctgcactcaatataccagcaaatttgggaaactcagcagtggccacag

SEQ ID NO: 41356 - DNA, 1376 bp, Bovine  19866880703881
  misc_feature (1)..(1): n is a, c, g, or t
ncaaaatgccagctagatgaatcacaagctggaatcatgattgccaggagaaataccaacaatctcagatatgcagatgatatcactctaatggcagaaagtaaagaggagctaaagagccttttgatgaggttgaaagaggagagtgaaaaagctgacttgaaattcaacattcaaaaaactaagatcatggcatccagtcctatcacttcatggcaaatagaagagggaaaagtggaaacattgacagacttaattttcttgggctccaaaatcactgcatacagtgactgcagccatgaaattaaaagatgcttgctctttggaaggaaagctatgacaaacctagacagcatatttaaaaacatcattatgccaacaaaggtccgtatggtcaaaggtatggtttttccagtagccatgtgcggatgtgagagctgaaccataaagaaggctgagtgctgaagaattgatgcttttcaacctgtggtgctggataagactcttgagagtcccttggactgcaggggaatcaaaccagtcctaaaggaaatcagtcctgaatattcattggaaggactgatgctgaagctgaggctccaatacttcagccacctgaggcgaagaactgacccgctagaaaagcccctgatgctggggaaagatcaaaggcaaaaggagaagggggcagcagaggatgagatggttagatagcatcaccaactcaatggacatgaatttaagcaaactcagggagatagtggaggacaggaaacctggcatgctgcagtccatggagtcacaaagagtcagaaatgaattggtgactgaataacagcaacaacaagaaggtcttcaaaactgttttattgcagtaagtgaactttagggtcctcatttcctggtctaagttgggagaaaaaaattaaagtgtactataatgaaatacttcagacttttcctggttctctcctaagatttctcccaatctgttctacataatgggttggcagatttctacaatcaactgagaagcccagcaactttgtgagaagtcagagaccccaggtaaaatatttcttctctgatctttcagaccaaggacagctccaccagttataaacactctgagctgaaaacactcttatagtgaaggggcattttcagtgcagactgatgtgggaaagagttgtaaaggaagcacagattatccaaggataacaccctctcagacttttagatctaaaatctcaactctcaccaaacctcttctccgacggaattaatcactggcataacagccgcagcaattcaggaagactttcactctcccttttaccataaaagctgtaaagtcacacttgacattccttttg

SEQ ID NO: 41357 - DNA, 2722 bp, Bovine  19866880807150
  misc_feature (1)..(1): n is a, c, g, or t
ntcccaacactttgtggcaaatagatggggaagaagtgttaattaacagtgacagatttcattttcttgggctccaaagtcactgtggacagtgactgcagccacaaaattcaaagatgcttggtccttggaggaaaagctatgacaaacctagacagtatattaaaaagcagagacatcattttatcgacaaaagtccatatagtcaaagttatggtttttctagtagtcgtgtacagatatgagagttggaccataaagaaggctgagcaccaaagaattgatgctttcgaactttgatgctggaaatgactctggactgcaaggagatcaaactagtcaatcctgaaggaaattaaccctgaatattcattggaaggactgatgttgaagtgccaatactctgggccccctgatgcgaagagctgactcattggaaaagaccctgatgccaggaaagactgagggcaggagaaggcgggggggagacagaggttgagatggttggatggcatcaccgactcagtggacatgagtttgagcaaactctgggagatagtgaaggacagggaagcctggcgtgctgcagttcatggggtcgcaaagagctggacaagccttagtgaccgaacaatgacaacagcaacacggatggacctagcaattgttatactaagtgaagtctttagagaaagacaaataccaacacttctatgtgggatctaaactatgacacaaatgaacctatttagagaacagaaccagactcacagatagaaaacaagcttatggtcaccaaaggagaaagggtaggaagggataaattaggagtttgggatctgcaggtacaaatcactacatacaaaataaacaacaaggtccgacttatggcacagggggaactacattcagtatcctgaataatctataatggaaaagaatatgatggattttgctgtaccagaaactaacacaacactgtaaattaagagtacttcaattaaaaaaaataaagttttccatatctatcttcaaaagaagtctggatttgttatctcctttgtaaacaggaggaaaaaaacttacttttcattttaagcaaaggctttatgaattcttactaaaaaaaattacatgtaaaatgttacatatatacagaaaccaaagaattatggtctggccctagcaggcattttagagttgaatttttactaccaacagctgctgcttattaaatcgaaaggttggggcttttggttttagatagcaagctaaaccttaaccacattttccttccttcccaacatcccactttaaatggcagaattccagccaaaagaaaaacaaagaaacaggactggaaatgtcaagaaagtaccaagagataagaaattctgaggaatcttgagaaacagcagttgggattatactgacaaatcacagccaaggaaaagagagcccagctcactagcaatataagatggaaaatttctgagtaaatcatcaaatacaaaaagcaggagtggaccataaaaaagacttctgtggcgagcttataataaggacacaggggcctgagtaagaatgagagcagagcttaaagtgactccaaatcttcaccacagacgttaggtgaagacaggaaacaaggcagctgtgctttgataaccatgtatatgtcctaacctgccttcctatcctcagtttatgcatcctataagaaagcctgcatgcatataagcttgcatcccgtaagaaaggttgcaaaactgtcagtcagagtctggttaaagtgagaagtctattgaaaaaaaaagagacatacaatgcacaggaaaccactgtcaactaccttctttaactgatatgacctttattcataaattttaatgtttagacaagaatcacatgataatatgagaaaaaaaaatcagcaatgtaaagagagggaccttagatgaacaaacagaccaagaagaaaagataaatcgcagaaaggaacaggaactctaaagaaaaagcacaaactcattatcgttgtagaaagtaaatattacatgtgtaacacaaaaataaacttccacaaaaaagaggcacagtgtatgaaaagacattaaaaagtaaaactataacagaaaatcaaataatagaatgaaaacaaaatgtgtttagtaaaaacaaagtcatttcagatataactgacaaattatcagaatatatagcataaagatatagaaattatgattaagatatagaaaaatgttaagagacacagaggataaagccatggaagtaaaaaatctgtctgaaaagtacaccagaaagagaaatgaaataatgtagaaaaaagaaataaaactttactgaacaaaagaaataagtgggtgttgtttgaaagagcctggggtgctaagcacacacatacacacatatatacacacatctcctagtgaaatttcaaaaattcagggattaaaagaaaattctaaaagcttccagagagaaaaagcaggttattatatacagaggaataagtatcaaactaacactagaccttttatcagtaataaagaatgctagaatacaactaagcaattaacttaaaaaatttcttggaatttaaaaagatatggaactaaaaattctatttcctgttaaattagcaatcccaatagtgagggaaaaataaaggaatttttggatcagcaaatatattaaagtt

SEQ ID NO: 41358 - DNA, 2428 bp, Bovine  19866880845437
  misc_feature (1)..(1): n is a, c, g, or t
nctggcaggctatagtcggtgggatcacaaagagtcagacaggactgagcgactaatacacacacatatttaaaaaataacataacccatattatagaaaggatatgacctaaatacagaaaaactgagatttaggaaaaataaacctataatccctttagcctaatatacttaatatcagcacttgggttcatttcctcctagtctttttctgtatgcatacttaaagataacatcatactgtatacaattgtggatcctgttcttttaaatataattttgtttcataagcattttccttgttgctagccagctttttataactatccttttaacagtgaataatatatcattaagtaaatgaacagtaatttacttaactatctccttatattgttagatgtttagaacatttccagtttcttgatattgtaaatattgtatccatatacattttctttccatatattatcttcttagatttcatttccagaatttccaaaacatattaataaaatgttccaggacctcaccattttatggctcttcgtatctattgccaagttgcttttcaaagggattatatcaatgtacagtccccaaaacggtgaatgtgagtaccaaacttcattgtacccttgaaaccattggcttgtttcattattaatttgcttttactgctttagtttccgggttatgataataaatacatattatatcccgatggtgataagctatatggagaatagtaaaatagggagaggaaagtgccaaggagaggtgaagggttgggttgctgttttatataggatgatcagggaaggcctttagggttcctacattgctcttctacacagggatttgagtaaaagttgaagaaagtgagggagtaaggtaggagaatagtcggaggaaagatgttttcaggcagagaaagcaccaggaatggcgcttagaactcacactgggcagtcttggaggaacagcaagagaactagtgtggccccagggtactgagaagagaggggccgggaaggaggtgagatcaaagggaaagtgggccgccaggacgtatatgactttcctgagcatttcgaggatgtttcttttattctgagtaggataggaaggcattgcagggttttggaaacaggtgagtcaggaattgatcagtgtttcatatgattagctgatttgttcagaatggattaaacatgctcaaaacagcatctttcccagtgaacctcttacatgctcagcatctccatcagtgctctcagccatcagtactcaaaaccacagtcatcttttgcatctcaaaaccaatcatgaccaacttctgtcagttctgcctccaaaatatctcttgcatctgccttctctatgcattcccattacctgaacccactgtgacagtttctaactcttctgctcaccactcatgctatatacttaaaccgtcagaacaatcatcctagcagagctgatcattcacgggtgtgctctttatctttgttggcccttccttccccctcccaaataaggtccagattcttcaggatgaaattcaagctctaccacaatctgattctaatctagcagtcaaagattatctcctattgttattaagaattaactctgccttcctgtctagtaagtttccagaacctactctgtactttttacctatacctttgctttcaatgtctccccttccctgcatcttctgtttaaagcacccttcccttccagccccacccagaaatcctaaccatacttccagaaccactccaatcaacactttcttcatccccaatctccttggctggaattgtgcttattttcctctgtgttcccataagttctactccattacccgcatattctgtatcatatgccatggttttgttaaatatgctcttttctactaggtgacaagttccttgagcatgattgtcttgtttatccttgtgactcctacagcacttattacaatgccatggctttagtaggtgtccattaaatgtctgtggaacttaaatatctaaaagctttgttgccgaaacagaactagaattcaagtcatctgattttcagctccatattcctttcccaataccattttatctttttgacttctttctatagttcattgtcaccccatctgaagtacatctgaaactgctaaggaattttaaggaaggatgactaaacaaaaaacaaatgctgaaattattttccgtgtagctacttaagtcaaagtgaatctaatttaggggcactaaaattttgaatttgaattaataaaaaaaaaatggtgcatgcaggtttagaaacactttagcttatcagggtttgatttttgagctgtacttaatcttataggtgtcaagttgctatgtttcttggtatgctatgaatttgtagt

SEQ ID NO: 41359 - DNA, 1315 bp, Bovine  19866880860363
  misc_feature (1)..(1): n is a, c, g, or t
ncttgcctggagaatcgcatggacagagaagcctggtaggctgcactccatggggttgcacagagtcggacacgactggcagctcagctggtaaagaatatgcctgcaatgcaggagacgccaggttctattcctgggtcgggaagatcccctgaaggggtgggtttccctggtggctcaaatggtaaagaatccacctgcaatataggagacctgggtttgatgccggggttgggaggatctcctggaggagggcattgcaaccctctccagtattcttgcctagagaatcctcatggacagaggagcctggcgtgctactgtccatggggtcacaaagggtcggacacgactgagcgataagcacagcacacagtgaacctaactgaaggcctacccattcccttcttttctctgtaaatctgctgacgtgcagacttgatcttaaacaaactatctttcccatgtgcttatggaacatggaaaccagaggaactgggagctggggacctccttgtcttcatttacgcttcaaagaaaaagtaacttcctatttagggattcaaactttttgtgctatttattctgtaaaatttggtcttattattctcttttggaaaattttttttaatgattccatgacatattgggacacaccaaaatacccaaaaatgcctcatcctaaaacaaagacatttgttgacaagaaaagttaagaggaggaagaaataaaaccatgttctagttttatttccacttaaaagagcaaagattctgggaaatttatgtatgttaaatttataagtgagcccttttcccccccaagatttatttggcgtgaaaagttacttcctgtactgtaatcataaaataaaatgttatttactcctgtcataaccattcacacacttcctgtcataaaaacttgaacttggctggaatgttaaataaaacatgcaaaaaactacaggtaggaagcgactatataaatacctattatcagtgcatattccgatttaagaaaagaatcacctcttcttggaaaaactagtattatgctttatcatcttgggtgactaaatcccacttatggcccacagaaggaacttaaagggtaaaaagcttgctctatttaccgagttcagtcaatagttttctggcggctttaggatgcctcccaggggcgctctgtgtgtaccgggctgccgcgttctggaggggttcatggcccagaatcagagtcgaggagtcagaacgcacacagggtcggtgtgaccgctgttacaggcacgtgcgtgttcttcttcaacgcctg

SEQ ID NO: 41360 - DNA, 1751 bp, Bovine  19866880891050
  misc_feature (1)..(1): n is a, c, g, or t
ncccatgaggggaattgtggtttgagccttgggatttttccagcttatatggctttttgagcggcagggttaaaggtggggactggctctgataatattcctcccaggaaagtagctttaagaaaccctactgcagaggaaaaattagctagatatcccacaatggaaaagagctcttgtaattttaccttttcgaggggctagagaggtagtatcgcctaggggaggtgcacagggcaccgtgctgttggtcattgggcaggtcacttaccctctcgatgcatctacaaacaggtagggtaatggtaatagtgcccccctcaaagaactgttgagggtcagagaagttaatatatacagagcatttagaattgtgcctgccatctgttaaagttagctattatttcttttagctctgtgtttttgcaatgtgttgattttctgagaaagtgtaggggacatacaggaagagtggtcagaagatagttcaagcgaggatggtcacttccttctttcccctcctcacactccccaccctcctaccccacagaccctggagctgttttgtgaggcagtaacgtcatatttgaatgtatgaccttgaaaacttctgattaagtagttctgggcaaagttctgctggttggaaaataaatcaggcctcccacacatacctgctcagccaagaatttgtttgccccgggaaccgtgggtaggcggggatggaagcaagcacacacccaggcttatgtgaactctggtctggctggggaccatggtgtcacccttctccctctgctcaccagtgatttctagtcattgcttttcattctcaattctagagaaagaaatctttttattttcaaaaattgcttttcttcctctctcctttctctgactccagggaacttccactcccccctccctgcttgcttgttctctaacgtttggctctttatctgccctttgatactgcacttgtacagatttctcccaagcccaggcagtgagcatgcagtgtaagatgatggaccttagggctccctgcatggatcctgagtttcagggtatggggcaaggccctggaaatgtcccagaatttactgttggttcttgtaaccaggaagagaggcttcctgcctttgcagtggggcgtatcacaggctctcctgctggctgtctcctatctcacggagaagtcctctgcacttccttctataaaaggaaaggggacagcagttcatatgcaaatactgcaccacccactgcaaggcggccaggcctctgggtcagaggctggtcagttgtcccatagcagctgcatttggctgggtagatatccgcagagcccagacctgtcctgtttccacccagggctgcagcacaggggagaagaaggtgggggtaagggaagccgtgagggaggcaagggtgggaatgtgttcataggcgtctgtggggggaggggatgtcaggctgatgcatggtttcaggtgtgggttcacctgcgccgtctgttctttgggaaaggtgctaatgtggtttacagaactcctcccaaagagaaattatggtcattagcaatggtgctgtagttcccagatgtattcatctgcctgtcactcccctgagatgtcctttcatgctgaccacagagcacagaattgtcttgttttgagaattcgccagtagcagggtaaagagcagattaacttgggtgtagactctttactgagaactaatggtaaagg

SEQ ID NO: 41361 - DNA, 1115 bp, Bovine  19866880902677
  misc_feature (1)..(1): n is a, c, g, or t
naggctgggggacagtgtgtgtgtgtgaaactgtggagttagaaagctgggggacaggctaggaaaggaaagaacaggctcagatgtaaagaccatgtgtgacaggttggagagtgggactttcatttgctcaatcttaactttagtaaactccctccattcaaaaatatagaaaatgtcaatatatttataatgtaaaggtgcaaataaatgtgccaggcccttaggtaaaaagatgactaagacatgacctctctccccacagctgattgtctaggagttgaataagcatgtgtgagaggtctacctctacacacctgttggcattacaattcaatgctatagactctttaatgtaagctttaacagagtgctatgtgggagttcaggattaacagcctggggaaattacaacaaatttgaaaggatgtacagtttaatcggattctcaaaagatgcaaaagagcttcagcaagcagaggaaggtacacaagccaaaggaaagaggccagaaaggcatggtataaatggaagcagtaaggagatgctagtacataggtgctgagaagagaatctgtttaggaacaaatctgaaatactttatacttccaaggaaggaggaggagaatagatattttgcagtaggctctagtgagcttaagcagtcaagagattaaaatgttagagataattgaagccactgctaggaatcctatgaataacaggcctgaattcagaaagcaagtgaatttactcaagtatactgaaaacagatggtggaagtggattgccccacataggaaagggtgtacctatcaattacagaatctgtttcagtgcagtagggggttcattgatgaatgatcttggttaaactgaggtagggttttctgcaggaggaaggtggaagaagaaagtagaaattaacagaaatttagaatgggtcagttgagttattttaaaaaaaaaggagaagatgggactatggtatggacaaaggtcaaataaaaatggagaggcagagcagatggtgagtcatagaagattatggggtatggcgaatcccatgctggttcaccgaggccactgaaaatgaggaagagcagtaaagagag

SEQ ID NO: 41362 - DNA, 1167 bp, Bovine  19866880910015
  misc_feature (1)..(1): n is a, c, g, or t
nttaaattactgaagcaagatgaggctgtggatagataaatatgtatgaggatgcaaacatgtcagtagtatcaagccacttcaactgggtgtatgatttttagaatccagctaggctggatcagtacagttagcaactttcttaagcagtctcgagccattcaccttttctaaagctgcacaggccatgccttttagcaagattcctgttggaaagccacagtagccagcaagaggaaaaaaaatgcgacaggagattttctttctccttctctcctgagtttttttcagaaatgttgaaactaagatataaacatgactcaaaagtactgagatatggggaaaatttgcaaaggtgttcagatgattcttgcttttttataaaagcaccacattcgcgtctggctgagtctctttgagacaccccaggcaataatctgagaggatagcctctatcaggggaacactttctgttcccagtgaagtggcacatttagttcctggtacaggctcacttaattcctattagtcatttcacagcagtatcttgggaagaaaaaaatctcaaatacttttgggtgatttcacaagtaaattaaagacagtccctcttttctcacagttcccatttgtttacaaatttcaagtcagtaaaacatgtttgcctttgtggatatttctctgctgatgtacctacctggtttccactctactggggtacctagatttatggccacaacatagcaggtgggttctggaccacacagcctggtttcccattgaattgatggtgaaattttaatttcttggtctgtgatttgaaggttgttctgggacactgcttagaaacacaggtcactgtaagtaagacactggatctgatcaaggtttgtttgttattttctatgttatttaaggacgttagatgaatgcttaaatttgttattgaagagttaccatgaatgctgaagatgcccatacgggattattattgtaggttggtttgtgacagctggccttgatttagttatttcctcaagaagacactttgaacaattatttaaatgcctcccctctgcaattacaataataacgatgatgatgattttgcaactgaatatgtaattcaggatgcatacactcaactactgtttttagcttgtttct

SEQ ID NO: 41363 - DNA, 1461 bp, Bovine  19866880979445
  misc_feature (1)..(1): n is a, c, g, or t
nctgggtttgatccctagtcaaggaactaagattccataagccataccacatggcccaaaagaataccaccacccaaaaccaccaaagaatgtgaatttagctcaaattttaaatagctaaatcctacccagtcattgccagtgataaatcctgtaaattctctgacagtagatttacagcccttaacctaaggagccattagaaatgatagtaaaccagattttctcgtagaacacagagatgcctttgtgggaatctgtattttttttttctcttagaactctgaagttacagatcttgaactccagttcaattcataacgtaaaaacctgaaaatcaaagggtaattctagtttatcttccacagtagccattttctggaagtaagacttccaaatacgtactatggtgtcctcaaacactgcctagctttattgtaaacacagtgttacgtggatattacctgagagccacagggttagcaacaataaagggggaaatgttgagtaaggaaatagaccagttgtatcacttggaattatgaactactttgtcttctctttctttttatctgctgttgaaacagttttgatgaactattaaacaattatatgtaatgtcctgttttgactgtttggcattttcacttgaaagtattgaacttcaggaacagatctatataggagatttgagggtttgttagagaaggaaaactagaagctttttgcccatggatttgaaggtccacagatctaaatgagaaagaaagttcttcgtttctaaccataaattaatctattgcagtgctgagaagaagcctgtcaaaagggatgaaagctcagttattctgaacagtctttagaaagcagcatttcttggttagttgcttttctcgctgccccaaatagctgatgcagatcttgaaacagaaaatccagttataatgggctctagatcttaaagtaggtgagcagtttcttatatacagccagttccttgataaggatccagaggaaaaaccagcaataaaacattttaacacacaaattttgggggctcccagggaacttgtttttttatcaagtttaagctgttgctgcacacagctctgtaccatctgggatgctagcattcacagcagttagtctggatatctgagctgtctgccacgcgaataccaacctgaaaagatcgtcattcttcagtttcattcagtgcttaatgaatgcaaaattaattggcagaaaggaaaaacactgtgtgatgtactgaacaggcctttgtgcatgattaaggagttacctcaagtagccaattttgagcttaatttctctccttttgttaacaaatctcaagaaaacctttgttacagttcagctagtgtcatgtggttggcattcattttctagccctttaggaagaaaattatcatttcatgcttaacttcaacccatacagaa

SEQ ID NO: 41364 - DNA, 1733 bp, Bovine  19866880985599
  misc_feature (1)..(1): n is a, c, g, or t
ngagccacaaaagcctttctggtagtcgtgtttctctgctgctgctgaaacacaaagtcagacaaggaatcctactaaatttacatggccacctgcagataaacacaggtcccctttgatgcctcagtaaagcaaagaacttacatcagtgattctgcagagagccctgatggctgggcctcggtacacatcttcctttccagtcatgtccttagtcagactgagaaaaatcaaattattaccataagattaaagttttctcttttgtggagtccacccatacttaattccacttgtccccataattattttaatgaaactactgattcaacaaatatttattgagtatcttctttggataaacataaaaattattggatagaagaccattttaaatctaaagaacacagcagggagcaaaaccaagtctttgcctttatggagcttacgttctagagggaaaagagacattagtcacatacactaagtacatacataattttaggtctatccatgacactgcaatctcattcctttttatgactaagtaatattccattgtatactgattaccggcataaaaaacagacaatgacagagagcctcatgctcaaatcccaagttccccaaacctaactctttaaaagaaaatgactgatagccaaaaggcacacgaaaagatgctcaacatcactaattattaaagaactacaaatcaaaactcacaccagttggaatggatatcatcaaaaaaatcaatgaacgataaatgctgtagagggtgtggagaaaaatgaactcttttacactgctggtgggaatgtaaattgatatagtcactatagagaacagtacagaggttctgtgaaagtgaaagtgttatttgctcagttgtgtccacctcttgacaacccccacggactgtagcccgccagactcttctgtccatgggattctccaaggcaagcatactgcagtgagttgccattcccttttccaggggatcttcccaactcaggaattgaacctgggtctcctgcattgcacatgggactctatagcatctgagccaccagggaagcctaaggaggttccttaaaaaactaaaaatagaactaccatatgacccagcaatcccctcctgggcatatactgagagaaaaccataactcaaaaagatacacgtaccccaatgctcactgcagcactatttacaatagccaggacactgaagcaacctagatggccatcaacagaggaatgaataaagaagatatgatgtaaagtgaagtcgctcagtcatgtccaagtctttgcaaccccatggactgtagcctaccaggctactccatccttgggattttccaggcaagagtactggagtgggttgccatttccttctccagaggatcttcccaacccagggattgaacccaggtctcccgcattgcaggcagacgctttaccatctgagccaccagggaagtcccagggaagacatgatacatacatacaatggaacattactcagccatcaaaaggaatgagactgcagagacatggatagacctagagactgtcattcagagataagtcagaaagagaaaaacgaatattgcatattaatgcacatatgtggaatccagaaaaaatagtacagatgaatctgtttgcaaagcataaacagagacacagatgtaaagaacatacatatggacaccaaggcaggtaga

SEQ ID NO: 41365 - DNA, 1426 bp, Bovine  19866881033071
  misc_feature (1)..(1): n is a, c, g, or t
nacagcacattactgtgcatgtaaacagtctattcctgaaaaacaaaacatttctgagatgtagaaaattagttaacactcatagtccatgtttgcatccttattaacattactctatctattaaaatcataaattctttaaatattttaaatagatcatttgtagtaacaaaataatttgaactactctttcattaaaattttaaaaatctcccacatagtacagtacatctgtcttgtgatttttactgcatttgagggagaaagaatcaatgacatggaaccctctgattaagttctaggattgtgtaccagttctgaggggtgggaaagaccatgcaagccccctagaattgttggatctttacatcctcaacacaaatgtgcaaagagacacacaaatgcaggactcagatacatctgttctcattaggaattcagaggagaaaaactaaactcttgtaggtgtattcaggaactattctatttaaaatattataaaattcaattttcccagctgaggcttaaaaaagggatactctgcttcttggtttcagttttcaccttacaaaccagcgtccttttcaacacatgttcagcattaatgtttcatcattttgcactttttgttggtgatttcactgtttgaaatgaccccaagcatagtcctgaagtgttatctggcatatccaagcactggaaggctgtgatgtgcctcaaagagaaatatgtgttagatatgctttattcaggtatgagttacagtattgttgaccctgagtatactgttagtgaattaacaacatatattaaataaggggtctttaaagagaaacacacagaaaacaaggttatgcattaatggattttagaaatattatgtcctcaggaacctaattctatacttccccaggggcagtggttcagtattcgtgaattaaatgtgactttatagcgcatgatgagacttcattgtactttccattggtgctatgctagtagaggccctaatccttagttctcaagtctggctggagactagtatcacaagtggaattgaaaggagaagtaactgacaataaagctccagtcgtggagattctgatgcaatggataattgcatatatgtctgcctgtgagacaaatatatagggaggcttgagagcaactttctagctcactttgccacacaacaaggaactgagtggctgctctggtacccctattggggattctctgggagggcaatgtgtgtgcttggataaggaaagcatctaaaagacaaatttttctagccagccttgggttatttttgaaataaaatggcttgagctcctataaaaaaaaacaatgccttaaaaatcagaatttttaagtgttttgagcaagtatcactttattttaggggaggggacacagccaagtt

SEQ ID NO: 41366 - DNA, 1178 bp, Bovine  19866881105811
  misc_feature (1)..(1): n is a, c, g, or t
ntcttttactaagaggaccatgtcttcttgctaatgacaaatgcagaggagtggaaagaagcctgtcagaaatgtggcatgtactatatgagacctaggcctatattaaaataccatcttgataaattccaccaaggaatcagacttgggtttagtaaagggatgcttccctggtggctcagatggtaaagaatccacctgcaatgagggagatctgggttcgatccttgggttgggaagatcccttggaggagggcatggcaacccactccagtatctttgcctggaaaatccccatggacaggagatctagtgggctacagtccatgcggtcacaaaaggtcagatacgactgagcgacttttactcacttaataaggtgatagggaaaattgttatcacagaagtaaccaatggctaaatcaaatgttagtccttgagactacagacctacagtactcttgccaaccattcttacttccctccacttccacgatcaggtagttttaaaattggtcactgtcaaaggcaacattgctatctacggacatggatgtgactgaaaaggtggaataaatagtgttttaaaaacctcactatccatgtgttggtttttaaaaaagtattgctagtatatcttcattattatcaaacttgccttaataaataatgttaaatataaatagcaacaatagtgtcaggaatcctttgtaactgttcttttccgggtaccatgtgttgttccttagtctattgctccttagtctattcagaatctacttgtaataccccaaaactctggggagggtggaggaaagacattaaaaacaaaaaaacaaaactcccaaacccgttcagacaaagccacacaacctgggtttgggaatattctctctggcctagagccagtcagggtgtttggccttgttcacaagaagctgacatcttcacgtgtggccttctggggagctgccaccatcagacttctgctgtagcagcagtagtgcatggggaggaacatgacagaatttagggaactattagatgcctgttggctcagatatcaggagcagctgtgaagggaaatctatttcaatttagatccagtgaaaaagaactgagctgttattatcgaagtggtggggatgaaactttgagcatacttgaagatgaccaat

SEQ ID NO: 41367 - DNA, 774 bp, Bovine  19866881134128
  misc_feature (1)..(1): n is a, c, g, or t
natttcagccccacaggccctcagttctcttcccattatcctgcacatgtcttttcaaggcactttagggttaaatatgtatttaaaattctgcatctacatatggaattctaaagtgtacagcaaaatgaatcagttatacatatgtccactccttttttgttgacgatcacacttttattcactgaatgtcctttcatggtctctgatatctcttttttatggggtgttctttgcgttttattaaatatatccccccactctctccgaaatgccagatgtgcttttccagttctagactgttcacttcattgtttcttctggggacttctttcctcttaattctggtctttttcttctgtgttgcagattttcctccaagttggtgatccttgcctggtattcctttttgtcctaaaattttctgtgccagtagttcccatctaaaagttaaaactcttcgcatctttgtgctaagtcacttcggtcgtgtcccactctgcaaccctatggactgtagcctgccaggctcctctgtccatgggattctccaggcaagaactggaatgggttgtcatgccctccttcagggaatcttcacgacccagggtttgaacccacatctcttatgtctcctgcattggcaggtgggttctttatctctagcgcctcctgggaagcccttcaattttcactgatagtcaaaactgtttgtatgggttcttcccccttacagcacactattctttcattactgaaggtgatgtgttgagt

SEQ ID NO: 41368 - DNA, 1147 bp, Bovine  19866881195528
  misc_feature (1)..(1): n is a, c, g, or t
naaggctttgaggttacaaagttccctaagaatattaaggataataatgaaagccccagcattttaccattcactctatgcctaacataatgctaaacgctttacaacttttttcctagacctgaactttctaatatggtagccactgaccacaggtggctattaagttcttacaacatggttagtttgagtctaaccatatgtgtaaaatatatattgggttttgatgacttagttcaaaaaaaggaaatgtaaaatatctcactgatattttttacatattgaaatgatattttggatatgttgagtaaaatacatcactaaaattaatctcacctgtttatttttacttgtattaatggaactactagaaaattttaaattatatatgtgactcacatttatggattgtgttatatttctattggacagcatttgttctagtctattcttcacaagtagtttgatcagctggactatattaccacccccaaattatgggtgaggaaattgaggcttagagaacttaagtaaattgcctatgatcacacagctgtgacttaagcacaaatctgctatctctaagcctgaattcttacccattattctatgctgtctccccagagtccagaagtacaatccatttggtgtagaaatggctatgatcattagctatggcaaaatgctgttttcatgtctccattgtggagcacgagaaaaatcatccatgccattctgtaaggcagaatttaggttgtagttgggaaaaattgcctatggggaagtttctgaaatactaactctttgtttgtaacagcttggggcttactcaccaaggatagaaggtagatgaaactacttcagaggttactttcatttctatgatcctatattgcaattcatgtcagattcacaggtcagttgctgctgtaatgctcagagtgagatggagtaaagagagatgaattagtgcttcagtttcaaccttttctcctgtaaaatgtaaggctttaatatcatcccatttcatttgaatttgtgaaaacctcaatgggacattcttcgtagcaatggctccctcttctaagctacaatgaagagaaggtggcaaaacagtttaggagagaaagagtcactccattttctt

SEQ ID NO: 41369 - DNA, 803 bp, Bovine  19866881246490
  misc_feature (1)..(1): n is a, c, g, or t
ntgatgtggtgaaagatgcattccccccctcaagtagatcccaaaaggggacagtgtccctggaacctgatctgggttgtccgcctgcttccgaagcagggaagaggtcaaatgtgcagacccgtgctgccctctgctggccctctggagtctgtgccgctgcagcccacagtggcagaaaccagttctgaaaacattaataggagccttctgtgcaggctgctttcttgcccttcttgattagaggtagagggtcactacagtgttttagttcataagacgtctacctgaacgcaccttgatgggcagcaaaatgcacagccctgtgtctgcggacagtctccttagcagcagccgcaccacctccacagagagaggaggtgtgtaccacttggtggacagaaccctctcaaactgtgtgtcttaattaagcaggatgcagaaggtgctccttactccccttctcaaaaactcatctctgagtaagaagagaaaacgcctgactttgttcctctgtggctctgggatgttccctaagggctcatactgtcatttaaattctaggtgctgatcttctgaacaaacgctccctgaggatttctgtgcctggaacttctccgtcaacagactgctgtgacacctaacgtaagtagaggctcttggtcctaaatcagtctcaagggagctttgttctgttttgatcctggaggatccccccagtaaaattctttaaatggtcatcagtgttccttctctgtttcttttctcggaaacactcaacttccgattactatcagaaaaag

SEQ ID NO: 41370 - DNA, 2053 bp, Bovine  19866881405454
  misc_feature (1)..(1): n is a, c, g, or t
nttttactgcgaattttttttacgcactgtatattcctctggaattttttttttaaagactctgaagctgcattgttgagaagctggtaaaatgtaaacttttcatggcctaacacagaagatcctaaactggctgctcatcaagattccccttggatactgtcaaagtactgcctctttttactcacaaaggacctttggaatcagaatcttaggggatgcctcttagttaccttcatatttataaatctatcaaaacactggttctgcagcagcctttccatatgcttatgtttaggaaatactagtatttattttggaatgttaccagtttaaaaatttcatttttaagggtacttagaggaatcttcttaaatgatcttagaagcaatggctaaagtgggtgcctttgcttaaattctgttcttaagtttatttttttaaacatatttttctaattttcacagagactgtttatttgtttggtggctgggatggaacgcaagatcttgctgacttctgggcgtacagtgtgaaagagaaccagtggacttgtatctctagagacactgagaaagaggcaagttttcagacttgagttctcacccatctttattacgataggggtgtggggatacacttctctttctgagtgatttgtgttcttttctaatgtatgtcagcagtggtagcagaagaatttgtggtgacaagtttggcttacgtattcttgcattccagcttctatagcaggttcttgaactacagttacatgaacaagtctatattatagagataaatagaaatgggtatctaatataacttagattttaaccattttagttaaaatgtaactgtataaaccatcttttttctcatgtttgtgtcacctctactcttattttgtacatttatttttgtttcctctggaaatacgtgcttttgattcctcactatcttgctactttggcccctccatatttgactatattatcagtttccacaaatggtagatattttatttttaactaaaattgtttatatgtattcataagtgagtctattgatgcatatacacataaaacttccatagtgaatagaatgtcttgaatttatgattttgaattaaataagtgtataattaattatacactgctagaaggcacatattcgtgtttttttttaatatctttgtagaattttttattgtacttttccatccaagcagttttagattacaaggtgaaaaataaactaaaaacaattgtaacagcaaatgaaaagaagaagaaaagacttaattcaaagccaccagttttaatctaggaaggccatttttttaaaactctggtgctatgtttttcatcttaggaaactggattcttgcttacttggtgtgttcctttgttaagtcatttgagtattttttaatctttctaaagaggtcttaaaattattattatccctgtaaaaacggcctttgccttttcagtattaagtaccattttctgaaatgattatttctctcctcaaaaatacaaaggcagatcttaaaagaatacctttcttattgctcttaaactattttaaatctaggttgattgtgtctgaattgtttttgcaagaagtttacaattcatcctgaaatcctttctcttcactgaattgtgtcgaattaatgcctaagttccaccagttctagcacccaatactgagtttcagacattttttcctctctattcctttcagctttgtggtttctttcttaaactttttttgcctccattgttgattccaaacctagtcttcattcattaacatagtctttaaaaaatttttttctttgggccacatagcatctctgcttaagccctataattaatctcagtctgtttcagttatctactgcattctatatatcacaatatattccatatattacaagtacccacaaaactttagtggcatataataataagtattttgttcaccagtctgtaggttgactgggctcactcatgtgttgagagtcagctgactgtctctagtctag

SEQ ID NO: 41371 - DNA, 2969 bp, Bovine  19866881507620
  misc_feature (1)..(1): n is a, c, g, or t
ntggaaggattgatgctgatgctgaagctgaaactccaatactttggcccctgatgcgaagaactgactcattggaaaagaccctgatgctgggaaagattgaaggcaagaggagaagaggacaacagagcatgagatggttggatggcatcaccgactcgatggacatgagtttgagtaagctctgggagttggtgatggactaggaagcctggcgtgctacagtccacggagtcacaaagagtcagatatgactgagcaactgaactgaactgaactgatgataaaatctaaaactggcattagttgtgatttcagggtttttcagggcagcaagaatttggccttttgttctccaggccagcaggtctgggctctaggcactatgatttgctacacgtaggaactagccaccaatacttacttgcagccttttaaaatttggcttaaatttttctaaaagaagacaacaagatgtgaaacattaagaatgaaacaagttaaattcaatactttatatgtaagcaagagtggagatacagaaaaggagaaatgaagcacataattgcttaaatcgtccaagctttctctccataatacaaattcttggattgaaaaatagttcaatccaatagtattgtaccttaataattaggttgggtttcctctgcggtaaatctcaggaagcgttggttattaaaatgaatgaagtagattacccttccctcaataattactacttcagctaatgtgaatattacctgtgtgattgaatctactgcatttttaagacacctatctccacctaatttttggagattcagtaatttaaaagtcaacagtgggtgggaatttctgtggtaggcagagggacagaaaaggtcaatgttcttcgacattctttccttcaaatcaagttttttggttttggttggttttcagtgttttgttacgtatggagacctagtagatgtaactgatttatcttcgcctttgtgtttatagatttctattttcttggcttcaggtccttggaaacatttgttttgatggtggcaggagagttagtcatgttttatttttgttgttcccatttatttttaagatcttttagttcaagtccacttacaaggtgttttataacctgtatttatgtttccacaaaaaaaaaaaacattcctagtagtaattctagtacactcataaaaacagttaataatttaatgcacatcagaatgattctgtgatattagtaagctggaactaggatatgctttggaaaaatgtgtttgaaatttgtaattggatttagcatttacatatcaaatttcaagtttcttagatcaattatttttgagttaccaagcagccaaattcttcttttcttttcattactgagtcaacaaaagttggaaaattcttttctcacatattccattctttaactgagcctgaaggtaaatgactttttaaaaaaccacatctcaaacaaacaattttacatgaggttatgagtaaatgaatagaatgggctctactggcactgcggatatacgtctaattagaactctcaatcttccaaacatatcatttactgacattgaggtttttaattcttaactttgagtccattgtgatggaaacaagtgacccttgttggaaatatgtcacgaatcaactttctcaggttgacctttagtttgttggtcaccaaatcaaaacactatttattcccaggcttaaagatgtctgtaccttcttaaatttgttgtaagatcaaggaagtaaagcactgctttgctgctgtgaacaggttgccttctctcttttccttgaggcctcttagtttcgtcatgagagatgatacgtcttagccagctccatgcgtgaagcaatattaagcatgttgcacctcttgcacatcctccgttgtgggtgggaggtagaatactctggttttacagtgagacagatgaagatcagccttcaaattgacttgacatactttctagttcagagctccataccaggcaccagagagtgttacaaatgctctcaagagccaatgttcataacttaaaagtagtaacataaaatttgcatctattagattactttttgaccttgagcaagcaattttacctccctccaaaataactatttcatagtgttattatagcaaatcattgatattatgtatatgaaaatacacaaagcctagcacatagttgcaagcgaaggttgaatttatgtgaagcatataattaaccacccctggaacctcaaatggacaaatgaatccaaagtgacatctgtctctaatcagttttaaatcagaaaatttcacttctaaatgaatcactccatccaccaatgactttgcttcatagtctacattcagaacaaaatgttacttaagtgatagtctgttaatgtatttcataacaggagctgactatggtttctttaggagaaaatcataggtaaacaaaaagaaagaaaattatataaatgtaaggtctttatttagaaataaatgaagaagggacagttatctgataaaagaacattcaggatcatgatataattaaatgtctacatgtaattacaaaatataattgtatttatattggtttaaaaattttttttctgatcttaaaggaccaattttcttgtaattgaatgacaaactctgcagtacctcatattaactattaataagctaaaaatacccattacctatctttttcttaattccatctactgtcatgaacttacatttatctcagctatacaaaaagaatgatttaaattgcttgctctttctgcttattagaaaggaggagaaagaaccatttccccgacccacttaactatgaaaaaaggactctcccaagttgccaggaactaacacagtagtaaaattacaagaaaattttgttaagaaatcttttctcatctgcaagtta

SEQ ID NO: 41372 - DNA, 1519 bp, Bovine  19866881805913
  misc_feature (1)..(1): n is a, c, g, or t
naatacaaatgatgtactaaagacaatggagggcagagatggacttctatctacacatgaagtcagtattttgttaaatggaaaaagcaagttatgagagcaactgctgagcctgccaagtacaagttatgtttgatatgtcatatagcatatagaaagcagtggcttcaccagccagtcatttttttaaagaccttgagatgggttttaacagtataagggggtgacggaggatgagacggttggatggcatcatcgactcaactgacgtgagtttgagcaaactccaggagatcatgaaggacagggaagcctggcatgctgcagtccatggggtcacaaagagtcagacatgactgaatgactgaacaacaaccccattctacagttggtaaaaatgagaggtattcaaaaggaaagctgttttcttaggttcagcagtcagtgagggttggggagagcatccgccagcatcctgtctgtcctacgccatctacgcacaatggccacccaaggccatgagttttgatttttcctgataccagagcttagaaccctatagaaattattttaagttgatgaaagaattttttggcattgattttttttcttaatccccatgacctggttctagagaagttctgagctccacatccctcatttagtcacactgacaaggccaagcaacaacctttagccaactgctttggacccaccctgctttgaaaaggctcattccacccaggtggccttagtatccaatggccaaccctgcccgctgcgtggaaacaatagataagtgcctgagctggcactgccctggtatgtgggtgcggttgggaagcttgaggccaaactgtgccgacttgctgtctctggattagcactttctaaagctagagaagacaagagtggcagtgggtgccactcttccttccttcaggaggtaagaggggtctgtaggtggacagggagcttgttcatcaaattcctaggaagtagtcaaagaggaggaggaggaaagaaggtccatgttatatctactgctttttataaatcctgcctccagggaaacaaacatccccagaagtgtggcgctgcaccagtctgtatcaaccctcagtgttggacaccacccaccacgggttgggcagggatggtgcaggcctggcagagggtgagtagccggtcctgtgccaaaggcttgatgtggcaggaggtgacaggacaaaggtcctggagcatgccagctgggcgccagccttctttgctgtcagaactggtctcggaaaaaagcacagcccctggctatgcttttgaaagaggcatttttactctatgaaaacagctgcccctcccttcaggcttccttcctgtgactgaacaggccagaggggaaggtcaagggcagacaggagaaccaggacaaaggactaaggtgtggattgtacatggagccgtgctcttatcctagctcacttactacttcctgcaaaaaataaagttgggtgggaagagg

SEQ ID NO: 41373 - DNA, 1257 bp, Bovine  19866880445552
  misc_feature (1)..(1): n is a, c, g, or t
ngctacctgatgcaaagagctgactcattggaaaagaccctgatgctgggaaagattgagggcaggaggagaaggggacagaggatgagatggttggatggcatcaccaattcaatggacatggatttgggtgaactccaggagttggtgatggacagggaggcctggcgtgctgtggttcatggggtcgcaaagagtcagacatgactgagcgactggcctgaactatatatatacagacatataaatgtatatacatagctatacatcacttaacaccttgctgggcacagagcagcccctttgataaagatagttattacattaaattctttatgttacagcaaatctcctttgtaacatcaattttatgtattttctcaatgtaaaatagttatcaagtctccatataatttcttcatcttgtatttgaaaatcctaattattaagctactcctcagttcacctctcttgtcaatgagtaaatggacatttgtaacacttacctgactggtgattttacatttatctgcttgatttcattaaagtgtgtcttgtactaaaccattccaagaaggcagggcccatgcctgtttttgttcaatcctgaatcatcagtgctagcccagggccagacacatgttagagcttaagaaatagttgttgaatgaatgaatggctggctggatggatagatattatatctgctcagtgagtggccttcctggaaatgggtggttctcagcaagagttggggtgtggagagaaggcaggttgtcatacaggatacagattgtcatatctgaatcacctggggtgatttttttgaagttactgtcagcttctccccaagacatgccatatcagagcttactgtgtgctacttcaggggcaggaaggcccactccacccaagatatacctcatacagccagtcactggtgacagaaatttctttcataggatacaaaacctttcattcataatcagagataaaggttaaggtacaaacacctttggccctctgtgctatgatagaaacaccactgattagacataaacacatctggtcttaggtttgacttgactttggatatgaatatatgacaagaagggcttcttcaggtgactcagtgataaagaattcacctgccaatgcaggagacacaggctcaatcctgggttggaaaagatcccctgaagaaggaagtggcaacccactccagagagaggagctccatggagagaggagccttgg

SEQ ID NO: 41374 - DNA, 951 bp, Bovine  19866880589974
  misc_feature (1)..(1): n is a, c, g, or t
naaatacaactataagaaagtgctgtaaaaaattttggaaccactaagatatactactgatattaaactgtattatcagtttgaacaacttccacaaatttgaatacacagatatacaaagtttatcagatgaaatgcaaaatcaggttcataacagaacataaactgcattataaattaataaaagcaaaaataaatatggactcaaaacaaactcttttcaataaccgaaacaatctttctctacatgactttctaatgaggaattcattttaattggaagtgactaaatgtaaaacaatgagtaaagtgtggggatagcttaatatagtgtattgacatgattccttatttttaatgatttttccctttaatcaaaaaaggatcaacatgttctataaaaaaagaaaaatcaagaatacaaatggttcttttcattaaagcaacaaataaacaacaaagttccacaaaaaattactgtttaaaaacaataattatgttaaatactgtgcctatatagtatattttaaaaacttactagcctttctagatacgtaccattcattgctctaggcctgagttaataagcgaagactatgaggctcaacgaaaattggccctaggtctgggatacagtgatatcatattatttccaatccttgtacccacggaagtatatatcaatttaggaaaatgactcaatcttgattatctcaatggcctcaagtaggcaagctgactgaacaacatgagcttcatgtaagggttattgttcttttatggccaagcatcctggaccccctttacaggagaccttagttttcctttgagaaatacccaggggtgagaataatttggttctggtgatccgattaaaaactgactaatttaggacttccctggggcacagtgaataagaatccacctgccacagcaaggagacagagaaga

SEQ ID NO: 41375 - DNA, 1361 bp, Bovine  19866880656182
  misc_feature (1)..(1): n is a, c, g, or t
nacctgaactttgtgcagacaactgcgcttcaaaactcatgcagatgacaagttctcatttgcttaaccccatagttatgtgctgagcaagtttaaaaacaaaaagagcaggaataagtgtggaaaaaacttatgcaaagaaactgagaggattcattttgatttcttgttcttgacctgacgtttgtttcttgtgtgtcttctcagtgcagtatcaaattgtcgaggctggttttataaaagcatgtatctattgcatgttttcttagggaaaattaaattatttgtgagtaatcggtctctgaagaagtaccatccatgatgctgacaagactcttgtgcacttatgcagcttaaattatccaaagaacttgaggggttttgttaaaagtatctgctggttgggaatattcatattacatccgagatgattaaaattgcaagactgtcctcttggcagattcctgagtgctgcaatcagtgaggtttatatttggtggtcagtggcatagctaaagaagtagctcagaaagcttgaaatctaagatggcaggcactgtgttttagctggtgggtggggtctgggactgactctggaatcagatggcttaattcaagtccgactctttctcctactagctaagtgactttgatcaagacactggacttttcaagcttgatttccttatttctaagtgggcatgaaaatactatctacttcatagggttgttgtaaaaattaaataatatatgaaaagaaccttgtatagagcatggtgcatagtatatgctccataaacattagctattattattcatacaaagtaataaacaggcccaggtatataattttcaggccccaaggccaagtgaaactgtggggtccgttttttaaaaatgcaggaaaaataccattaaaggtgttaaaatataaaacatttcttttattccattccctctctttcttgactagtcatgatattgttcttgcttttacctagtagattttatgtttttagagcccttcaggtttatagaaaaacccagcagaaactacagagttcccatataccctccccgcctccagtttcctcttttattaatgtatttatttccattagtgtgatatatttgttatcaatagtgatacacaattattaactaagatgataatttacattagggttcactcttagcattgtacacttctatgggttgtcacagatgcacagttatgtatccaccattacaatattctcaagactaatttcactgccataaaattcctgtgtgctccaccaattcattcctcccccatgctcccccaaatccctgacaaccacttgacctttttactgtct

SEQ ID NO: 41376 - DNA, 1201 bp, Bovine  19866880674502
  misc_feature (1)..(1): n is a, c, g, or t
ntaggtacatagaaatgcattatgctgtttatttttgtacataattgaaaatttccaaaacaaaatgataaaacctgtaagataaacccctggaagaatggacatggaatgtataacttcccaacccttagaagagataaaaatgaataagaaaacaaaaggcaagaaaagggaaaaagggcgggcgggaatctaaaaaacatttcaagcagaaaacacaaaacaagatggtagaaacatacctaaaagtgccagtgatgataatagatggagacagttaactaatctattaaaatatagattggggaattccctggggcttcagtggttaggactcctcatttccactgcagagagcccagattcaatccctggtcgggaactaagatcctgtaagccaagtgggctgccttccaccatacccaaaagatagattgggttaaaaaaattcaactttgtatacacacacacacacacacatattacaagagcaatccctaaaaaatgaaaaggaggaaaatgaagagatagaaaactatctactaggctaaacaaatgataaaaagctgaaattaggtaaaacagttcaataaggtaagaatgaaatgcactgaaaggaattagtagtaaagtgaccactggtgatcgtgacaaaaatggtttggggtcacagtggggactcaatcagattgtgtgtgacatgcagtcaatgggagagaaagaagtagaaaggcagaaggaaaggcaagtggaggaggcacattcctagttggggaagaggagttacttaccgtttgtttatcagtttgagcctgtgtaaatattgatgccatgaagccagagcagagagccaaggaaaagaaatgggagagaactgagaggaaagcaattgtggggagcaaggctaaggataagatccaaagcaccaggagagactttagcaacagacaagaagaaaacatcttctattttattttatttctaatttattaattggtccattacacaaacaatacataaatgcatactcaaaaacatcaaacattacaggtaaagctaatgcactccaccaaactactgtgaacagtttggttagtacccttccagaccttctctatacatttttataatacacaattaggtacttcagatgtacactatacagtatttgtgtgaatgggtgtggtatgtgttttaacat

SEQ ID NO: 41377 - DNA, 1276 bp, Bovine  19866880724230
  misc_feature (1)..(1): n is a, c, g, or t
natacactcatagtacttgtataattttcttttactttataaagtatgtgaatgccgcaatgaataaatcataagtgacccgagcaagagcagtctccgcggcaaagtgggagagaggaccgccgtggattgggagggtggtgggtcccgccccaaaggccacgcctcccacgaggccctgccctatcctccctgcgtggtctcatcggtgcataggtgaacagtcaagctgtaagatacagaaaatccaaatacgttgtttatttaaaagggtttccaaaatgtgtcttgtcataggattttaggtccaggagggatctttgagaccagctctttcagttcctgatttttaaggatgagaaagctgaggtctaaggaagctaaaacagttacccaaggtccccagactatttggctgtacaccaagaggacaggcaggaaagcatgcccaggaaacttctgaatgtttgggaacctggaggaagtaaggagggaattatgtgttcaggacgaacatccagattagaattcctgcaaagttgctgacagccacgtatgaatgaccgtgtccagcgataaatcaccaggatgaggaggatgaatcatcccaggctttgttctttgcaggacagcacatttttctctggctctccctgttctatatcaggagattgtttccaccggggtcaccgggctgaaggacccactaaatttggcttcattcctgtcttggcaagctgccatggccggggtggtggaggagtgtttacacgtgtcaggccctaggaacatttttgctgttctgtctgataaagcccagagtcagatgggcagagtggtgaaacgagcactggacatagagtcagctagcttgggattagttgctgttccgtcatgaacacagctgtgtaagcttcagccaatcttgtagggagttctaagcatgcaaaataaataggttcagtgtgattcccccaggtcttgtgttttgggaaactatttggggaagaaaagtagcttccaagctaagtaaccattttcagaataggttctctcaagcagaaggagaaaacagtgcaatgctgcactggaaaatatgtgggttattttcaaatatctttggatactgatttctaacataattccacagtgataagagaacagactctgtatgatttcagtacctttagaccatgaaatgtttacaccttgttttatgtccctgaatatgttccagagtctcctggtttatagtctatgggaacttgaatagaat

SEQ ID NO: 41378 - DNA, 2487 bp, Bovine  19866880767783
  misc_feature (1)..(1): n is a, c, g, or t
ntgaaaagaaatagaggaaaacaatagaatgggaaagactagagatctcttcaagaaaattatgagatacaaaggaacttttcatgcaaagatgggcacaataaaggacagaaacggtatggacctaaaagcagaagatattaagaagaggtggcaagtatacacagaagaactatacaaaaaagatcttaatgacccagaaaatcacaatggtgtgatcactcacctagaaccagacattctggaatgcaaagtcaagtggtccttaggaagcatcacatgaaaaaagcttgtggaggtgatggaattccagttgagctatttcaaatcctgaaagacgatgctgtgaatgtactacactcgttatgccagcaaatttggaaacctcaacagtggccacaggactgggaaaaggtcagttttcactctaatcccaaagaaaggcaataccaaagaatgctcaaactaccacacaattgcactcatctcacatgctagtaaagtaatgctcaaaattctccaagccaggcttcaacagtatgtgaaccttgaagttccagacgtgcaggctggatttagaaaaggcagaggaaccagagatcaaacttgcagcatccactgcatcatagaaaaagcaagagaattccagaaaaaaatctactgctgcttcattgactacactaaagcttttgactgtatggatcacaacaaactgtggaaaattctgaaggagatgggaataccagaccacctgacctgcctcctgagaaatctgtacgcaggtcaagccaacagttagaacccaacatggaacaacagactggttccacatttggaaacaaatacatcaaggctgtatattgtcaccctgttatttaacttctatgcagagtacatcatgcgaaatgccagactggatgaagcacaagttggaatcaggagtgccaggagaaatatcagtaacctcagatatgcagatgacaccatccttatggcacaaagtgaagagaagctaaaaagcctcttgatgaaagtgaaagaggaaagtgaaaaagctggcttaaaactcaacattcaaaagacgaagatcatggcatccagtcccatcacttcatggcaaatagatagggaaataatggaaacggtgagagactttatttttgggggctccaaaatcactgcagatggtgagtgcagccatgaaattaaaagatgcttgctccatggaagaaaagctatgaccaacttagcatattaaaaagcagagacactaccaacaaaggtccttgtcaaagctatggtttttccagtagtcacgtatggatgtgagagttggactgtcaagaaagctgagcgccgaagaattgatgctttctatctaactgtggtgttggagaagactcttgagaatcccttggactgcaaggagatcaaaccagacaatcctaaatgaaaccagtcctgaatactgactggaaggacatgctgaacttgaagctccaatactatggctatctgatgtgaagaactgactcacttgaaagaccctgatgctgggaaagactgaaggaaggagaaggggacaagagaagatgagatggatggatagcatcactgactcaatggacatgagtttgagcaagctctaggagttggtgatggtgatggacagggaagccttgtgtgctgcagtccatggggtcataaagagtcggacacaactgagcgactgaactgatgaattaaggagacaaaagacagagctgtcttactgcattctctaagtctaataaatcttccattctacacttgggcttcaaagtgtggaagacaggaggaaggaaaaggggaaacaggacagtgtgacctgagatacagaaaagaagagaattttctatttgtctaacataataagcagtagctacagcattagtatgtctcacaggaaatagggactccctcattcaccatgatccacgtattcccctatccttgcgtatttcaaaagaagttttaaaatctatatactctttaatctgattaaatagttgcttgtaataaaaaggggaagggtggtagtaactatgagcccaaatgaaaaatgcagaaaagacctgatttttttctagctgttttccagctgctgcttgttctttcagctgttcaattgctctcagtttctgtaaacaccaaacaggagtcaaaaggaagaaagaataagtaattcagaatgcacaaactactttcaaaattaaacataaaactgtgtacattaagaacatgaaatttggtatttttcaaaaatttaatattactatatatgtacatctatgtatatgtacatgtatgtaaatatatgtctaatttcaccatttatttcagtacctcatggtacttggaccacatctttagctttaagagaaactcagtaatgtggcctgggaagcgctctagaaacctgattttacctccaaggccaccatcaca

SEQ ID NO: 41379 - DNA, 1405 bp, Bovine  19866880798613
  misc_feature (1)..(1): n is a, c, g, or t
ntgtgcagccttttccgtaaacacaattgcgtctaaatatagaaactgcctagtatgcgcctccatctcaacacaatgactccacggccactgggactggccttgaacgagggccaaccgctttgaaatgcagagacactctgtcattggaggtgaaggaagcggcttccagggatttccacgagcgggcaggcagctgtttacttattccccattcttttgttatttttgtttgattttgccagtaaagcttggggaggaggaaggaagaagagaggggaccatggaccagaaggaaggaatagaggggtcgggggctaaggaagaccaggaggcgtcagtgataacgatgggatggaggacatgactcacaagaaaaggagaagtggcaggtgacttgttgaaggaggacagatgaattggagaaggaagagaggcaagattccaacatgctctgtagccgtctctacccagctggcatggtcaggacttcacagcaaggtcctggtttcctgagaatacaggatgaagagggccagttttcatgtcagtgccagattccagattgtttatttcctgctttataatcccttgagtagcgtaactgcctctgggaagagaaattctcacctctagccacactcccttccatctgtgtgtgtatttgtcggggacagggtgatgggaggagttaaaaacagcatcttcacaattagagaggatttaggtatctgtctcatcaaactgagaccagagaaaataaactgaaattaaattgtatggagctaaatgcaaagagatgttattaggcaactgttagagaagaaaccccagttaaaaaataaagacctggggcttcccaggtagttcagttggtgaaaaatccgcctgccaatgcaggagacttaggtttaatccctgatctgggaagaacccacaggcagcagagcgactaagcccatgggccacaaatactgagcctgtgttctagagcccaggagctgcagctactgaagcccgtgtaatctgagagcctgtgctcctcaacaagagaagcaaccgcaactagagagcagccctggcttgccacaattagagaaaggcatatgcagcaacaaagacccagcacagccaaaaataaaaaaataattaatttaaaaagtaataaagacctgaattggatattggagaaggtgatcctaggagagagtttttcagtgatgattctgggagaacatcttttttttttaacttttttatttttgtactggtgtacagccaattaacaattctgtgataatttcatgtgaacagcaaagggacccagccatatctatttctcccccaaaccaccttcccatccaggctgctgctaagtcgcttcagtcgtgtccaactctgtgcg

SEQ ID NO: 41380 - DNA, 1609 bp, Bovine  19866880815178
  misc_feature (1)..(1): n is a, c, g, or t
ncgatactactttgctgacaaaagtctgtacaaagatatggtatttccagtagtcatgtatggatgtgagagttggaccataaagagaaggctgagagccaaagaattgatgcatttgaactgtggtgttggagaagactcttgagagtcccttggactgcaaggagatcaaaccagtcaatcctaaggtaggtcaatcctaaatattcattggaaagactgaggcagaagctgaagctccaataatttggccacctgatgcgaacagctgactcattagaaaagaccctgatgctgggaaagattgaaggcagaaggagaaggggacgacagaggatgagatggttggctggcatcaccgactcgatggacatgagtttgagcagtctcagggacatggtaaaggacagggaagcctggcctgctgcagtccgtggggtcacaaagagtcggacacaactgagcaactgaacaacaaaggaaaaggagacgaagaggaagaagaagccatgaggtaagggcctctgaatgatcacctagaagccatcaacctgcattggactgcaatggaaatgggaaagaaactctattgtttgaagtctctgagatttcagaattgatctatttcaggagctagttttacttcacacatataaaagctcagaagaagcctatggcgagcagaggcaattcaaaaatcaaggtgataacttctttgaactcatctcctctgtaagtaaaagaccaagggctgataaatacaacagtctctttaggcaatcaccaagatcatgtaaagggaagattccctctgctccccactgctatcctaggcttcaggacttagaggatttatttatcttcttactggctccatctttctctctctctctctctctcttgtttttctgcccctcccctcccatggcttgtaggagtttagttccccagccggggtttgaagccttgtcctctgtagtgaaagtgggagtcaaaaccatgggaccatcaggaaattccctccacctgtcatcttttaaaccacttttattctagacaaaaatgttggaggataggaaggatactggctgttttaacctaactttttgtggaaaaagagaaggtaaaggaacagaaacagataaacaggtgaaaatcttagttgtaaagaaaagggcagtgcgaccataagaaagggcttcccagggtgttagtgttaaagaactcacctgccaatgcaggagacaccagggatgtgggttcgatccctgggttgggaagatcccctggaggagggcatggcaacacactccagtattctttcctgcagaatcctatggacagaagagcctggcgggctacagtccatggggtcacaaagagttggcatgactgaagcgactaagcaccataaaggcaccgtaagaaaacattgtcacattttggactttttggtttgctaagggaggtgattctttagtttggttaatatgttgatgggtcttaggtgggcaaagctgggtttagagttcagtttgtgataagttgctagggaagagccgagttgagttactctgcatgaaagtgtgagaaagagaattgaaaaaag

SEQ ID NO: 41381 - DNA, 1169 bp, Bovine  19866880868256
  misc_feature (1)..(1): n is a, c, g, or t
nttcttcctagactattaaaagcttaaggcatgtgcctttcaaaatagtttattcaagaaaggtcttttccaataagatttcaaaattcaataaaggaattataggcattgttataggcagagagggagagatatttttgaaaaaggaaattgcccacagcactttaaatctcctacagttattaatatccaccatttgttaatgatgatacgctgctaaggactattttatgtgctttcattgaattttttttctacagactgatgaggttgagattcatatttgtcttctccaagatatcttggacatctgaattagggactgttcctgggaaatctgccaagctgtctccctcttctttcctaacttggtttaaagcatctgctcattttcccccaacatcatagctccattctactctccacatcccactggactgtaaactcatggctgagaacattcctgtctgtcacctacctgctgacctgagtgctctgctcatgctcaaagggatttgcggcagcctatgtcttacacatatttataaattccatggaacttaaatgtgcaacttttttcatagaagatgcctaatagatttatacttgaataatggatgaattccagtgttttaagtgttacattcaactatttctgtagttcccaggaatagtcagagtcaaacagtcaaacaggaaaaatttttagtctatcaacatttctgaggataggtttcataaatctctatttttttttttaaagaacctatcccactgtcaatcagtcatgtccaactctctgtgaccccatgtaatgtagcctgccagctcctctgtccatcggattctccaggcaagaatactggagtgggttgtcatatcctcctccagaggatcttcccaacccagagattgagcctgtgtctcttatatctcctgcactggcaggcaggttcttttttttttttttttaagaaatctctatttttagcaagttcccccagtgactctgaagtagccagcttgatcccaggctgaagactggcatttgaaaattcatggagcattctatctttcttcaccccagagtcctataaaatgtccccttcctgcccctgtccatgctgtcctaaaccattttctcttagcagaccaatgccaacaaccaa

SEQ ID NO: 41382 - DNA, 988 bp, Bovine  19866880902415
  misc_feature (1)..(1): n is a, c, g, or t
nattgaaagcctcagcactcatctgaaaatgtataactgtgtcgcctgcagagtttgtcttgggagtgaccagtttatatttcaaggaagaatgaatgaaaaattgtggttgagggggtcaccacttcaaaagaaaaatatctatacatgtaaacttagaagagagtaagatatgaaaaaaaaaaaaacttcaagggtaggtgagtgaaggatgtaagagaggggaattgaacaccacaacatatttttcctttcagaagaccatctgctgaagttctgagcatgagaacaaagtgggatttgaaggatctggaataaatgaagtgaaagaaatgctgagaaatcttttgaaggagcaatttccagacaagcaagggaagtcatgtggtttgcccttctggtcccacaaaagtatgcacgttcttggagagcaagctctgtggagggttctctggctaaaagaatgtgattcagggcccataataacagagccctcagcaaggggaaggtggacgtggggagtgaaggcattcaggctgggacaggagacagagtataggttctatcagacagaatgaagaaggaagatttaaatggtgaaactataaaacattaaaacttaaaaaaaaactttttattttgtattggcatatagctgattagaatattaaaacctttgacaccttatacatcttttacttcacctgcttcctcttaggatacaaacactgatggccaggaaaatgaagggattttacaaagaaagatcttgaaatcaatgcactgaggattaaaaacagcatgaattttagaaacaagattgatggcaaaatatttttttactctcttaaaatatggaatgccaaaaaggaaaaaaaaaaaaaatctttcccaaagaaagcactaagtgataatccttggcttcttcagcaatctgttttaaaggttatagtattatcagtcttctaaaactgctgatatgcttttt

SEQ ID NO: 41383 - DNA, 908 bp, Bovine  19866880989628
  misc_feature (1)..(1): n is a, c, g, or t
ntaaaatatttaaataaataggccgccgacgccgtccccgcttcgaataccctggatcagccggggcaggtcagggtgggtggagggtggggagtgcaatagcccttgatggtcaatcttgttgaaggcaagacaggtaaggggtaaggaggggacagctaagaagccaggaaagaggctggcagctgagatgtcacagctgatttcctaccattgcctcagccaagggagtgtccaattgtgtctagaaatgtagatttgaaactgtgaaagggagtggatggggaagatacaaagagagacagcatgtcttcggacatgtgatagattgttgtgactttaatgagggtgattataggttcgttttctggagtcactgtcagtagatgaggtgaaagactgcaagggtcctactggttctcttgctgtgatctttgcttctcaaccagtcactcattggctgctaggatgtgaggtcagtctgagacagtcctgcacacaccaaactgagccatgccaatgtcaagtgcattatccatttggaccagataatcaccatctctctagagaggcaaaagcctgacagtgcatgatggaaaacttagatgttttttcagctgccaaatgggaaagttcttagaaatggtgagacatgggatgcacacggacatatattcatgcatgtatatatgcatgtttacaccatgaacagatagacagacatacgcacacacacactcacacacacacacacacacacacacacacatttactttcaaaatggacattttagcaggaaacagattttattttagacacaatttttattttaggttttattcaaagttgggttctcttggaagctctctttgagatgaaggtcagtatgcaggatgtttattcagta

SEQ ID NO: 41384 - DNA, 946 bp, Bovine  19866881012093
  misc_feature (1)..(1): n is a, c, g, or t
naatatatttttttctaaaaattcaaggaaatctacaaatatattactagaatgaatttaggaagctcttgaatacatggttaatgtttctgaaaatcaattctatgttgatataactgttagaaatagtttaaaatgcaatattatttgaaatatccccctaaaggataaaataactaagaatcagtttaatgaaaaagcactcatcttgtcttttgagtggattcttcctttttaaatcttttcttggtattcccacttttctttattgcccccaggggctccactcctgacctttcaattgtagacacccactttctaagactgcctgacttgctcctgtttactcaagatcattaaaaaaacaccttgataaaaagcatcccattcaggagtgactgcacatactgctaccctgtcctaggccaaattcttgattttttcctttcctctgccaggtggctgtgcagatatttcatttcaattcagggtccctgtcatcaagttgtgaagcacaaaaataaatcacctgcttactggcatcctcctaaagattttgaagaaacaataaaaccagtacaaaaatgtagtttaaaagcaaaaccttttctaaacaacagggtcctaaagtcagtatcttgagataaatcataatggaaaagaatattaaaaagaaaggatttatatgtgtaactgaatcattttattgtacagcagaaatgaacacaacattgtaaatcaactatacttcaatgagaaaaaaaattaaaaacaaacttctcatttcgtgtcattatagactgacaggaagtttcaaaagtaatatagatcctgcatatatttcacctagttttccccaaggacaatagctaacatatctacaggacaatatcaacactaggaaatgacattggtactatgcacagacccattcatatttcacatt

SEQ ID NO: 41385 - DNA, 1585 bp, Bovine  19866881099034
  misc_feature (1)..(1): n is a, c, g, or t
naatatgttgatatataaacagatacatagtgaaagtgcttttattttgggacaaatgacaacctaagaactggttattttaaatgttatatttaaatgtacatttttttaaatgcagaaatcaaacctgatgtttttgataatctgatcttcttttaaagatctgttttcttatttagaaatgagaaatccaaatagtatgagtgttataacttagtcagaaatgcagatatttataaacaattccagagttgagtgaccagcctccgtaagtctcttacctttttctttaagaagttttatcttctagaatctaaatacgcatttcagtgccccggtttagtctaatatacttctactggtagttgcagtgcatgtgttacactagcagaatgaaaaggcaagaaggcagataaacattcttcagtggacatcctttcccttctcatttctcatccataatttttatacagaaaaaatttcagggaatcttaacaaagaatatttccaatgaatgaatgaatgttaagtcgtggcaaacatatttgtaagataattcttggtttgtttctattgtaccaaaacttttctgacttaatggtggttctttttccataagaaaaaccataaaccattatatgatgcatgtggactcttaacattctgttttatttcattgatatttgaagtttacaagtaaaagtatttaattcttgatctatgtctcagctataaaatttaaaagaaagtgcagtgcacattctgattaatatatacttaattgagcgggctaaggggtcttttgaaattacactatctcttgttcataacgtcttattcttatatgccttttgtcctgttggtgttttgttaaatacaatttatttttgaaaggaaatagctcttaccacacattttcttttgatgacagtgtttttttttacctagtttttaaaatctattaatatctataatttaatttcctcaattttgtttctttatagatagttggttgccactttaggtctattccagtgaatgaaaaagacaccttaacatatttcatctactcagtgaagaatgacaagaacaagtcagatctcaaggttgacagtagtgttcactaggagagatggaattaaaacttggatgttcagatgttaagactgcttactgctttttcacgtgtagaaatgttccttctgtattttttctacagaggattttctctggttttattttctttgttttgactctaattagttggaagctcatgtacaatgagctttcctagattaaaaaatattttaaataaaggttattactattatagttgcttcagtgtatttattttgtggaacttgatttttattttaaactgacttttagggaccagtattaattgaagtttaaatttgaagatcactttattatcttttttccctttttttagttctgagaaactaacaaaagtaatagatgtcatccatttgctctctctggggcaatctgatttggaattaaggatatcctaaatagtattattttttaagtgctttttagtactaacaagttcgaaatagca

SEQ ID NO: 41386 - DNA, 1037 bp, Bovine  19866881133775
  misc_feature (1)..(1): n is a, c, g, or t
ntaatgcagcctactatagccctcatggacatatattagtactagctggatttgggaatctgaggggacaaatggaagtgtgggatgttaaaaagtacaaacttatctctaaaccagtggcctctgattctacatattttgcttggtgcccagatggtgagcatattttaacagcccacatgtgccccacggttacgtgttaacaatgggtacaagatttggcattatacaggctctgtcttgcacaagtatgatgtaccatcaaatgcagaattatggcaggtttcttggcagccattcttagatggaatatttccagaaaaagcaataacttaccaagtagttccaagtgatgtgcctagtgaagaacctaaagttgcaacagcttatagacccccagctttaagaaataaaccagtcaccaattccaaactggtaagtagagttttactgctttggtaggaaaaggtttttcaatgcagagtttcctagatcttttcttttttttaatttatttattaatttttattggagtataattgctttacaatgttgtgtgtgtttttgctgttcagcaaagtgaatcagctatatgtatatatatattcccttttttttaggcttcgttcccatttaggtcaccgcaaagcactgagtagagttccctgtgctttacagtaggttctcatttgttatctatttaatacatattatcagtagtgtatatgtcaaacccaatctcccaattcatccctcctcttcttccccgctctggtatccatacatccattctttatgccctagatctttttctcatgcatgtttttgtgttacttggtatctgattagaagatataaactctagggtagaaattgtggaggacctgctgctgaagatggtgaaaggttgttagcttggcaaagtaattaatgtaaaatcttgggaaagatgagtgggtgtgacttaactggctatagagtgtgggctcaaattcaaatgcctgtcaagctaggctggtagtgtgagacagtggtga

SEQ ID NO: 41387 - DNA, 830 bp, Bovine  19866881317877
  misc_feature (1)..(1): n is a, c, g, or t
naccgacgctccgctcccggtggccgcgccgccagagcgagggggctctcaggcggggcgctagctccgaccactgggcctgggcgaggcgggctccgggtctgaaccctagcggggcgcgggccgactgacgacgccggactgtccggccgagcgaggcgggcgcgcgggaggtgcagagcaggccgccagaatactctcgcgctgccgctctggccgccgccgggagcgtggaatgtaagaggaaggaaacgaacacaacgcaacaacgagacagtgcagcagcccgtcgcctcaaactgcttcgggatccgctgccaacgtcagcactggactggccccgccccgcggaagtgcaggctccgcctgctgaggaagacggagagggagggtgaagtccggcgcaccgaccctagccctgcccctccacgcaccgtaaagcgcggccccaaagttgcgcgtgcgcgcgttcgaggtctttttagcgtctctctccgaccggaagtgaattggtcccgaggctcatgacctaggaaacacaagttcgccgtctccacgccggaggagacgtgttggggccgggttcggccctcgtgaactctgacccaagtatctgagtttctctttccgggacaagatggcgccgtccacgccactcctgacagggtgagttctgaacgagcgagggactatttctttagagcagagttttttctgtctttgaccttgggcaccacacgagaagccttggcgtcagatccgcctttttttgtggattgcggtagagccggagggccttttggatttcttgatgtagcgtggcaatcgga

SEQ ID NO: 41388 - DNA, 1112 bp, Bovine  19866881319665
  misc_feature (1)..(1): n is a, c, g, or t
ncttgctacatagtggttgcccagttctgggttggttgaagtaaaatgagtacagaactgatcccatggacaaaaaatcaaccaacaaaatgacagcatcacatttcttacatgttccatactcaagcattatggtatcatgtttgcttttctgaaagcgaaagtgttattgctcagtcgtctttgactctctgcggccccatggattgtagcccgccaggcttctctgtccttggaattctccagggaagaatactggaggggctagccatttccttttccagggcatcttcccgattcaaggattgaacccaagtctcttaggttgcaggcagattctttactgtctgagccaccagggatgcctgcttttctgactgggaccaaaagaaactgtatttgtattctttatcatttaaataaagatttaattcatcattaacttattgataggaataattcatcattaaatgggaaacaaagtcctacttcctttccaaaacacatttcaagaaagtggcataaatgttggatcctttactgggcgctggattcgaaccccacttctgtctctcctagttgtgaaatttggggcaaaacagttcactttcttggattttgatgtttgtacctgtaaaatgggtgttgtgatgcttgtctctcacttttcttgtgaggatcagttgtgatggtagacgcgaaggtgcttttagaacagcatagcattcctctgtggatgtgagagaatgttatttgaggaaaaatcttggtgtctagacttacacacttatctaattaaggagcacagaaactatttcagttgaaaggttaactggagataatactccctttcaatcaagattcaactctgcagcattttgcaagtttatattttcagttacattgtttcattagatgttaaaagatgtttcggtacagtttacataaatggcactgctgaggaaggcagggtgttcctgcgtcccaaacccttagctctgcagggcatgctgagtgtcccagggcagaggacgacgctataattttaccaaaggaaggtgggggcagggccgacaaccaggccaaaggccagtttgcctcctccaaacaca

SEQ ID NO: 41389 - DNA, 695 bp, Bovine  19866881383947
  misc_feature (1)..(1): n is a, c, g, or t
nctccggactcgccctcctgcttccctcggcgtccgagagcccggagctgacgccggcactggttcgaagagccggagcggggcagcaccgcccctcacgccgccgccgcctccccttcgccctcccactcccacccccagcctaggcctgctgaccgcgcggagctggattgaccacggcggcccgaagacgcgaggaggaagcagccgacccgcccctgggatagtgctctcgccgccacgggggggattgaattgaggcgccgcgactgcgggaggcgagaaggaaggaggagccgccgcacgagtgagacgggggcagagccgtagagaccgactcggataaggaaacgggaggaggatgtctcacggagcggccggcgcccggatcagcccgtgactcttagagcggcgggcctcagaccccagcacggacgcggactttgtctttgggggccagtgttctgcccttcctggtttctggcaagatcgcggaggagccgggtgcctctctgcccttccagccttcctcaccatgtccaagatgccggccaagaagaagagctgcttccagatcaccagtgtcactacggcccaggtggctactagcatcaccgaggacaccgagagcctggacgacccggatgagtcacgcacggaggacgtttcttccgagatattcgacgtttctcggg

SEQ ID NO: 41390 - DNA, 1323 bp, Bovine  19866881425549
  misc_feature (1)..(1): n is a, c, g, or t
nagatagaagtgtttcctatggtcgcacataacagacatgaatctcacccctcctgcagcctctgaacatctatccattagtgaattagcagtctttgagaaagcctggaggggtgtttatatcaggttctctcagccttctcactattggcattttacatgggaaaattctttgagggaccgtctagagcgttatgggcttgcctggtggctcagacagtaaaaaatcttgcctgcagtgcaggagacccaggttcaatccctggatcgggaagatcccctggagcaggaaatggcaacctaactccagtattcttgcctggaggatcccatggacagaggagcctggtggactgtagtccatatggtcgcaaagaataggacatgactgggcgactaacactcactttcactacagcattataagctatttaatagcctccctgatctactagatgacaacagtaccaactcccaattgtgaataccaaagatgtctccagatatcaccggatatccctaggggcaagggaacaaaattatcccctggttgagaaccactggtttataagcaatggaactttctagcatggtgctgacaataacaaaactaacagctgttagcactttttatagcccctttatctcatgctaccagaatcattggacaaattggttaatttttaaaatctgctaaggttgaaaattactttcaaaaatatataaatgcctttatctttaaatataaaaccacttaataattgtttgatgttgggccattatcttgaatatgaatccactggctggatttctaagttgtcatataatacattttctaccatttttaattttgtgtcttttaaaatgggacagaaatttgattgttttcctttttgcttttttattgatatataactttgtctgttttttaggtttctcaccataccacatttaatcacgttttgactggagaggggttgggggaacacttttattaagtgtctaccaaacctagctttcaaataaaaccagaagtcatatacactcacagctcaagggctgctgaatacttaaattacataattaccccaagtagagccaaaaggttcattgaccattgccactagctctttgctactaacagaatcacatggggatatcagagagcagattcctagccacagccttcctaagccagtatgcctaccaggtcagttttatcaggtggaggctggctaagaagtactgtttgtgccagacactctatttgcattctcttttaaaccacaacaatccaaaatcatagtatgttagtattttttt

SEQ ID NO: 41391 - DNA, 1383 bp, Bovine  19866881495264
  misc_feature (1)..(1): n is a, c, g, or t
nactgtagcccactaggctcctctgtccatgggactctccaggcaagagtactggagtggggtgccattgccttttccgctccaaaaagctagatactactaatacacaaaaagttaaatcatttcattctcccccttcttaggatacacacagtaacatttgattctttgattactttgtactctttgttaaagattcaatgtagtcacaaaatatatgctaataaaaattgtttgacttgagatttaaacttacatcaatgtttatgaaacacagcattcctgtgaattgaacattagtaaaattctttgatctttgataggatcttaaagtttcattgtttagatagaaataatcttaagttactgtaaaaaacttttccaaaggccactaaaatataacttaatcagtttaatccaacataaaaatttccaaaaaccagtttaaccaaaaatatttcatgtgcttctttagcgttacatgacatttcaacaatgctaagtcgcttcagtcgtgtccgactctgtgtgaccccatagacagaaggccaccaggctcccccatccctgggattctccagacaagaacactggagtgggttgccattttcttctccaatgcatgaaagtgaaaagtgaaagtgaagtcgctcagtcgtgtccaaccctcagcgaccccatggactgcagcccaccaggctcctccgtccatgggattttccaggcaggagtactggagtgggctgccattgacttcaccaccactgagccatacttcaacttaaaaagtgtgtgtactttgtgaaaattcactgagctcttcacttatgaagatgtatattaaacatctacattttccccagatgtattatagattacacttcaatcaaacatatactgagaatcagacaaaataaaaacccccaaattttctaacattttcatttctttgaaaatcctctttctttcactttaggcctctctctcagggaggatatagtctcacagaattacttcaagctttaataacacttttcagaagctagaagagctaaaagatgagttctagtttccacttaattttcctactgatttctatgaactgtgcattaagcacagaaagttactgctgtgagatactgcagggagaaccgtgagtcttctccaatagcagggaaactgaggtttagcaaaatgaagtgacttactcagggacatgtgttctttagtaataaaatgacaaggaaaagattttcaaaataaaagtggcaatgacagtctgtggtccaaaagcttccatgatttctccttctttttaagaatgaaactatttctgagagggagacgcaaccggcttattatataaatgcagaactttaatta

SEQ ID NO: 41392 - DNA, 1377 bp, Bovine  19866881655607
  misc_feature (1)..(1): n is a, c, g, or t
ntctttgttatatatatatatatatggaaactatatatattacctccatgtatattataaacccaacaatacattcttataggcctactttacataatcttctatcttgaagaacctgtgagacaaaagtggagcgattatatatttatagagtttgttacactaaatttcttttttatcatgtctgattcttctggtggatgtgagttatcactaccttaccccaaaacagctttgctcccaccctcctcctttgtactgttattgtcagataacattttgataaaatgttgacacatattatgtttctataagtgaaaatcctaacaatgcagttatatgcacacatcctagatacttattttttaaacaagagaataaaggaggggaaatgtgcaatcacactgtcttttgtaattatgcatcttcaccaacacttttttttttccatatagatttgaattactctcttgtgtcacgtgcttttagcctgaagaacttattttagcattgtaagtcaggcctgctagcaatgtatcttctcagcttccctttattttgaaatgtctttatttttgaaaaataattttgctgaatatagaattcttggttgacaggtttttaaagcactgctggcctccagtgtttctgatgggatgtcagctgttaatcttatatgtaatgaactgttttcctcttactgctttttaagattttctctttatatttgactttcagtgctgtgtgatatatttcagtgtgaatctctttatatttatcctagtggaagttcatcatgcttcttggacatataatttctaccaacaaatttgggaaaatttcagccaagactcctaataattttatgcccccttttctccattatgcatatgttggtgcacttaatagtgtctcacattttctttgtggctctgattatttttcttcctctttcagattacataatctctattgaatttgtcttcaagttcactggttctttcttctgccaactcaaatttgtagaaatccccaatgaattttttcattttgattattgtaccagaattttccagaattttttaaaaataacttctcctgcttgatattctctatcttatgaagcgatgtcattgagtgtttttgttttctgtcacaaggtgaggtttgcaggatcttagtcccccaaccagggactgaatctggtccatggcagtgaaagcactgagaactaaccatttattcccaagttttcttttaattttttctaagatgtatttatttttggctgtgctggttctttgttgcagtgagcaacggttactcttcactgcagcgcaagggcttcttacggcaggacttctctgttcccaagca

SEQ ID NO: 41393 - DNA, 1789 bp, Bovine  19866880182955
  misc_feature (1)..(1): n is a, c, g, or t
natatgctatctaggttggtcctaactttccttccaaggagtaagcatattttaatttcatggctgcaatcaccatctgcagtgattttggagcccccaaaaataaagtctgacattgtttccactgtttccccatctatttcccatgaagtgatgggaccagatgccatgatcttcgttttctgaatgttgagctttaagccaactttttcactctcctctttcactttcatcaagaggctttttagttcctcttcactttctgccataagggtggtgtcatctgcatatctgaggttattgatatttctcccagcaatcttaattccagcttgtgcttcttccagctcagcgtttctcatgatgtactctgcatagaagttaaataagcagggtgacaatatacagccttgacgtcctccttttcctatttggaaccagtctgttgttccatgttcagttctaactgttgcttcctgaccttagagatattcattaaactatgagatatttattcatacctcattgtaaccattgttacaatgtttgttgtaaccattgtttcaatggttacaatgaagaaagaagattatcaagttctgaggaggatatggtacaactagaactcttatttgttgtgtaaatttttataattatgttgaaaaatgatttagcaatgtctactaaaactgaatacacgcttacgctgtgactcagcaattctaagtatatacctaatagaaatgatctgtacaagaatattcatagcaatactgtatataatactcccaaactgaaaattcacaattaacccattaacaataaaaagaatgattctggtatcttcacataacctaacattcacataatggaatatagcaataagaaaaaataagaaaaaatggtacatggtgatatgaaacaacaaataaaccttgtaaatgtcatgctgagaaaaagaactaaaataaagaagcatatcaacatgctgtatggtagcgtttatttaaagtacacaatcaggcaacactagtctatgctgtttgttagagtcctgggtattcttataggaagagtaggacgaggttagggtgtggtgactggacaggagtatgaaagggtcttccgggatgctggggatgttccgtttagttctgtttcccaggcgtgcatgtctgtgtacattcattcaactgtacatttacagtatgtgcacttttctatatgttacatttcaatagacatttttaaaaagtaatgtgttcgatgttattaattttagtaaactactttgatacatacaggaaaaattcctccataagaacatcttcaaatactgtcaagtctgcatacttttaggataaataagtttttttaagttatttttttctaccaccagcttgattttgctcaaaataatttgtgagaaaataaaagttccctttaatattgatgcttccttgatgaatttcataagtggatagaggagactgacatagaatccagtgatgccaaagagaaaaaatgtgtatcttagaacgctgggtctttaaaatcctgacagttggcagttttctgcctgaatctcccttggggccgctcaggcttccctccaaagtgcttcaatagtagcagcatcctggcagaacggtgagtttaaaaataaatccttctgagtaccaccttgaagtttataagcaataatgaagtgctgcatcacagaacagcagtgaagccacatcatgatagattttaagccacagtggtcctctgggtttagcagtaatat

SEQ ID NO: 41394 - DNA, 3239 bp, Bovine  19866880366751
  misc_feature (1)..(1): n is a, c, g, or t
ntgaaacatagagtttctctaataatataccacaaagtatacatgaatatagctctttttccatctgtaagacctacaactgtgaatgtctaattacacagagctggtgtctactttaaatagtctctctgcccatgctatgtcagtatatttctagtataaaatgtggcaactagacctgtattcatttataatactgatcttgagggatgggaatcaggctaatttaagagtttattaaatccttataagttttataacttcataccagaaaaaagccataattgatttttaacaaatgtgtggataattagatttcactatttctcataaattactaaaatgaatagtatttctgtccacagtaagggaaacaataaacaaaataattcctttgtggtttgaactaagtctgtctttgttccaaaaacacccccaaaacttgtgccatgaataaatatgtcagtgggcttgaatttctgtcaacgttcttgggatgatatatttaacactcataatgtttttcaattgacatatgtctattgctatcacattaagaaactagcaagttcaaatttttttcctgcttcattatttaattacatattgataggttgtaattgctggctaaacaccttagatattaattgcttaactagtgataattctttgaatatggtataagtttgtgcatgtatacacatccatacacactgatatattcttcattttatgtttttatttatttatgttgcaaatttaaggaccacaacttccattcacaagctcaaagccatttatacatctactatgaaacaggctgtgtgttcatcctgagtaagacatggtctctgctctcaagaagctagtagggaaagtacaatgagcatatgttacaagggcaatgagtgagttacatacatcctttctgggtacataccacagattaaaccatatcttaaaactgtgacaattgaacacacaaacaagctgatgtcataggtttatctatcttgctttctcaaatcaaaaccatgggggaatgtgtggcctgtctgtgtgtgtacagtcactctgaggtcatctatgaggcaaagaaagaaaataatttcatgctctcatccaccttactcatccatgtattcatagttgccctgaccagaactgagacccatttaggaacaactcaagcatcaggattattaattctcaatcaagatgattcagaactgactaacctttgtacccaagggcgaagcagttcttttacatttcaaagtcatttattctgttcctgaagcctgaaagtcacactggcccttcactgtttgttcagctgatcacaaatcagaggtaatgacatttacattgttaattgactttgccccaactgttaactgtgttaactcctggtttggtgtactttcttctacttgagaaaagcttatttgaccttctgcatgaaactttaactagaactaattatctgaacaagaacattcccatactcatacaaccacaaacatgcatacatattaaatagagaaatgtaggaaattctctaattacctattctgtattcctagtccatgagaaacagaactaatgggcaaaacaaattaaagtttgtgttattaatttacccatatatagacattaaattacttgaaaaatcggggcatattagaggagtacctttcaggcaatatggttgacctaagtcgatgtgatgatgacctcttaccttaggcttgtagaatcaagacaaatagaaaaaagtatacatttcaatggatgaaatcctgaataatgtggagaatagtcacaaataatctgactttcctgtacagcaaatttcaagcaactaaatctttgcttcttgaatgtttctctgatcccagttattagactatattgactattactggtgtgaaatgaaaaatgagaattccaaactcagtttcctttattaatgagcactaaatgacctgaaaccaaagtcagataactaaaaacatcccactggtttgcttaaagtataactggtagagtttaaaatatctgctaattgttaactgttttaatctgttgcttgaccagtcaagaataagtatcagttcaggtcagttgctcagtcgtgtccgaccctttgtgaccccatggaccgcagcatgccaggtttccctgtccatcaccagctcctggagcttgctcaaactcatgtccatccagctggtgatgccacccacccatctcctcccctgtcgtccccttacacacagatattgaggtcacaattcagatgctcacatctcaataaaatccttactatgaattttaacacttataagtttgtaaagtgtttcgagattagtcaatagcctacatagtttgaataacattttattctaaagtctagtaaaatgtataaatcgggtttgagttaaattcaatgcaataggatttaatgtgtgcttaaaaataataatcaacaatttggaataattttctatgcagcaggtgctgtgctaagtgatttctgggcattatataatttaattttcattagaaccctatgaggtggactctcttatttccatgtcacagagaagattgaggtattctagtgagttaagtaacttgccaacttactgttattaagtgacaaatcttggattgaaaccaaatctaagtgactctagagccaaattcaaacttttatttggcctactgtggactataaatgagaaggcctggaataaagtctcagtgtcaattaattattagctctgagaccttaggaaaaatcactgaacttcccccaacttctattttctagtacataagacagagtcaataaaatgttccaaccattctcacagagttactatgacgattcaagaactaatgtaagcaagaaatttgtgccttgtagagtgctttgtaaatattttattacattgcaatatcttaacattttataactcctaaagcattttgtggtgccagtccgatattaaaatggttatctcattagagagagagacttaaggaagccattggaataatctttattctgccataggaaattttaggtagataacctaggatgacacaagacaagtatttgaaaaaacattcaccctttgtatgtgtcatgataaatgaaagagagatctgtgttatggactgatacttgtattctcccaaaattcatatgttgaagctttatttctcag

SEQ ID NO: 41395 - DNA, 2126 bp, Bovine  19866880374636
  misc_feature (1)..(1): n is a, c, g, or t
ntatttgcttctgtttttattaatgtctgcttcctaacatcttttgactaattttggtacatgttttctaggttttaagatgtatacatgcctcatttattttcaatttttgttttttaatatgaagtcccatttaggagtgcgatttttaatattttcccttccattaacttttagataatctatcacgtttagtttagatttttctcttctctctttacttgatggttaataggaccgagagatagaaataacatgttatcttttgttctagctttattattaattaatttagcttggccttgggccagtcactcaccttccatgggcttctgtgatattgcctgtgtgagaatcaaaccaactaaatatgataatatttgagaccataaattgctatacaaatttaagtcatttaagtccatgttttaattatttttgaccaactcactattcacaaataaattaggataaccctggggatatcagaattgcttaactttacagttttaacttcatttctgcttgttgtattagtaatcatctctcaaattgcctgtaagtttataattttatggaaaaatagcaagaattcacctactagatcagttttatttatttttttatatattagttgattaagttatttgaaggagagaaaccattttaaaaactcaccttctgaaataatctgtcattatcatttaagagtgggaacaaaacgaactagcattatctaaattcagttatgtgtcaagcacttttttaggtgttttgcattcaattctttaaacaaccattgcacagatgaagatactaggaaagcataagcaaactgcccaaagttataaatcttctgatccagcccttcccagctccctccctataaaatgagtcaataaagatagcagggttaaagtttttatctaaaaattttcagagaatgtaaattagttctttttttaaaattgaaaatatagatcatgattaagtaaaagtaaatgtggttttaaaaggcagtggtccttttgtttctctttgaatctttttttcttcagaagagacttttatttttcctttttgtttcctttaggggagaatgaaagtatctgagagcaatcatttactttgaactacaccattacttcagaattttctatcatgctaaatattaagttcatcttatgtattaattcaagagttcttatatgtagtatctaaaatacatgtaaaattcttcagtagcattcatttgtaatatttagttttttgcttaaaactacctaaaggcattaactactattatttctgatgaaattatacttaactgaggaaaaactgtagcctaatcagctttgcaattttctacaagtacagttctctgtagataaaagatcattactactaactagactggcactgatttgaaaagagggaacatttacagaattatatgagttctgagtatcagaacccagaatgttcccagaaaagagaaatagagaataagaagaaatgattaaaattgctgtattaatgaagatgttcattacgttatatataagcacaaacatatagaaacagtcttaaagctcaatagcagaggagtggttgtgttgatagtgggaaatattacaaaatatattcagtgacataggaaaatgttcactatataacaagtgggagaaaatatgtagaactggatgtacaatagatgtcacacatgtaaataaaaaagcatattgcatatgcatatgaatgtatatgtgcatatctacagaaacaagtctagaagaaaataccccaaaatatgttaaatactgcaggtttattgaaaattttacttttttttctgtattgttacatttttgtactaaactgaaagaaaaaaaaaaacaaacccttcatcttaaacattacagtgggagggatttcactacaaaaaagaaaatgtatataatttctaaaaatagggaggcagaactagctaatttagataatctctctttaaaaatttatagtaagttaatgtcaagaactaggttacgttctcaagttccttttgggtcttaatgatcctctgattcaactggagtaagggcaagcacaggactaaacacaggcag

SEQ ID NO: 41396 - DNA, 1899 bp, Bovine  19866880410339
  misc_feature (1)..(1): n is a, c, g, or t
ntggtgtgaaacatctgattgctgtacttattttcatttcagacggagtacatttagcttttgactgttgggtgtttctccttgggattcattttcctcatgtgttttgaaattgtagattgtcctctagatggaaagtgtttgttgttcagctttattgtccttgctttgttctctcctcttttctctttcctcctgagcagctttgcagtgacttctacctggacctacagggatctccagtccagcaactatcttctgctgtctgattagggtcacccaagctcccatggagatactgtggctctcagaggtgcagccagaaaaccaggttggggaggagtggggccccctgactgcccagcagtgtctgattcctacagcagctagctgtagtgttttcaatctccttttgtaaggagggaaaaccccattgctattactgatttctgcccttcacggagtgcatgctttggtctctctgtcctcacagaaatgaaacttgttagcatctctgcgtggatctgaacccaggaaccctgtagcttcagccccacttgccacttatgtttctttattgtcttgtgtgtatgagagatgtgtgtgggtgtgatatccgtgtggtgggcagtgattcaaaatgtatacaacttaagtcaggaaaaaaaaacaattattgtgaagacatgcatttcacttcctcagttggaatggcaccttttccaaagtagggatgaaaactagagaggtggttgtttcctgcaaaataaagatgttaaacatgagttcctgtcaagagaagtagcaacctaaagataaggaagataattttttttcccattttcaaagtataatttgtccatagacaataagaaaaatatgatcagctgattccttctgatgagatagagtaagctgtcaagtgcttaccatctggttcagctcctaatccagatggactgccagtagtaatttatgaaaggtctgaaagcaacttgctgctcttgggaaagaatcattaaaacatattagcactgggatttactcccattcctcagcctcagtttgtaacaaatgcaaaggtgtagggaaactgcttccatataggaaatataacagtctatttttgagccagaagtcaatatgtctgtgctctctagggggaaaaataatttttctttccccttccctcacctctcctggcttaatgaataggggagaaaatacttccatggtgaggtttctaacaaatgtctaaagaagccttcagtctgccctggagaaggaaatggcaacccactccagtattcttgcctggagaatcccatgcacagaggagcctgataggctatagtctatagggttgcaaggagttgaacatggctgaagtggtatagcatgcacacacacaaactatcattctctactgttgctctaaagtagaacagagctgtatgaaaatatagtaataaattatttttgtgcaggaaaaaaaaaaagaagccttcagtctgtcattcctgaacctctgtgatacttgaagaagtcaaaattgatatcaagaataatccaatataccccgtgttcctactacaggcaggaaccatttaatccattcatagagtgcctgaagatcaagcagtatttccaatgtaaattacagagccacagattgttaggcttagaaagcaggtccactggtcgcttctctcccaccccatcagacagcacctgagcagtgtgtcctgagtcaaaacaaaatgcccggggaacttgcttctaccaaatttctattgtccgcccacagttcttgccccatcacttattaacactactgtgaagtaatactgggtggctaatggaattctattaatttactttcagttcatgtaagaattg

SEQ ID NO: 41397 - DNA, 1179 bp, Bovine  19866880423178
  misc_feature (1)..(1): n is a, c, g, or t
ncatggggtcacagagtcggacatgactgagcgactgaactgaactgaattgtaaaaacagtttgaatgtctggtttgacatataaagctctctatatagtgtaaataaggcttagtataaaatcaggtacagagtaggaattacaaaagaaaacaatttagatttttaaaaaaatttaatatattcaaaacagacacctacctgcatcaccttctgctgaatctcttctaactgtgtacgcttacttcgttgcctacaaacttcctggtagcgggtatattgctctcgcagtgaatctaataatttcataacctgtggctgtgcaagcagttcatcatccataggagaccatgagacccctccatctgagccattaaatcgacgctgctgtaattcggataacaattcatgccctttacaaatgaaagatacttacaattaatatccataaagaaatacaaatcttatttctcaatcttctcaattttagtcgcttgtttttagaatatacctgcctatgtttacctaacaggtcttaagtactaaaaagcaatttttcaatttatatagaaataaacaggaaaactgcatgtatatatacacatatggatatacacaatttagtttatctatacactatgttctgtatcataactgtatcatatacagacagtccttgacttagtgatggtctgacttacaattttctgactttacaatgttgcattcagttgaacccatatttcaaattttgaattttttctttttctgggctagcaacacacagtatgatacttctgtgatgctgggcagtggcagtgagccacagcttgcagtcagctacaccatcacgagggtaaacacccgatacactgacaaccattctgtactcgcacaactcttctgtttctcactttcagtacattgtccaataaattacataagatattaaacactgtattttttttttcaatgccattctcccaaatcttcccatcctctccctctcccacagagtccataagactgttctatacatcagtgtctcttttgctgtctcgtacacagggttattgttaccatctttctaaattccatatatatgcgttaatatactgtattggtgtttttccttctggcttacttcactctgtataataggctccagtttcatccac

SEQ ID NO: 41398 - DNA, 1339 bp, Bovine  19866880438495
  misc_feature (1)..(1): n is a, c, g, or t
ncagaacacatcagagacaggatgaaactagttagtctcaaaaggcagcagctgagacatccagaaatgatgactacagagagctaatagctgccttcttcccagagacctgctgttcatagtcccgcatgtcatcagcatactccagcattagctacaatacgttaagatgcgtttcacagccaggataagcctcatttctttccattacacatttctctccacatgttaacaccttgtaattaccaaggcagaattgtttaacatgctttgagatcatagactccaagtatcgtaaaagaaggaactgtaaacattgcactgaaaacttgctttaaagctttacctgacctgtcagtttgtagatgaacaactgataataagctttgaatggtgctaataagagtttagaattctctctataaaaaatggttgcccttcctccccaggtgatgtagtaaatttagactatagctcaactgatattagtagacagtggtgtcctcaaaattttgctttggtaattctccttcaaatttgattatttttattgtgtccgtatgaagaaaaaccttcagatttttgatatatcatattcattaaaagacattttcctatttgtattgataatgtattaaaagttgtttgtgcttaataaaaggcttcttttaaacaccttatttaatttggtggttatatcctgtttccaaacatgagtgccttaattaaaagggcattcttaggcttgtgaggatggtttaatatttgttttttcatgttggttgcatgtattttagccaggaaattcatatgtaagcatgtatatataataaataagcatgttttatcaaaaaaaattattgtgaagaaaagtttagatgttagtggaacactctcattttctcttcttcaacttgaaaaatgttatccaaattactgttctgaaaatattttgtctttgggagaggagggctgggaaaggcatacatagttacttaaatgtcatcctctatatcagagtaatctttcaggagctaaaatagcaattgttaataacatttaatttgtcatgatagactagatgcaagattctggtgtagtataataacaaaaattgtacacatcttttagaaattaaatatataaaatgttaatgcttttaagtttatattaagtttaaatggtaaaatacatataattttgtgttcatctttgtttcagaaaatgtttttgagaaagattaaagcaattttatagtctgtgatcaatacaaaattatgcaaagtatgctcttttctttccattgtctactgaaatgtccatgtatcatacttccagt

SEQ ID NO: 41399 - DNA, 1247 bp, Bovine  19866880457201
  misc_feature (1)..(1): n is a, c, g, or t
nattgaacagaaggtagagctatccggccaaacactcaaactccagaatcaaagacttggtcatctggaagagtgtcatgcatccaacttccacccccaatgcttgggtggttcgttatgttatataaactctcacccacacaagaaacagcggtgtggagattcttggggaaaagccaaattcagcagctttgtgctttctgtattgaggctgaatccaccatacacagctgataacattcaaatctcatctcatgagaagagagtggagaaaatgaattactgttgctttgagcaggacactgtttcatttagggaatgcaaatcttttggctctttgatgcagctcaagattctgcttattataaatggaaaacagtctgtcatgctttggtatttgcattgacatgcacaatatcagagtgtactaggaggagatattttattttgtttcagctaacttatttcatggacacacttgaaatactgtacctaccacagaaatgtcaaaagcttcagatagcaatttctaggaaggaatggtcatgaataaaaataaatatcggggaacaagatgcagtattttttccttccttcatttcaaattcaaataatctaaatttttgcatttggctttttttttttagatttacatttatgaatgaaatgtcagttttaaattagatctgttcacaatcagattattgagccccaaacacaataaaatactgataatttgtgcagtgttgttaagatgtacataaatcctggttttggcagtttggacttagtcactgaaaggtgagacacccacttctccacttatacctaatgatgatttacacctgattatatctgctttgggcttccctagtggctcagagtggagaaggaaatggcaacccactccagtgttcttgcctggaaaatcccagggatggtagagcctggtgggctgccatctatggggtcgcacagagttggacacgactgaagcgacttagtagtagcagtggctcagagggtgaagtgtctacctgcaatgtgagagacctgggttcgatccccaagtcgggatcatgctctggaaaaggtaatggcatcccactccagtactcttgcctggaaaattccatggactgaggagcctgcctggccaaaggccattggaaaacaaagcattgccagcaaaggtccatctagtcaaagctatgtttttccagtggtcatgtatggatatgagagtt

SEQ ID NO: 41400 - DNA, 1452 bp, Bovine  19866880499823
  misc_feature (1)..(1): n is a, c, g, or t
nagagagaagagaaacttttccgctttcagtttctttcaaagccttcagaggttttacctgtctctcaaaatcactttcaagtcctgtcttagcttaggtttgtttgacacaggtattacaatggagatgcagctggaaagcttactgaggagtgctctcaggaaacccacctgtaaggaactgaaaaaaaaagtgaaattgttagttgtgtccaactctttgtgaccccatggactgtagcccactctgtccatgggattccccaggcaagaataccagaggggtagccattttcctctccagggtatcttcctgactcagggattgaacatgcatctcctgcagtttaggcagattcttcaccatctgaggcaccagggtaaggaactgaggcaaagggaaaagctgaattgcagttggttacagatgaggcctcaatcaattttagggggaagtctaggctgagttgagccaggttgaggacagggggccaggccattgtagtcccatcttagccagttatcattagtcatgggctgctccctcaaagaaacaccaacttggaggaggcaagtctttacagctgatggcaagaccccggaaaagaacatgggcaagcccatcagcagcatctggggttgagtgcatcaaggctgaggagtgggttcaggcggcatggcatccatgaccaggccctgaacgatgagatcccttcccatgacagaactcatctctctagccacactggcctccttactagtcgctgaaactgccagacatgccctcctctcaggacctttgtcttcttcttcctctctctggaacacacctcaggtagtcaattgtctggtttgcctaggctgggatggccctggttttagcaacaggatgcatcctgggaaaccgttagtcccagacaagtcaggatggtaggtcagctgtacctcctccagaagcccacatgtctcactcatcttttctgaacatcctacttataattgtaccctctaaatctcacatacatattccaagttcccctttccgacttttattattttctgtaccacttaataccttctaatatatcacttatttctatcatttagcttaggaaaataaacttgaggacaattttggcacataatagacatttcaaaagtatgcactgaatgggtgaaataagtgtttctaatattttgtagaaaacagttcctggcttgtaccaagtgtatgccatcctttaatgattacttaaaatttagatggtaatcatttatcattgttaattacttggcaattatgctggtgaaaggtcaaaattgatcacagaatcatttcttcagtaagtgaatgggagaagggatataaaattaaatcattctactttcgtgggttgatgggaatgacatgctatttttaaattatgggaaataatttaacagactacttat

SEQ ID NO: 41401 - DNA, 1559 bp, Bovine  19866880582645
  misc_feature (1)..(1): n is a, c, g, or t
ncatagggtaggacttgcttgaatgaacagtggcataaaggctttttcataagaacatgaaaaattcacgcatattcttaaccccctagctgattatgaatcactgatgaaatcccagcaagaaatgctttaccaaacacaagtgactgcatttgtgcaagaacctaaagttggagaaatagcgcctggatatgtatactctgagtatgaaaaagagtatgaaaaagaacaagccttaattaggaagaaaatggccaaagatactgtaatggtcagaacttttgtggaagaccaggtaggtatgacaataatgaccaagtaaatcacttcacacattattctttcctcctgcggtgccccggtttttgtttgatattttcatttttgagtgatgggccagggttatattactataagcagatgcaggtgcactgccgatgagcttccttaatcttcataatattaatatgttgcacatatgactttggaaataaagattacatgtaagtaggaaaaacaattactaaaacaacaaagctcattactgccgacattttttcatcggtaggatagacatcacacgtataacccatactctgagaataccattgttcaagacaccacagcatgaacttccaaagatgactgggaggcagattaaaaaataatgactcatctaagtctcactgaaaaacagataaaaaagcaaaattaaacacttctagatgtttcttcctgttaaaaattttaatcaaaccttatttctgaaaacaaatactcttaaagaatttctgtcagtcagcagttatctttttaacagactgtcatcttttttactacataggaattccacatttcttcctttgaagagagacttattaaagaaattgaatacagaataataaagactacattagaagaacttcttgaagaagatggagaagaaaagatggcagttgacatttctgaatctgaagctattgaagcaggatttgatttaagagtcaagaattatagaattcttgaagggatgggtgttacatttcattgcaagatgtctgggtatccattacccaaggtaaaatataagcattgatcatacctccatgctacagtaaagacacgcataggttatagtgtaaatcctttatgtaaatcttacttacatgtgcatgatattattcgcagattgcatggtataaagatggcaagcgcatcaaacacggagagagataccatatggactttctacaagatggcagagctagtctgcgaatacctgttgttcttccggaagatgaaggcatctatactgcgtttgccagcaatatgaaaggaaatgcgatttgctcagggaaattgtatgtggagcccgcggcacctctcagtgctccgacttacatacccacgccagaaccagtgagcagaatcaggtgagaatcatactagttcaggttgatcagtatttaaatcgtttaaaacaccaaatatctcagtagcaaattgctgtcatgtagtggggggtagaaggctaaaatacccagaagtctaccattctc

SEQ ID NO: 41402 - DNA, 972 bp, Bovine  19866880586453
  misc_feature (1)..(1): n is a, c, g, or t
nacaggtattttcatggttgaatgacagagttttctgtgatttgtctgatgggtctatgacgccaaagagagaatagaatatacttacccccaccctccagaggtagggtcttttgttatagagccttcatggtgtgctttgaggagttttcgtgtttttcacacaaagttttattgagaaacagagttatgtgacaaaagtggatgggagatatatattttatattctggtttgattcatttatagtgctgctgaaatagagaaaatgatgtggaatttttacacatacagaacatattttcctaccaaggatctgaaacaacattcaataaaaaggcataataattaagtcactaaaagataaaagaaaaagggtaatttttgaagaaagccagttatatgtgaaaaatctatgctaataaatttgcagttgagtataaaattcagctttaaatttactgcaacttaatctaaaaatgtatccatcatatcttaataagaagaaatgtagtgtaccaaagacttaatatcgaaatgtttaaaggagtttattgttttcattattcatttgatcttcacataaaacggggaacaaaataatgagcaaagagaagtatcttagtatttaaatgacctcatcatttgtgaacataaacactgaggtctcttatttccataagtagtgttatagtctattatttattttgaagaatatatgactattatttaaaatgaaaaatttaactcgtttggccttcattactcatgtccatgcatttccctcaatttttaacaatcttatattctatggtggagcttagtcccatgtttaggatcattgaattttataccgcagatccacagaaggcttattttactcacataagggttatttatgaactctctcatttgttcatttccattaagatacaaagtgagttacaacaaacaaactggcgagtgcagactgg

SEQ ID NO: 41403 - DNA, 1780 bp, Bovine  19866880621715
  misc_feature (1)..(1): n is a, c, g, or t
natgcttttgaatggtggtgttggagaagactcttgagagtcccttggactgcaaggagatccaaccagtccattctgaaggagatcagccctgggatttctttggaaggaatgatgctaaagctgaaactccagtactttggccacctcatgcaaagagttgactcattggaaaagactctgatgctgggagggattgggggcaggaggagaaggggacgacagaggatgagatggctggatggcatcatcgactcgatggacgtgagtttgggtgaattctgggagttggtgatagacagggaggcctggcgtgctgcagttcatggggtcacaaagagtcagacatgactgagcgactgaactgaactgagacatttttagttgtcacagctgggatggaggaaagaactaccagcatgtaatgtgtacaggtcagagacgctgctgaacatcctaggatgtacaggatagccccccataagagaattatctgactcaaaatgctaatggtgtccaggctgagaaactatagactacagaaatatttagggagcaacatggacttcactttagatattaactttaagttcaatgccagatttattcaaataaaatgacatgaccaccagaaaagcaacataactgctttagagatcacaaaattgaaataaacaggtgcaaatcaaagcagtctttaaatatttatgtatatttactaaagtgtttagaagggatgagagctgtaaactacattcccagcttgacagaaatacacagtgactaaatctagcattgtctgcaaaagaggtatgcacttcacttcggtaatagtcagcaggatctaaatttaggttatactcttagcgtattaaaatagcatcaagagctcaggaagtctaaaaccatcacactccaagtttctgtctatacggttaatagctacttgccagagatccctgttgcctgtttgattacagtctattaaaaacatattctttgcaaacttctcccataaaccaggaaatggagttaaaagactgattctacataaaataattagaacacaaatatcatgatgtaaagcattcatagagaatataccttaacttccatagttttgtgagaaactttatgaggcttttatactggttaccatgaaagtaaaaatgctttctttcagagttccagtgtcacaatggtaaatgagtgaagcaaacgaacatttttagttgaacagaagatctataatattaactgcctgtaatctgacttggataaaagttgaactggggaaaggctgagacaagcctactattaagtgattaagattgtgtcttggtaccttaatttatctgtttactctctcttctattgaaacaaacaaaaaccagatggactaactcaaggatatttctttttttttcactccactttagaggcccttctaaaatgtagtttgctatttttaaaaaattgcttcattttctgaaattgtagctcaaaatatattccttgtagtaaagcactctcaactgttgcaatctagaatcacctaagcagatgcataccaggagaagaacaaacctagaaagtgttcagaattaatgtcctacagcaaggatgatgaaggctttttttcttctaaggggctatgactcaagaataaaaagaaatcagctgtttcacaaagtaaaattaaataatgctagatttctctgttaagcaacgtatatataatgccccctacttgtggcaggttcttttcctgtgttagata

SEQ ID NO: 41404 - DNA, 1809 bp, Bovine  19866880624407
  misc_feature (1)..(1): n is a, c, g, or t
ncaccaggctctaggccatctgtgctacagaagaggtcagccagatgccctgcctttctccattgctcagacttcattttatcgagcatggtgtgggtcagaactcttctcgaattatttttataattttgcatgtgctaagagtttgagacttcccctaatttcctgagcattttgtaacatcctttgtcaaaattgtaggtaacagaaacagcaagagtacctgcacctgttgaaatccctgttactccaccaactttagtctcggtgagtaaagttgatagtgttggatcacatgcatatctagtcaaataatgttcatatatgcaaagatcagcttctcaaacttgaaaattccatgagtgtgtctgcaagtatgtaagaccatatactattaggcaaggagagggggaattctgtgtgacagcctcagtcacatagccagcagattcgatgagtttctgttatgtgtaaggcatgattgcaagactagtctagccctctttgaaatctgtcttactatctgaaaaaatgtacgtaaataagcataataaaatataaaatgtgataagcacttcagtagagggagggtgcaaaggaaagtttgattacttctagttgaggataacatggaaagcttcgctgaagagacaacattcgctgctgagacttcaagctttgttaggatttgaatatgtgcaaacaacggagggtacagggatgccctcttatatgacatcagtacagttccaccttatgaagttggaaacaccttacatttatttcaaattgggagtattccaatttccaaaggagtttctttacggatagttccacagtcttgatgttaagaaagcattttatgacagttagaatgtacaaggtcaaacctccacgtttggtacaacatatagagatgattcatgcatctgcacacgtatcaatacttcctgtttcttctttctttagggcttgaagaacgtgactgttattgaaggtgaatctgtcaccttagagtgccacatctctggatacccatcccccaaagtgacatggtacagggaagactaccagatagaaagttccattgatttccagataaccttccagagtggaattgctcgccttctgattcgtgaagcctttgcagaagacagcgggcggttcacttgcactgctgtgaatgaggctgggaccgtcagcacatcctgctatctagctgtgcaaggtcagtggtcacacccccacggaccttccacacactcctcactgccacctggcacttctttctacacacctggtaatggagcccccttttagaattgagggtcaacttaactgtcatgctaaggagaggtcagtagtgaagcgaactaaatacctgactttaaccaaagaaccgtctgtcttcttctagtgtcagaagaatttgaaaaggaaacaacagctgtggctgagaaaattaccacagaagagaaacggtaacaccttcttttgctaatgatttttcactgtagcacagttttgcttggttagtccctttcatgttggcaaatggcagtccggaagctcacatgaagggcattctctttccagcttcgtcgaatcaagagatgtggtaatgaccgatactagcatcacagaggaacatgcagggccgggagaacctgccgctcctttctttattacaaaaccagtggtccagaaactggtggaaggtgggagcattgtatttgaatgccaggttgggggcaacccgaagccccatgtctactggaaaaagtcccggtgttcctctaacctcaagat

SEQ ID NO: 41405 - DNA, 1140 bp, Bovine  19866880626877
  misc_feature (1)..(1): n is a, c, g, or t
ntaacatagctctgattactacctgtccgctatttttgtttaacttattttggagcttcctcaccagttttgagttgcgaagcaaatgtatacaaacagaaaaagagcttcctaaattgcacatttttgcacctctcgtgcactctgcaagaagacaataaatctatgtatttctatgtcattatcttcatttttaacctgttttcatttgtaatgatgctacataattttgtggctccctaatgcaataatgtacagaagataaaaaaaaatttataattgaacaatctgtctttctgttcactgaatctgttgcaggttatgctcccatgcccccgtttctaagctgatatcaacaagactggaatgtttgtgatatcaggggcaagaggtataagacagcaaaataaaatgaactcttttagagcatctatatctgcaatctgtaaatggtaaaatgtctgtgtatttttttaaatgtaccttttcaataaaagtacaaaaaataaaatctgtttattttcaaagttattttctcctgagacacctccaatttgaactcatctgatgaaggattttcagtaggtgtaaagattgcttctaacgtatttagcattttcacttcttattttcagcatatttatttgtcatgtttattcattactgttcacagcatctgcacgaagtgagactttactgctgttttccctctgaatctctaagaagttggaccagagttgtaagtgtgacccaaaatcacagtagcagcctgccaaaaatgttgacatagtttttaaacattccctgagtcttctaaatcccaaactcatcttttattcaagtccaacacaataatgatctccttttagaggaactgattccactctcccctttgaccttctctaatcagccaacccctcttttcttccacttcattccgtttttaagtgtaaagagcaatacatcctggttttttctggttatctgcttaatgagctgctctaatacatagtagcttaagataaaaccattttatcgtatcacagtctcgggggccagtaattctatcaaggctcggctgggctgttctgttcctgagtcctcaataaaagatccctgggtagtatttggctggtagat

SEQ ID NO: 41406 - DNA, 2109 bp, Bovine  19866880676045
  misc_feature (1)..(1): n is a, c, g, or t
ntcgatgaatgatactggatgcttggggctggtgcactgggacgacccatagggatggtatggggagggaggagggaggagggttcatgatggggaacacgtgtatacctgtggtggatgcatgctgatacatggcaaaaccaatacaatattgtaaagttaaaaaataaaataaaatattaaaaaaaagaaacaaaactaatcaatcataaaaccctttataatctaagtactttattacatgcacctaagtcctttatctgtggtgtcacggactccagtctggaccatcatcttagcgctccacactgggttcagattatcagtgttgccaactatcatttccccctatgaaggtcggttggtgcctcaaaagggcatattttatctctataggcccaggccctagatcggggcccaatcacagaagtgctcaatagtttattagtccaacagaattaaactatgctgctctgactgtgaaccctgatccagcaagagatggtaaatcagagtcaattagtcactgtgtggccctttacatggttaagtatttcatgaaagttcatttattaatttactttgagtcacttatgtttccccattaattttcatttggttcacatacccaaaaaagaaacaagcaaactgtgagattttagtcatttaatggatgactgcagcccaccaggctcctctgtccatgggattctccaggcaagaatactggagtgggttgccatttcctactccaggggatcttcctgatctagggatcaaaccctcatttcttatgtctcctgcactggcaggctggttctttaccattagtgccacctgggaagcccaatgtatggaaacatatgatgtttatgaaaaaaattagaaattttctcagatagttaatataaaaccatggtcaagactaatttgtgcatgctaagtcgctttagtcatgtctgactctgcaatcccatggactgtagccctctaggctcctctgtccatggacttctccaggcaagaatactagggtgggttgccatttccatgactgattcagactaaaggaatgtccaagtgaaaccagtactatcaagagaagtttgcatgcatgctcggtcatgtccaactcattgcaactccacagactgtagcccaccaggctcctctgtccatgggactctccaaagcaagaacatcggagtaggttgccatttcctactccagaggatcttcctgacccaggaatcgaacccacgtcttttgtgtctcctgcattggcaggcagattctttttcactgagcctgggaagcagtactaccaaatctttgattatattaaattagaaactttcacaactatacagaacttccagttaaagcactgttcctaaaaggacatttactgaatatgcttttaaatgtctaatttatcacgagttatttgcatacatgtatcaaaatccttgaaagcaacttttcatcacacagattaatactgtcatctgaagacttatttttgctattaaattacttggcaaataggtttcttgataggtagcctaatgtttatgctaggctaagccagtgacattcataatgtcttaattagtaaaggctgaattaatgagacttcattattatagcaatattttaagtataacatgataggaagtgcaagcatttctaaagaacaatctttactaacacaaaaggtattgttttttaatgcagaatgcatctatctaaatttttatttatgcacagcatgttaactctgaaataataagacttttagcttcacttgttttgaacagtagattttaaaagtgtgtccctgactttatgatcaaaaaatatatatttcttctgttatagaacaattccaacatctgtactttgagttatacttaagtgtacttttacatttcattacacactaaatcatcaaaataaacactgaggattatgaatttctaactcttaaataactgttttggtatgttgtttctttataaatcactgttttcattttaaagataatcaatcatagaatcatatagtaacagaaccaggagagattctgttacaaatttaggaagggtt

SEQ ID NO: 41407 - DNA, 987 bp, Bovine  19866880686932
  misc_feature (1)..(1): n is a, c, g, or t
nattgcccttgatgtgctgtgggggcgggggctagacttgagggtttccacccgggaattccttcctagcacttctcaggaaacacgatttatgactccagaaccctgggagaatcagttgagggaacgagaagaagtagtaaagtatccgtgaatactgaagcttaaaagcataaagctgttactggtttgaaggaacccatctccgtcagataaaaactagagcaagaaacggttgcttatagagttgagtgtacagttacctagccagaacaggagtatagaagaggagtggtttccatctcgttttgcctgggattgtctagccctgtccactgcaaaccctgagctactcctgcaaataagataaatgtgtacacgtagtatgctttatacaaatcctgtgagtggtgttctaagaaataagctttggaagcaaaataaattcttaatttggcaattctgatactcgtctgtactcttaaccttgttaggctatttgaatgttaacatttgaatactatccagtacgttctctggtgttttccaaggtttaaatattccctagagactgaagttctttgtaaacactattaagtttaataatcctatttgttaaacagatttttttttcagatttctgtaataacaggaaaagtatgaagaatgtttgacatattttaagagtaagttatgatttagggaatttgtgagaattctaatttcttgctccaaaatgctaaaggcacacagaagtgtgttgcgagtttgtaagcactcacataaaccacgcagaaacgggcaccctccagcctggggcgaacccgcgacctcagaggggtctccagggcccttcatgtgcagcctgggcgagagcccgagtctctgggtgcctggggccgcccacctgtccctccactccactgatctccgagactcagccccccgcccggcctcaagcgcgggtgttcccagggcagtcaaagg

SEQ ID NO: 41408 - DNA, 1910 bp, Bovine  19866880756269
  misc_feature (1)..(1): n is a, c, g, or t
naattgaagaatagagtggttactttctcagcttatacagtaattcaggtcgaatcctaacaaatcctatttcttaaccccaaagacttgacttctagatcccatttcatcatttgaatgccacagcgttcaagttataattagttcaatcgggacttatccataccaagtttacccatactatggaattctctatggccaagtggtgcttaggtgtagaattccttctcccttctcaaagcatcaggaaaataatttccaactccaaatctaaggactcagtttgaaagatgatggaaatttttaccttagcaaaaatagaagctggaatttagaaagtggacgtttaaatcatgattcttgaaatgaattatttaccatattattaataagcaacaaatggttaaataatgcatgagcttcccaggtggcacagtgataaataatccacctgccaatgtaggaggcaaaagagacgtgggttcgatccctgggttgggaagataccctggagtaggaaacagcaacccactacagtattcttgcctggaaaatccctggacagaggagcctggctgtagggtcacaaagattcagacaccactgagcacaggcatgtggtaggccccagcttctaagatgaaataatatagtgagtaaatccatttaaattaaagaaagaaactcgagacttgtaaatggtatttttctttctgatttatattgtcgagcctccaaattctataaaactcttactactttaccctattttggggcatagcactcataaataatcctagttacaataaagcactggatttaagacattattataatttttaaatcccttaaaatatttttttctagtctgaaagttttgttttcactattacagttatattttcattttacatcatcaatttatctctgaagcatttgagctttccttctgaaaattcacttcattgtgccttgagtgggccagggttttttgattgtggttgtctacatccttaatgaagccatgctgccaacagccgggaggagtctgaggctttttacacaactttctaactaacatctttgcttgccacagttcatggatgctcacagaagactcgtgacttctgaatcagttttgaaagacttcactactcaaagccaaagcagtaaccagagtgtcagaggtcacatcagttccccaaatccctgtttctcctccagaggcaatgcagatggggccctctgaatgagggcatcactgcagggaagaatcctaaacttggggaattagctgttttgtaacaaacagtaagcaaccctgctctttgtctcaggggaggacatttcctcaaccctggaggttgcaaatccagcactgagaatagcccaggtaaagaggggccagagtcagagtaagtatccatcttacttacacacagtaagatggatagaagcagtgggggatttgcccctcatatgcaaatctgggtattggcactgtgaaaaaaacaggacatcagggcttaaaaaaaaaaaaagaagaagaagaagaagaaacttgggtggctcagctggtaaagaatccagctgcaatgcgggagacctgggttatccccctggggttgggaagatcccctggagaagggaacagctacccactctagtattctggccatggactgtttagtccttggggttgcaaagagtcaggactgagcaactttgactttcacttttcactttacctcgagaaccagtttcatgcttgataagtgaaatcattttttagcaagcaacctcttgttccaagtttgttaaagctaagccaatattctttaacttctgtgtcaactaccagtgtgaaaaaatgttagtgccataggtagtatatcaattagtgaatgtga

SEQ ID NO: 41409 - DNA, 1475 bp, Bovine  19866880758877
  misc_feature (1)..(1): n is a, c, g, or t
ncttgattcttaattcttttgttgccctaacaaagttagggtaaaagtaacttaaggtagggtatatgtaagcaacaaaaggtagggtataagcaactaaagggaagaaaaaaatttttataattgaagtgtcagtagaacttcatagatattggcctctcaacagaaaataccactgaacacgtacatacaacagaaaatagagatgtattgaaatgctttgaaaatagcctctgaatttagtcaaatcacaggcctacatcttgctaaagttttaggctatgaacaaacagtgatttcttctttaatagaactaacaatgttagtcccttcattttactctattgacttgcaccattataacatttatttatctataacactaattttagatgggcttgtcagcagcagactagctagttaaatatgttataggaaataagcattttttaaaaatctatctttgagaaagacaaagatacgtatgacatcacgtgtggaatctaaaatgtacaataaagtagtgaatttaacaaaaaagaagcagtctcacatatatagagaactagtggttaccagtggggagagggaggcggggaggggcaatatagaggtagggtattaagaggtacaaacatttaggtataaaataagctacaaggatatattgcacaatttaaggaatatagccaatattttataataactataaatggagtataacctttaaaaattgtgaatcgctgtatcatacaactgtcatttacataataccatacatcaactatacctctattaaaaaaagaaactgttttcataaaaatatgaaacccaggttaattgttaatggcctgaattccagctgggaagactcttaaaatcaagagaactggagtttccagaacaggcagaggaaacgaacgatgctcacgatgcccaggtcctcctgagacgctctcgggcaaagcaggcgcatgtagaccatctgcatgacctggctctctccttgggggtggatgtcatctcatcagtgcagcagcctgtaagcaacttagacactgttattttcacatgatatggctgggagttgggctgtaatatgaaagaaaccgggcagaccacctggtatacgttcaattaaaaactacagtaagccattgggatacttatttgtggtaagtttctaccacgtctaaaaaatgttttaaggagaaaaaaaaatctgattttaaaagtcttgtttaatacatctattctcatgctcatgtaaaagttatagaattgctatctataatggcagttggtttttcacatttgaaataaagaggaactaaacttttaattttatttattttaaattgataccccaaattgtaaaccttttaagtatatacggagtgacttggctatgtgaatctactaaagtctatgagatttaagtacagaacaagtttttctaaacaaatttagcaata

SEQ ID NO: 41410 - DNA, 1643 bp, Bovine  19866880785671
  misc_feature (1)..(1): n is a, c, g, or t
naagtagagagaatttgcattataattcattgtctgctagaggacttgcagagtcatttaaaatatgaacctgcctttctcagctggtttgtaaagagctattgattatattcttgaaagatagtaatgtctttctttttataggagttgccattttatttgatagattcagtgatattgatttggcatttctgcaagccttgtgccagggatatgcaaaagaaaaatgatgttggaacatcacaaataaattgtgattcagtaatagtatagaaggttttagagattatctcttaaggcttcagatatcatttttattctatttggtaggagtgggaattcctatgtttagattagagaatttttcagagtgggcttgaattgcgcttggtaaatctcactgttactgaatgcttgctattttgcagaatacgaagcattgtgggctgtgtaagagttaccgaacatggttcttgtcttcaaagagtttatatttagtcagggaggcagtgaaggaggaaaccaagcaaaaggacacagagttcttaaagcttgtatctgctccttgtaaaatcagttacgctgcagtgagctttggtgagatgtcatagattctaatggatactgtaagaaacaccccagcccttgaaaactgatagttgtatatcgtgttctttctctgtatagttttctctttgctttgcaaaaattactgtttgatcttagtaccaagaatagttccccttctgagtgcttttctgtttatctcctgaactgtggactggattgtcccttaggtgatggctgttagaaagccagaccagatttgtagcctaccccagagcagccttatagattttatgctgtatattttttcaacttttttcctggcatcatttttggtattttccttattcttttctattattttatatctatgaatttttttatagttcatgtattcctgtaagtttcattaatcctttcagaacaaagtaggagtaaatgtaataaatatatgtgaaattcatggaggaacttatcaaggcaaacaaatcaatatgacaaataggttttatttcacgggcctgctgagattgataacgatggctgcctggagccctgcattgagaagtatcagtagctggggtctgtttctgttttgagaataagtgcatttgtgtcatttctttctggattcctcacatcagtgatatttctctttctctgacttcactcagtataacaatctctgggtccatcagtgttgctgcagatggcattatttcattgtttttaatggctgagtaatagcccattgtgtatgtgtaccacatattctttatccagtcatctgttgatggtcatttaggttgattccatgtcctgattactgtaaagtgaaagtgaaagttgctcagttgtgtccgactcttttcgaccccatggactatagcctaccaggttcctccatccatgggattttccaggcaagagtactggagtggggtgccatttccttctccaggattactgtaaacagtgctgcatgaacattggggtgcatgtatcctttcagatgatgtttttctttggatatatacctagggattgcagaactatatggtagctctatttttagt

SEQ ID NO: 41411 - DNA, 2312 bp, Bovine  19866880787482
  misc_feature (1)..(1): n is a, c, g, or t
ncatgaaattaaaaaaaaaatcctttgctttgctcatctctgattaaaaagtctgaaatatgtactaactaaaaagcagcaagagttagcacttgccactttttataatgaaagtcaggcagaaatgaaaagtaaaacctattagtgcaattaactggtaggcaataaaaatgaaaaattgggttgtggctgttgccaggaattgaggagataactggagggtatgtatggacaaattaaccattttattacagtacttataaaaggaattcatgaagctagtcttatcacaccatctattatattttcaatatcaaaataagaataaacaggcatctttgggggtattcacaaagtttatggaactacaaatctgtatttgtatgagttcttttttaaaagatcattactttcactgattattccaaaaagtaatttatatccacacagtgtaagcaatcatataaaaacacatgcagttgcaaataaaacctagccaaggggaaaaaaacacaccacagcacttcactaaaggcaggatgaagtctaggggagggcaaagaagccagggtagggaagacatgaacaaataacttagtactagatgacatttacattcgagataattttcctaggtggaattttaggcaaataaaataaaattacaaacctttcacctatctcaataattttcaaggggatgaagttcaaattgtatgaacttacaatgagtcttacaatgacttcactggccatcacatggggctgggtagggaagcaaaccaagcactacttaaatagcaaaaaagactgctcaagaattataccagggtttctcatatgtggctgggtatccatactattcttgaagatgaggacatttcatcttaaacgtagctaactgctttaacctatgttctatgaagcatttggtaaccatttatacagtctagcaggcaatactagctttcctactaaacaggagcagaaatcaggtttttgactttaaaaagttaaagatcagtcattcaacaaacattctggaggtctaatatgttccagatgttgtcccaaattagatggggtaggatgagtcaaacccaagaaaggacattgtaaaaatgaaaaagggtgatgattaagcaaatcaacaaggcaagagaaggcccatgaaggtctgtcccctcttgctccaccctgactttgaactttttcccccttttctgattttctcacactttaagcatccaggatcctccctttaacagtgacataaatgtgtttatactcctgctctatttgccttttaatttttttctctaagctgttatcctggagaagggaatggcagcccacttcaatattcttgcctggagaatcccatggatagaggagcctggcgggcttcagtccatgaggtcacaaagagtcggacacgactgcatgactaatactttaagctgtaataataataataaacatcttaataagagcaggttagatttacagaactcttagcatgtgccaggaactctactgagggattatctcgtgcagtcaccaccatcatgtgagacagatatcactgttaccctccttttacaaatgaggaatctgaagctttgagaagcttaataactggtcgcccttgagtttgtaggtttgaagtcaggattcaaactcaggcaggagtctctccccctactcttccccgctaacggaccaccaagcagggttatggatatcgtgtgtagcactgctctaggaggtaagatttgtgaagaaaggaggagtgtttctagaattccctgcagcccagacaagctacacagaaggcctgcttggtgttcaagtaagtttcctggagaagtgagtctcagtcttcttctttctgaccaatatatgcctttctaaggacgagcccatttcttcttgggctacttcaggaaatccataaatgaaaattggggctgccctgttctctttccccattgtaactgttgggcttgcatacagaaaaaaaaaaaataaagttccagaaatacttagagattacacagagcaggtgatggccatcctttgcacctgtccttgatttactacaaagcagacctcagctactaaatccttgtgagttacagctttccagaagtttggcaaaggatcagttttttaatcgcaatattgtcaaattacaggagcacaaaaagaatgactatttttcatcctttccttttccattattggatttatggaaaagaatgagacaatagggtctcattagaacttcaaatattcaggaactgacactt

SEQ ID NO: 41412 - DNA, 787 bp, Bovine  19866880792695
  misc_feature (1)..(1): n is a, c, g, or t
nccccctgattattataaaacaattagagtcaaaacttaatttttcaaacagttgtctgttagacttctcctcccccatacataattaaacataattaaacataataaaataattaaattttatttccttccaaacgattcacatgcagccatatttaaaaaataaaatggcagtctggtagctgtttcatgttttcctgaaaatgacctttccttaggttcagtagaactagcccaaagatattctatttcatcgtctcttccttactcttcccacctctcatttttaagagcctactttcccttcaagtaaatgaggagtaacatttacctgatcattcctagacaacttctttcattcatatttgccattcttttgctttcccaaactgctcggaagccctagtctaactccctctattccatcctctgtgtttaatcacaggtttcatatgagtcctcccagagctgcctgaactcttccttgttactcccatgtttgcagcccacctgcacttaagataatgtttattatggactttaagttgtagatatgattcttctaccactgtatgaagtagatgattcataaatatctgaacattctaacaatcctatttggtgcccccaaacactaggtccttggtgtttcaaattcacttccagatttcttgtccactttagtatgaaaactaacaggactctgtgacatacacaaagcttaacaaaataatattactactagattgaacaaaagctggtgattagcagtgccataaagaaaaaa

SEQ ID NO: 41413 - DNA, 2015 bp, Bovine  19866880802051
  misc_feature (1)..(1): n is a, c, g, or t
nctgatatgtttacaaaataaacaattaatatttaaattttttgacagtggatgtgttaaaatgtgtgtgtttgatattagtgggaaagcacaaatgaggacaattttatgaggttaagatatgaagagatagtagaacaacaatgtgaacgccctaaaatcacttatatgtactcctaaaagggttaagatggtaaactttatgttatgtgtcattcactacagttaaaaatataatttttatttgtaataacaataaataaaataaagtaaaaagaaaggaaaaatatgtacagtcactaacatgtatccatcagaaaaaaaaaattttatattcttttttccccatgactgtaccataacatatattatagacttcagtctggacaaaggaagagggactctgtcatcaacctgataaccactgagttatgcccacttgtttaaatgggaaaaaaaatcaacatctatttgaaaactgtgataaatgaagaaaagctgaggcttaaccttttaattctaagtgatgacatttaaagtttaccttggattaagaagtttgaggctgataaatgataagtgcaattttatttctgtttgccttagaatgtatgtactttcactgaagatgatttataaggccaaaagaatgttcatggtgaaatggggatcagtttctttctgacatatgatctcctttgacaaacttgctggcccttctctcttttggtcccactggaaatccatttaaatcctgaacctttcccagctcaaattcaggactattgcagatacaagttgaaggcagcaagcatgaattaccttcagcaaccagattttcagaaaaaaatctagccatgtctaattttcttacctgcgcattctaatatgaaaagttaacttcccatctaatacccatataacttgttcatacatttttttttaaaaaaaaaaactgaatgccatggttgcttcgctatggtatcattgttcatgcatgcagctgttttaaactttagttagctgatcaacaatggggaatggtggagatggccaagacaactgctcaaccagagcacagaaagaaggaaaaccacccaaaccttggggcaaggataagtttaccctattcaaaatctttaaatgttgttataatttgtattgataaaatttatgaaagtcttaagaaaatcaggagaaagatcctttttcaaatgcacagtgtgattttcctatctttccacttgtccagctcctccatagttgctatagaatatagctgtaattaggaaaaaaatcattaagacttaaaactgcagttcttttgaaactaacataatgagcatcttcaccaaatttcccagggagcagaaaacttctctcagggttagacataaacaaaacttcttagggaagaagcaaaagggaacaaaatggggaacaaagaagctggcttgctattttagtcttgacgaagctggctgaggctactttggcacaaggatgcattatttgtgagtctgttgttggcaaggccactttatgtgccggacatgggacattttaaaactaagacaatgtctttaaaacaaaaacctttcattagaacgatggcacatgactagccagaagcaaaaatacaaaacaagtagttcatttctcttaatgtccatttcatgagctttattttttgcccatcatttttgcctactccagaaaaaaaaaaaagttttctgatgctcattttcagtaacagaaagaaggctctaatgttataacaccccagggatgcttcatttgaaatgaagtggccccaaactcctaatttaacccgagtgactagctacaactattaatggtaactttaactttagttctggagagatttcaggaccagactttcttggcctcctcctgttcagcaaccacatgactgtcttcctgcgcttacgaccagtcttgcagaagcagaaagtggggcagcctggaaagaggagacaaggctccattttaca

SEQ ID NO: 41414 - DNA, 1572 bp, Bovine  19866880861713
  misc_feature (1)..(1): n is a, c, g, or t
ntctttgctttgttcccctaccgcccctttctctcatgggcctggccccagatctgtttagctggggttggagagagcgagccccatgggttttgtgttagatgcttcagacaagccgtcaacttttatcctcatgacacccttgcggtccatactgcaaatccacagtctcttacccaaaagccaggtgtgcttcagaattctgattcatttcacattatggaaaggtagcgctgcacaatatacattttataatagtaagcccccagtggacccggggagcaccttgccatcaaacaacataaaccctttctgccgggaagtgtaagaatattcgcactacatagaaaaacacgtaacctcaggtcgctttaggtcaggtcttgctgccaagtgaattatgaaacgcttctggtttgccgagtgcggagtctggaatgtggacaaaggagtgtggacctctgaaatccttgctttttggaggaggcaactgaggttcccagagtcaaactctactcagagagggcggatctgggtgaggacacaacttggtccagctccaaagcccatgctcttttcacggcacattctgggctcctctgctggtctgctgcctgatacaaaaagggataaagggcagacgttgctgattctcagctgccccagcaatcagtcagttcagttgcttcttcgtgtctgactctttgcaaccccatgggactgcagcacgccaggctaccctgtccatcacaaactcccaaagcttgctcaaactcatgtccatcaagtcagtgatgccatcatatatacacacatggcatatataatttctgaaagtcagctaggagacccagaattttgggattagactaaattttttcatgtgcagaaccaaaaaatagatatttcctttagaatatgtgttgaaatgaacatgtaaaatagaccaaagaggacacgtagattaatatacctatttgggaagtcacttctgtaaaaatttgagtaattttattcacaagagaattccctttaataaaaagagctagaaaggagcagcggggggaggcggggaagccacatttatttagtggttgtgacattttccaccgtagagtcaagggaaaattggagggagcagagctgaccacctacccctcctacgctagatggttccagcctggagaagtagaagacttggaggatggtgacaaggctgtgtggaggcttaggggttggggctcgagagtaggagagattatctggggaaagtctgcagtgcgtgtggaaactactgggagggaagcaaaggtgagagagaattggtgtttattgtgcataaaggatgcactacctgtacattttatataactttgaaaaaattttcagcgtttaataattctaaaaatgtaaggattctatggattccctggtggttcagcagtaaagaatccacttgccaatgcagaagacacaggagacatgagttaagtccctgggtcagggagatccccggagagtccaatattcttgccggaaaatcccaggacagaggagccggggactacggtc

SEQ ID NO: 41415 - DNA, 2002 bp, Bovine  19866880870581
  misc_feature (1)..(1): n is a, c, g, or t
nctcatgcagttaaaaagcagcaaaactggcatttaaacctaacgctgcatccaaggcctaagtgccgttacttctcacgctcttgcttaacacagtgacctatattatggtatgagtaaggagggccttcagcatctctcaaatagaactgctcattttttttagatgtaatgacagtaaatttatgtctattaaaaacagtgccttatcttttattgatgacactttaacatttacaaacacagtatgtctgggatctgcatcaatgatggggagggggatatgcatggagtaggactggtcatattgacaactgttgacagtcaacagataacgggtaaacagtggttcattttactactctctctgctcttgcatctttgaaaatgtccaagatacaattaagaaaactaagtctttaaacataccaatactgtaaaagaggaagatacaatctttaacaactttttttacattcagcaatattttccttatttcaaagtcaagagacaggaaacaggctacccataattttaaaaatttttcacatattcaccatcatatcctaaagttcttcatgtagaaagatctgagtatttggtctccagctaagactgctgaggaggaagagaccaattctgacacatgcaataaccagaagataaaaagacgacggcaggcaggcagaatgcctactttcaccactgcgttggaactgcagacttaattcctgtccctatacatttgtctcactttgtgactggaggcattttttcagaagtctccctctcactgtatcatactcttttataagtaattaaaattattaagaaaagcaaaatttatgtccacaataggcatttgctgtgatggatgaacagaatggctggtcagaagacaggaagagctcttggtggagactcaattaactaccatattgtttgactcagaaaagaacgagagtccaaaggttttgcgtataacatattaacacataagagcatatttcaaatttaataacaacttgttttacctatacagtcaatagagccaaaaaaacttacttctaaaatctaaagtaggtattagctagctcagccgtttgaatgtgtctacttgtttgcccaggacaaagcctggcacatgaccaacgcacaataaatattcgttgaataaactcccttcttacagtcctgccagctttctcatttaggtgtcactgggcaaaataattaggaaggaggagaagcagcaagggaaaaacaagcttaataattttacctgacaaagcattatgaacagagcatgcatttgctctgtagagaatattaaattacatagttcagggacctttactgaaatatcttggggcctggcccatcgggatcatgaatgaagagagacattttataaagccttctttatgctgagccaactcttaattttggcttttagaaatggcttgtttaactttactacatttatagtccaagtgagttttcattatctattttcaacacttgggaaaagttactatttaacatgaacactttttcattttcggaagttgcatctccactttaatcacagcattcatcatcagcccctcctccaccttaccttctccctttaacatctataaaatactttgcagttcctagttctttcttgctatatttaaatggctcctgacttggcacccacatctcacctggcagatcatctgatctgtagaacccacaaaaccaccacagaagaaacttcagactcctctggatagccaaagaagaagcttttgacagcaagtatttctaataattgaaacaatatcatgtctgccatcaacgaatactatattctggaaggaagatgatggcaacagcaattagaaagaatactattttttctgttgggacacacaacatacaaaattaatttttttaaagtgagaagctatatcaattatttactttacagaaaaaagatgtaagtttaaaaggg

SEQ ID NO: 41416 - DNA, 662 bp, Bovine  19866880870858
  misc_feature (1)..(1): n is a, c, g, or t
naataataaaatattcatttcatgtataaaattcttggttattatctaggatggccatttttaagcctttatgaaactagataacaggtatggaataaaaaattttctgacttctaacataagttgtacataaagtttctaaatctatgtatgacaacagttttatattgctgattctgtttttttaaaagctctggcattatgtaaaaaaaagaatctgatgtagaaatgtaattttgccttgtatctaagtgagttgaagaatcttctttcaaactcacattcaccatttgaatttatgacatagttatgacagatgtgcataattctgagttacttgaaatgttgtattaattgaaatacatccattacgaatgtttcttgggatcagttgctacaaggtcccttagaatcaacagagccatcaatattgttatactaaaatgtcaaaatcaaaagaaaaaagttttaaaatatcttttctcccaaatatgctattaggacaatttgctttttcattatctatttctccatttaaagctgtgaactgctatatctgttatgatgacaagatccaaggagtcaataagaaacagattgctgggcaggatcaaaaggattcccatttttaccactttcttttttacctacaattctcatca

SEQ ID NO: 41417 - DNA, 1074 bp, Bovine  19866880965307
  misc_feature (1)..(1): n is a, c, g, or t
nctgaaaatcattaaattgtgcactctaagtgtgtgaattttatcttcacatgcctgtcatattttgtttaaaaagggcatatcagagcctgtctcccagagagccacctgcaccagcagttactgatctacagtatgtagagactacagactaaagaaaaacatgtgttaatggtggaaaggagtgttttaagtctcctacagacaggttataccagctatataaagacaactaatagaattgttaaagggatagttactaaaataatacaaggcttattagaaataaaaggtgaaataaaaaatttggttccaactcctctgtgtccctccaaaaccttgccacatcatcaccctgtttggattctctaactctccagtgtctagactaaggacaaccttctaattgtgtttttagagaacaaattgtccaagtgataactttcttggaagtagaccataactatgagtccagggtttcttccttgggtgaaaaccctatgcctatctctgatctgcataaaacgctcccactggccagtcaataattatgaacaataaagagcatctggcttcaggaggctcctcccctcctctcacctacaatttttggccagttggaggcaagagttgaacaagaggatgatattctgccccacatgccagcagggtttgtgtactgtgtatctcagcagagtcttagcagccctggcctttaccatagggaagcatcgtgtatcactgtcttagacattgagcaagaagaccctttttaacagtattttctcctcctgtgccatttgctgactgccagcataactctgtggtggtttagttgctaagtcatgtccagtgacttagcatagctcttgcttgcaggttgcagctcagcggtcttctttttgtgctttaagttggggagggagatggatataagcaagaggttacattcatttttgttttgttcctggcaggcagtacatgccatactactacccttcctgctcttgtgcgcacacctaccctgatgatgcagccttcactggatatcaaaccgtttatgtcatttccagt

SEQ ID NO: 41418 - DNA, 865 bp, Bovine  19866880980735
  misc_feature (1)..(1): n is a, c, g, or t
ncacagttgttaaaaagttcaaaattagctttcttaaatttgactttaacccctaaattttagatttttaaaaaagacccagctatatggcatatgatatagctaatgagtaatgaagagtaatatccattagtactgagaaaactgatatagtttacttttaagttttctttttttttttaagaactgaaccccatcatttagaggttgtttagttttgtttatatttctcctgatagctgctaccttgacaaaggttggcatatcaacttgacatttatccttgcaaaaaataaaaataaaaattatattttttatctgagtgctattgcttaaaatgtttacttctggtattgatagcccattaaaaacttgaagattgagaaaagactttaactcaaatatagtgataaggattaatttctggtatagatatactataagttgcatgtgtaaagtctgagaaatattaggaaaggatatgaattagtcattgtctcattttctttgtctatagaggatcaacacttactgggttaacatcaatatttgagggcaaaaccttgaaatattgactaaatctaaatccttgccgtaatatttgagacaaccccaaatcaaatataattatagaaattcagacacattgtcattactgagttgtcctgggaacttttatgatggctgactattttaaacaaatgattatctttgacagaggaaatataaatgagagcctcattcaagaatctcctttttcatgccataattggataccagacgatgttcagataggtcataccagatcaccagtaaagacaggaaaaggggaaagaaggaccaggaaagcgagagagagcagcag

SEQ ID NO: 41419 - DNA, 2278 bp, Bovine  19866880990107
  misc_feature (1)..(1): n is a, c, g, or t
naaaatggactaggaaatagaaaacaataaaccagtgtcacagacaatgaaagaatagtgtttgaaaaggaaaagatctatatatttagctataaaatagctataatactttgtatattaatatatgcaaaaaaggatgacgtattagaaaagatcagtatacttaacatagatcaagaaaaaacaacattctaatagaaaaacgatcaaagaatatgaatggataattcctaaaacaagaaaatacaaatttccagtaaatgtattaacttgtaattctggaaattcaaattaaacatagaggaaatgtttgactatacacttagaaaatttttcttaaatttaatgcaattctcagtgctaatggaaacatctactgagacagttatttggaaagcagtttgtcaatatgtatcaagcaactttgtaattgttaacaaatttgatactgcaatttctacttccaggaatttctaccaaggaaataattagagtgatataatgctaatgttattttacaacattatatcagatggcaaaacggaagttaatctcaatgttcatcagcgggtcaatattctcaatggtctccttcctccagttttacagccttccagttaagcctccttcttcctgctagggtgttctttctaaagttagtacacagtagtaaaaagaagaaaaaagaaggaggagaatccttcagcactttgttgaatgctggtaacagtccagactccttggaaagtttagagtcttctgtgattttgtattgcttttcattctggccttaatggtcaacttgtgttttctgtctcatgcaaactgacctgtttttagtaccctcaactcacttgaatgtttaatgctcatgtgtttagtctgccttgaatgatgcctgagtctgcacacagtcacctaatcaacacacactgtctttcaaaaactcaagtgtagcgtcttttcctgattccccttctcctacttccaacccccccccacccccaccagacagaagtgatcactcccttattagtgctttatttcattttgttgtgtgtcttctttgataagtaaactgtaaaccacttgacatcagagaattctctttttattttcgggacctagtttaacatttgtagattttaaaaaaagaagggaatgagttatcaaatactacatagagggaaaagaggaagaaaattcgttgaatatgataagcagtcattgttaactctgaaagaactgtttcagttgattagctgggaggcagcaagtagtgaatgaatagagaacaaataatcatttcaagtctagatgatttcattttttcccaagagatttattattgaatggaaggggaaagaaagagaataacttaaaaaaattatttgaattttgttttttataaataaatagaaacgtaagtacgtttgcaggcaaagaagaagaaactacagccaaatgaaagttctggcacatggcaacattagtctgatattaaaatatgagtatagtgagtgaccggagaaggcaatggcaccccactccagtactcttgcctggaaaatcccgtggatggaggagtctggtaggctgcagtccatagggtcgctaagagtcggacacgactgagcgactccactttcacttttcactttcatacattggagaaggaaatggcaacccactccagtgttcttgcctggagaatcccagggacgggggagcctggtgggctgccatctatggggtcacacagagttggacacaactgaggtgacttagtagtagtagtatagtgagtgactccatagtttgtgcattacatttattattggtaagtaggatgaggaactcttgttggctctgtcattttcccaacccttttcccagccgcccccaaaggaagaaatactaatcagatcagtctaacatttgatggtaccagtcaggttcagagtcagtgattatgaaccctgcaggttttatgtatcttcttgtctacttggtgctaggtatgtggaacaaacaagctttctcttcctttcttcctagcaatatcatatgactatttctatatctgttaaccttttatattttccatctgcttatcttctgtaaaatttcttcagatctgtcctttaaatttaccagtatttttattccactgtgcataatatgtgttttaactaatcaattgagactttcttaacggttgtatttttcaaaatttttattggaatatagctggattataatgttgtgttagtttctg

SEQ ID NO: 41420 - DNA, 1538 bp, Bovine  19866881056352
  misc_feature (1)..(1): n is a, c, g, or t
nggaaggtgtacccttctgccctgatgagctgtatccactcaagcaaaactactgcgataagggtttggggtgggtggggaggagcaagcaaaaaaccgtaatactacattccagggtctatacactgacaacatactggcatcaacagtttggggagtttaaagtgtactctgtactcaacctttctgagccctgaggccactgcttggtagattaaaaggtcaagggtaaaaagaaagtctcctgatttattgtgtgtgtgtgtgcatgtgtgtgcacacgcgtgtgtgtgcgtgtgtgtgtgtgtgttcccacctcgcctatctcatcccttgtaatgcagaactccaggctgcgggtcagggcccgctcatggtcctcggtctgggctcgccaggtcagacagtccccttcaagcatgtccagctgttgctgcaggttctttgcagaaacgttagagcagttctgaaaatgaaagagaagtgaaagtgatgaagggaatgggcaaaacggcaatgagaacaacatgctatttacctgcattgtgaaactcataaacgacaataaagaaaataagctcctgatttaccttaaacttctttgatttcagaaggaagccagacaccaatatccaatgtcgtgaaagacaaacttacatttttagtttcgaaacttgagttttgaagagttgctcatcatacccaatgcctcagagacaccattcaatgtaaggtataatttttacttcaaaaggcataaaatatgcattagaaacatttggcttctacactgtaattttcttgtcaacttgaggttagcctcaggttcattatgcaagtgctcccatctctactccgtgcaggggctcctgaagttaaagccagacgtgaattggagaacaatttatactatttgtgcaaagtgagacatcttccttgctcttttcttttaaaaataaatctactaatgaaacaaaactctttaaaagaaagctccttcttgggaaaaatagtctattaacagcaacagaaattttgtatttctttcagattaaaaaaatcctttagatttactgcattccatataatttgggagatcaaaccagtcaatcctaaaggaaatcaaccctgaatattcattggaaggactgatgctgaagctccaacacttttgccacctcatgcgaagagtcgactcattggaaaaaaccctgattctgggaaagactgaaggcaggaggagaagggggatgacagaggacaggatgactggatggcatcaccgactcaatgcccatgagtttgagcaaagtccaggagatcgtgaaggacagggaagcctggagtgtttgtagtccatggggtcacaaagaatcggacatgactaagtgaccgaacaacaataacgtagtttagtagatatcataaatgaactttaaaataaaattatccattatgatttttattaatgttatatgtattggatagaattaacacaatcttttcttccctcaaatcctcaaattaagaatttgaag

SEQ ID NO: 41421 - DNA, 1789 bp, Bovine  19866881066482
  misc_feature (1)..(1): n is a, c, g, or t
ntaaatatgaattgtttattttgtaaacatatcagctgaatattatcttttaaatatttttctgagttctaatggaggaatagttttcaaattttgaagttataattctttccactcctttataatattattgatttatcaattggaatattttatgtggtctctgtgcttgtaatttaaagctaatgctcaacacttttatttatcatataaataacactgatgaagtataggtatagcaaatgcaaaaattgaatcagtataataatttccatgtatgcaattagggctttattgattgttcttttcagaaagtggagaaggcaatagcaacccactccagtgttcttgcctggaaaatcccatggacggaggagcctggtgggctgccgtctatggggtcgcacagtcagacacaactgaagcgacttagcagcagcagcagttttcagaaagtgttaagtatcaaaattttgtctttataatatgcagaatttgaaataagaattgagaagatgagcattttctcgggcagatagtttttctgcattttaaacctaaaatccagcatgtgcacaacctttattccctcccaaataatttacttgctgtcactgaaaagaattttaatgttttcctgacttcttgccatagctcaaatttatcaaccatgacattgttcattcttggctgttaaatgctcccatataatctgagatgctttatattttctctgtacttctctttgctgacattatggagtgagtttcctgtcaatgtgtttatccttcttgaatctggagaagggcccagaaagcagtgtagttaattgaactagactgcttagaattttgcttcaccaatagagctgaactgtttgtttttaagagagtcatcatctatgccctgttttcagtgtacagccccgtactctgttcatgcacaagttagcgtcgccaccctaggcaacaactgtcactttacattccatttctgaaggctctctgaagttaatgatttatatctaagaagtaaatctcttctggaaactgtctgtgaaaaatagtttttaattggatttgaacaaatacagcccttttcctactgactctcatactgggtctccttttccacctcattaatgtcctcattgggctaaatattaacacaccactgacctctgcaacatgaacagctcctgggagacttaataagttttttcatgataactgtaagagcactggatatggaaggatctgagacaaatattagcacagagagactagaatgagttgtaaaatagtgtcaaataaatacaaataagaaaattagagttgttaaaaatctatcacatattaaaatcattcttgtttgaaggccaaaggatgttctataactgtaatcctaattataaattacaagacaaaaattactgagaacaatttataattacctacacttggggaatatgtttaaattcacattatatattcacttagcagacttgctttctatttaaaatcactctgaatacatttcaaaggttgtaaagattttgaagtacagacatcttgattcactgcaaatgaatatcaatgttctcattttaaggaaatcaccggtttctttttattgaactgtagctcaaagaatcattcaaagaaataaaaaagaaattcaacaatttgaagtttaattacactaagaaaaatgaaaaagctcgaaatctaaaagctctcaaatatcaaattcaacaagtggatatatatgctgaaaaactacaggtaat

SEQ ID NO: 41422 - DNA, 1007 bp, Bovine  19866881078594
  misc_feature (1)..(1): n is a, c, g, or t
nccccatctgtcccaacgtccttcattttcctgtgacctggacaaattaagcaacataccctaatactagacttagtgaacacaacgtctagagtccaggtctctggactactagctgctataagctaaaagtgtatgaatatctgcaataccatctgtatgtgtgtaaatagacgtggtacataattgaggcatgatacaagtttatttcttgaatatcaatagtgctttcaaagtattctgagtaatagaaaatgaaataaaatttcagattaaggaaaagtccctaattttagcaatcaatttactgtcaatcctaattaatataaactttgtaatagcaattaacagaggaggtcaagttaaaggcaaattgttttaaatgcttctggcaatatacaatacattccataatagagtacagtaaactggctatgaagtttttatagttctgtccaataaatttccttccgatcagtaccattaaatgtcagtacagtatacgctccaataggtgtcagaactctttggttgcaagtatgagagccaatctgaactggattggggtggaggcatgatggattttctggatatagcttaagggcacggacagaagaacagcatttctgaggacttctgagccagaaccagaaaccaaatcaaagtcaacatctttctcagagccccttctcccaatccagtttctttctggcctgtcttcagtctgtacagcttcaaactagtttgttttaggttacaaggagaagagctacgattgcactgagtgggcatccttctgatggattgttcatgtagaataatatcaggggggtgaaaatttggggtcatatgaatggtcaaacactgagcagtagaacaacctcctagagggtggaggcctgggtatcatcacaggcagctcccatcatgggaggaagtctccttcaaaaaaagatgaggcattaccagtaaaaggggagaatggggaaccaggctacaaaaaagaa

SEQ ID NO: 41423 - DNA, 1004 bp, Bovine  19866881109122
  misc_feature (1)..(1): n is a, c, g, or t
naccctgatgctgggaaggattgaaggcaggaggagaaggggacgaaaaacagtgagatggttggatggcatcaccgactcagtggacatgagtttgagcaatctctgggagatggtgaaggacagggaagcctgatgtgctacagttgatgaggttgcagagtcggacacaactgagtgactgaacaacaacacatattttggctaaactctaacagttttttgtgaaggtattacaagaaaataatgttttacattgttaacacttttagaactttggagtttccaaatggtacaagtgaaaaagctaaaaagaaaggaatgggtgtttttaccatctccttctctttagtggtaaaccagttttaacactctggtggataatttttaaatggttctaggttgaaggaataaattttgagttcttttccagacagtagttattttgttaatgggagatgccctaaggcacctctgcaccttactgaagctgaatgtctaactctgacagtagacctttgtgtgcaatcatatggtcagtgcaaatgtaaaatgttccattttcctggctggctccacaggcctggtgattttccacactgccagggatcaagagagttgcagcaaagctgtagtcatgctgctgggtaatttaagaagcctcttcaaagagcatgtcaaaagttcagtttaacaaataagactttcaatttacatctgcaatgggtatgagatttaattgaaggtttactcatacctcattgcatggacacatacatgcccagcaatgcttcaggtgctgacgtttctattcaaacattagatgagtaaacttaagaactgaaattcaatggcgtatgtacccatattcagattaaaaatgcattttggaaagtctaattggctgatacgatgtattaaggaagcctggaccatgctcaattccaattcagctgctcctttcaatgtagggaaaaggcatttaggtaagatctaaattacgt

SEQ ID NO: 41424 - DNA, 792 bp, Bovine  19866881154324
  misc_feature (1)..(1): n is a, c, g, or t
ncttttagggaattcccacagtgagaataaaaaatgtgacaaatgaaagaaacataataaacttaactggatatacggattcttttgaaaatttaaatgactaatgttttacaattcaattaaaattagtatacttaatatgatcatggtatgtaaacattgctcaactcagggtggaaaacagccataagctaatagtgagtaatttatagagcgggaagaagaaaagtttcacaatctaattactacattctattattcctcttgtcaactgtggcaaagctaaaatgcattctgaattatattaagagaagttactactgactggaaggacatacaatcagagttcaatgattgcctctgaggtcttttgggctaaccctttgtttttatacaggaaaactaaatttctttgtatttattatatcttatacgagagaaaatttagttcacagtggcacctaggtacattaagaattttgtgaatttactataattttgaaaaaccaaaagagtcactttagaaacatatatgttgatatatcttaaatttgaatgcttattaatttctagttttaaaaataaaattcaggaaaatgacaggaaagctaattatcttactatttgtatataatctgaaatacaaattaccatactggctcaatattaaaagtatcccaccttctttttctaattttaaagattctgaaattgtgctacagcttaaaatttatatgtaaatgagatacagtagtactttcctcatcccaggccagtatcaaattaaagctg

SEQ ID NO: 41425 - DNA, 1860 bp, Bovine  19866881163062
  misc_feature (1)..(1): n is a, c, g, or t
ngaggaaattatggtaaaaggaagaatattttgtcctttttaaagagcactgggaaaatagagactatatcacaatgttaagagataatcatattaaatgagttaagcactttgaattgtcttaaaagattttaaattacttccagtattaccattccatttacagtgcttgaaattttaattcagaaaataaacttgcatccagtattcatttatgttttctgaattctcagggagaataggataggttgccctgggcatccttggacatcctttggaaaaataggtcattctgtgttgaagtaggtagtgtgttttttgttcaaatcgccattgaatctttgaaatgtgattcagtctatttgtccatgctgttaggaagatcgattagttgtctcacttgtcgattctaatgtgatttgacaagcattgtttgcatggccgttatttttttctgccttcctcattcatatatggggtagatgtaagtataaacgattgacttggtatagcctgtaggcagtcatggattaatttaagtaagaggaaatgcctccttctttgttcaaccacataatggtaacacatgaatattttattttaccattttaaagtgggagaagcttagaaggtgaattgaagtgacctcagactcccatttgtttgtggcctagtgtttcttgtgattttctgctaagcagagagtgaagatgtaactgtttacctcaacagggtaaatggaagcagctcttcaaccatagtccaccaacttactgaactctgagtacgtatctgtccaggacttatctctagtctgagcacaaaggtgatacagagcagttgggatggttagaaatagtccctggccctgtgtatggtttcaatctgctaatgtgccggagtccagctccagcagccagggattcaacctgaagaggtgaacggtgtcggccaatgagacagtgtctcagttttcttggactgcctgtttatttcaagtttaagattctcttttatacttttaccaaaacattagtccagaggtttgacattttcagttccccctctcccagatttattatctccacaaatcattgttgctcttcaaacagagttcctgcttcagtgattctctccaaatcagccttatcatctattatctacctcctctaatgtgttctatagtttgtgatgacattgtaactcatgctacattcctcagtttactacttatattcctaaatcctgtttgcccctaacatcctgagctcactacatcttaaaaaggcttctagctatgctgctgctgctgctaagtcgcttcagtcgtgtccaactctgtgtgaccccatagacagcagcccatcaggctccgccgtccctggcattctccaggcaagaatactggagtgggttgccatttccttctccaatgcatgaaagtgaaaagtgaaagtgaagtcgctcagccgtatccaactcctagggaccccatggactgcagcctatcaggctcctctgtccgtgggattttccaggcaggagtactggagtggggtgccattgccttctccgttctagctatagtgtatctaaaaatccctaacttctataagctatagtaaaatatgctaactttacaacattccttaaatctttaacttctaactgttttaattatttctaagccctaaattcagtaaactccttttccataaacattctcctcacaaataggcttcagatagcaatcccacacatggcctcaagctgcggcctatgtgctcatcctggaacactcctttgtaaaaggccttgagcaaatgtcaatgattaactttatgaattattttatgagca

SEQ ID NO: 41426 - DNA, 4175 bp, Bovine  19866881178517
  misc_feature (1)..(1): n is a, c, g, or t
ncagggatgctgtctgatgcatgaatcgttcaataaaaccaattagatcttcaacatttactcagtcgacttctgtcttttaacatgcccaatgaacaaatgtataattattttgccactgtgggtctcacaaagggaagcaaaattctttctctaagcccacaatggtggctctgataacacagtaatacatggcccccgagagcctgcaagagtcactttgtactaacaaactgaaatcaaatagactgcagcatggaacttgacaaacagattgctgcatcaacaaaggtcagaatgcacaatgatcccccttatccaatcaaatctctgtgctaataaagacagggcttgagaactacttagctgccaccattcattagcataaaaaacttagcagttgtttaccatttcattagcattttaatgacagacaatttgccatgttaaacacagattgttttaaagtactggtagatcttctgaataaatattaactatgctttcatcaattccctcacctcaaccttgctgtattcacttttaaaacctgctcttcaatatcactttaccaaaattgattgcttcaaaggatgtttctgcaaatggaaaatgagtagaataaactgcacattttacacaagttagtttgagttttgacccctctgtcatcttattccagattttgctgctgctgctgttgctgggaaacatttctcctcacctcaggatgtccaaaagtcagtgggagacacaagcagcaattggaccaaaatgcattgcaccctgcaagaaagtgcttaatttttctaaaactcaagaactcactgaggaacaaaaagattgaaaatataatgagcaggtatttcaacacaaagggtggtataatgttcctattatgatgctattctcatgggacagagccaatactgtcttttataccaacaatttggcatttatgtaaaatacttcctatgtgtatttctgtctcaaagcttagtatataatcttacatacatcataataaattgagtcataatagggatccaccttatttgaaaataaggctttttatatcacactataaatatacatttatttatatcaaattcctttgaacacctcaaagatctaacagtcaccactctcactgtagaaattacacacatccatatattctcccataagaatgcagttagctctctctcataaatttcattttgatggtaaaagccaagttgtattcattgtactgtgaaaccaataatatgtgaaaatcaactcactactgcctctgtaacataataggtgccttattatgtcaatggattatgctataatccagcacaataaaacctcagttgaggacctggtaatactggaaatatctgctgtagtctttgacctttagaaacagacctctgaaggtctattcaggttttagctagaggttcttctttatagaacaaaatacaaacaaacaaaacacctaatttttagagggtatgccagagacaaagaaaatctgcttggagaagcattcacagaatgaaataaaatatacgtctgtaacctgtagcaggagttccctctgatgccattattacaatatgtatgcttgctttagtgagtactgaaataaaagagttcacgtactgtaaaaatctattaggtagagacaatgtggattatagaattcacaaagatttctttaaagaaattaaaaggagcggcatttcagattttccactaaactcagatttttgtttcatctcctttctagctttggtgtcccttatgttgagtaattttcccttttgccaggacaatcaccaatcaacagctcctcctctcctttcctcatcatttccattgttttatcattctgccatgtaagaaaaacaagaaacaaagggtggaggagggaacaacgtgaatagtgtatgtgactgataaatgattatgcttctgaaaaggccacacggcgtagtaacagagatcacatttttatagtgtctgtactaggcactatccttagcacattacatatgtgttttacatataagtgtataccatatccatatatactcatttacatataaaattatgtatttatatatcacatatcactcacatattattattattattaaatatatacttaatgtatattaaatgaatatatgcacaattatgttcacaaaggtacttacaataatcccatgaacaaactgctgttactaagccctattttatagatgggaaactgaggtacaaagaggttaagaccgatcgcacatagtttgtacaaaaaggagccaggattcagacccaggaaagttgactacttaattctgtttttactactacgctatggtaacagaattgaatatctgaggatatctcagttgtatagacacattctctagttgtagatagaaacatcagcaaactatgagatttaaaatctaggatttcctttgcatctaggaactatttaaaacttttatttgagctcaatgtagtattaatactgaaataactaaaatatataagattttttaatgctctatcagttcacttcagtcactaaatcgtgtccaattctttgcaaccccatggattgcagcatgctaggcttccctgtccatcacacatttatctaaaaataaccttccccaaataacagcattatttaattcagtaaatacttatagaagatcaactgtacaggcataatgctgataggaagtataaattgagtcagaatttaattgcgaagagataataaaaaaaataataactaccatttaatgagattctactctatgctgggtactgtgctagtgatttgtggtccttattttatgaaattataacacaactctatgaggttggcattattatctccattatacagttgagaaaggtaaggcttagagtgattaagatcattaaatatgtggtagggccagagtccaaactcttgtttgtttaactctaaagcccatgccattattccaaaaagtaggctatttataaagttatgtggaaaagattcttgtcatcaaatacatagagaagatgctggtttcaacaaaatctgaaatggttctttgctagaaaacattttggagtttttaatacaccaataggtactatgaatgtctagggagatatagcttctcccctcagtttgagaatgaatcaaccctttttattttcacaggggtctgggataaccacgatactatggcaaatcctttaggcaatgctgttttgtatacactaaaagcacctattcaggagaacactgatgactttcaggtctaccattttcttgctatatgaccttagacaagtgaatttacttctgtagacccctatacctgcattgaaggactggtaggagaactaatggagatccttctatacaagggacttaaccctgtgcctaacacctatcaagtgttcattaagcttcagttactgtagttaggaaccattcctatccctctgacactatgccatatctctggagagcataaacagttaaatccatcaatacttataaaaggtgagatatgtcagtggtcatacattattaacaaaattttaaggaggctccagtgagaaagaaattagatctggttaggagctgggttcataaatatttccatagatgaactatctcataagataaacctgagggaatggttaatattttgagaggtgggtatgggagaatggtgaaagggaccgcataaacaaaaagcatagaaatatgtgttaaaatttaaaacttgcttaggcactcaggaattcttactgtttctggatcagaaggtcaacagtaaagagaaaagcagaacatctttgtgaccttggagtaagcaaaagtttcttaaacagtaaacaaaaaagtgataattatgaatgaaaaacataagtatagtttattaagaataagaatgtaaggataagacacaatcaagggaatgggaagaccattcagagagtgtgagataatattgacaatatacacattttgacaaaagacttgaatctagaataaagaactcctacagatcagtaagaaaaagaacacagttggaaagctgggcataagactgaaggacagttcacaaaagtagacactaaaacagcctataaac

SEQ ID NO: 41427 - DNA, 1600 bp, Bovine  19866881231314
  misc_feature (1)..(1): n is a, c, g, or t
nacagatcagactgtagctgagtcccaggaagctgtgtttgagtgtgaagttgccaacccagattctgaaggcgaatggttgaaggatggcaaacacctaccgctgagcaaaacccatcagaagtgaatctgatggccgcaaaaggagacttatcattgctgccaccaaactagatgacattggagaatacacctacaaggtggccacttccaaaacatctgccaaactcaaagttgaaggtcagtgatataacaacagagggacccatttcaaatcatgttgggtttttgacagttatctaaaagtcaaacagtttaatcattttggatgccataaatcctcattttgtaaaatcattataaactcttgaactttctgagccatataccacaggtgcaaaattgcttctgagtttatgtgaagaagccatgtcttaggttccagctctatgaaacagcaaattagatgctcttattctctagtcttctttcatcctcctccaatccattgactaagctattggtatacagctaagtgaagttgctcagtcgtgtcctactttttgtgaccccatggactgtagcctaccaggcttctctgtccatgggattttccaggcaggaatatcggagtgggttaccatttccttcttcaggggacattcccgacccagggattgaacccacgtttcccacactgcaggcagactctttaccatcaagccaccggtaaagcccagtatacagctaaacaaacttcatctcattcaagtatagaaaaatcattgtacaatgtacttttcaaactgtaccctaggttttccagagtaatagcaaagtgtcttttaaaaactctagagatgctgcataactacaaaaaatgttgataaccatttatttgcaagatggccaggtaacaatcttattcaggaattttcttacttgatggtatcatctttatttcctaaaccaatcataaatttgtcctcagctgtcaaaattaagaagactctgaagaacctcacggtgacagagacacaggatgctgttttcacggtggagctcacacaccctaacgtaaaaggtgtccagtggatcagaaacggagttgtgctggaatccagtgacaagtacactgtctcagtcaaaggaacagtttactctctgagaattaaaaactgtgctgtggcggacgaatctgtttatggcttcaagcttggaaagctgggagccagcgccagactgcacgttgagagtaagttgacttataagcacttgacaagtcgccacctcatggttaccatgaagtgaagcgtatctctaaatggcttcatcttttcccatcagccgtcaagatcattaagaagccaaaggatgtgactgccttggaaaatgccaccgtttcctttgaagttagcgtttcccatgacacagtgccagtaaaatggttccacaagaatgtggagattaagccgagtgacaaacacaggctggtctcagaaaggaaggtccacaaactgatgctgcagcatatctccccctcggatgctggggagtacacagctgtggtggggcaactggaatgcaaagcaaagctatt

SEQ ID NO: 41428 - DNA, 2246 bp, Bovine  19866881243816
  misc_feature (1)..(1): n is a, c, g, or t
nctccagttcagcatttccccagatgttccctctgtgatgcaccacttctgtttccacagtgagagcacatgggggcagggtggagacctgagcagtgtgaatggtgccccatggaccatgtctccttagattatgaaaaaaattctcattttctgaatcaaattcaaaggtgcttgggatgattaaaggtctcagtaaagtcacttctcagtttcctacaaacaagcaggagcctggggcactgactgagaaccttatgtggcagagagaagtggtttgggccccagttccaggtgggaccagacagcagacctggtcacagaggaagaactctcatctggatgaagtagttaaggctcatgtataaacctccaacttgttcacccctgtcttctgactctggagggaagccctacataagttatgtctgtgtaaaaattactactgaacttggcagcttaagtcaggaaacatccaatatctcctactttgtgtgggccaataattgacatgacctacctgggtcctctgactcaagatgtctcacaaggatgccatcatctgagggttcaaccaggggtgataattgtcaaatgtacttgactggatgttagcagcattttggtggactattgatctgagagcctcagtccctgtctggctgttggctagaggcctgtgtcctttccttgtcatggggttctcccataagaaggtaacaaagtggcagctggcttaatcagaacaagagagagagaaagatagattcaccaggggaaacagtcatcttaaagcctaatcttttaagtgacttctcattacttctgcaaaatttatttgttagatatatgttactatgccagagaaggcaatgacaccccactccagtactcttgcctggaaaatcccatggatggaggagcctggtaggctgcagtccaatggggtcgcacagagttggacacgactgtagtgacttagcagtagcagcatgttactatgtacaattgggtttgtggggattacagaaggacgtgaacaccaggtgacaggaataatgggatactttagaggctgttatcacagcccttgtttctaagctggatgaaagtgaaagtgttagttgctcagttgtgtctgactctttgtgaccccaatggactgtagtctgccaaggctcctctgtccatgggattctccaggcaataatactggactgggttgccgtttccttctcatgggatcttccgaacctagggattgaacccaggtctcctgcattgcaggtggattttttactgtctgagataccaggaagccctggaaataggtttaggtaatttttttcaatatagataatggataataaaatgagtcttatttaatgtcacgatttctttaacatcatcacaatttagttaagaattaagcaaaaagtatctgagatgcttaccctaagaaaataaggctgcttacctctctgattcatttacaatttttgaaaggtttatttactttgtattttgggctgggggtcaacatttgagtcaatttaatgataaggtgtgtgccaactcctagtatgtccactagggtttaactaaggcaagatggaagtaaatgaacacagggaaaatatgcctttaacctctcttctaaatcataaggggagtaaatcatgaacttcacacagaatactgatgaagcatattctataagttattatactcaaatgagaaaattagctctctgtatatgaacataatcttgaatatgtaataacgggaacatttataatttatgaaaatacctaattggctcaaagacttttgcatagaggacctcatctgttagaacttctaaatcttagaatttttatgaaatacatggatatcatcttctatctttataatatgatataaaacattaaggatttactaataattacttactattcttgagtatcttattttatgatttaccccaaagctctcaaaattatccacttctctcaaactaatttcaaattctatattaaactgacacattttagttaataattttctactaccttgaaatataaagagtttacagtgatttcagagttacatcccaagttcctaaagggtttgagagtgctgctatctttcagtggagaaatggattgtcattgtgtgctttctaagagtgatttttgttactcagtgataagtaatgcaatataattcaagtctccgcattaaag

SEQ ID NO: 41429 - DNA, 661 bp, Bovine  19866881250832
  misc_feature (1)..(1): n is a, c, g, or t
ncgagcattttaaggtatagatttggaaacatgccaaaggctatgaccaatattgctagagagtccaaggttaaactggtaaaatagaaaaataaagccaaccattattagggcattttttaaaaattatgtggtttcatttttcaatttcaatgagtatttttccagagtacaggtataagctattcatataaaatacatgttcagtgatctctaaaactgtactttctaccaagcctcctaattcagagtcacgtggtttatcctaaaacagcgttaacactgtgcctggacctgtttcatgtgtgtttcaaagagttgaacagtttgtgcccatggattctgggaaatgctgcttttacaagtcagtgctatgggacttctataaataaaaacacaagttactaacagagaggctttaaaggacttgcctgagcagccaggaaactagacgttatggttattatggcaactctcatagacactctcatccaaaacagtggaattgtttgctaggcccacagcccttgacacggtgccatttgcaggtatttgcatattttgcttcccactagatgagcagtactctggaacactgagatattttcttaatttctcaattgctacatatactagcttatagtagatacgcagatttatt

SEQ ID NO: 41430 - DNA, 1967 bp, Bovine  19866881277425
  misc_feature (1)..(1): n is a, c, g, or t
ncttggtttaataacctgaattcagtgaaaaaaaaaaaaaaagcatttgggtatttcccttttctgtcgtttacctgtttcatcttttccctctcgcaagagtcacacatgccacttttctaatattgtttatttcactaagatttctttttataaatttcttcgatgttgaagatggaataaaaatattcccttcatagttgcttctatgataggcaataagccagcccctttttgaaaggtggcataataactgagctgtgaacaatgtggttttactctagagacatcattatttttagcctatttattttaataaaagtaaaacacagaatacaggttttaaatcgttgttataaaagcagttctaacatccttaatatgttggttactttcaagcatttagaaacttttcaaccttaaatatatttctttgaggacaaagttactaaaatgtgagcacacgtttatatttataaactaagtaaaatagcatttgtttatcataatgttcagtagacaataacaatttcaattactgtgtttgcccattgatagtatttgaagtatgggatcagttatctgaataatttatgaaaaaatgttggtctctcagattattaaatgaaattgcacttggattacagtgcagccatttatactttttgtcttattttgttgtctttacaattgcatgttttttacagatcaggaacttcgtatttatgaatttaatatcagtaaattcattatttaatatcattatttaattcattattaaatattagtttcactccaaaaaaaaaaaaatgttgtctgaagtgtttcttgtttttatccacacaaaagatggcttggttagcatttattgttgaagaactactgtgatattgtgaaaaaaaaatatcttgcccttgaatttacaacaatttttctcagttaacaactggcaagctgtcagggaatcagtcttaggacactcagaaaaatgcaaaatcatcactcaggcactgggaatagaaagtgattcaggtttgtcaccgcttcttggatggaacaacatggggagaaataaataagcaagaatctagagtgtgcaaaataaacaaattatttgctttatacagtgctgcagctaagtgctcatattcataagaaacttttagaaatgtgtcattaacagtaacaatccaattgcatgaatgtcctttataattagaaatcattttcttctaatgaaattaatccacaaaaattaaatgagctcatcttgctagcaagtgctatatctgtaccttcttctaaagtggcacattggtattctccagggatcttgcaggatgagtttgatggggaagagtcttgcttcagtagctctaagaagtcacaagctgctgtttcatagcagctgaaagaatgacacaggtcaaatagaaggtgccatttcccactgggggtaattgttgccatgagaaaatgacagcccagtgtaaccagatggcctggttttgttaagaggagttggatatctgaattttcatatgcaatattctaattgttaaatatcaaaaaattcagtgtttaaaaaaaacagtctgagtccatcaaatactttcttggccaccagttgccaaccactgcttgaaagataaacagccccactgggtttgtggttgctgcagagttcctgctaatgctagaaaatattggagtagcaatgggcccaattgcagtgtttattagaacttggaaatgatgtgaataaaccatgatcctgactttaaaaattgactctctgcttcaggtacaagaagggccagaaattgtctgcagatgggcgcttgcaggttttacacaaggagacgagacacttggtgttcattccgaaggtatgcgaggcagatgcaggcctctatgtggcgtgggcccaaaaccctagcggcattctctcctccagtgtcatcctc

SEQ ID NO: 41431 - DNA, 1463 bp, Bovine  19866881286375
  misc_feature (1)..(1): n is a, c, g, or t
ncaatattgcttttttggctaatgccacagctctgggaaataatcaaattttctttagtgctttaatgtatttgaagagcttggtaaatcattagcagtgaatcaggatacagctttgaattctagaaagagatgtgttgagtgcaaaacccagtcaaattatactatctttattccctcctaatttaagagcatgcaaaccaaggcttatatagatatgcagatgtgagttttatttcaaatccagttgtttcataatctgtttttaattgtactcataaacatcttcttgtagaataagagtagaaatgttgagctaaaattgtaactttcattattgcacaagatgtctttcaattttgcttttcctgttttgatcccatttattgaaatatgttctatgtagtttcaatgtagcctacattcctgagtctgaggatggcactgcaaacagtcattccccctgttgatctcatgggtttgacattggagaatagatgtgccgtcacctttaaatggagattgaaacttccatcagctgtgtgtgtcacagagcaaggtggagcatagctgcggaggtggaccagtggtactccggtcctcccactgacgtattttgggcagccatgtgtatacaattgtaaccagctcctcctgcttctagtcttgtcctgctgctaaccatttttacagccattatggtggtaaggcatctcagtgctcattttcccatttggaaatgggttcatagtctacctcttgggcaattgatggttttaatttcatcttgtaaagatacgagaaatggaaagtgctctatgaaggctaagggtaattatatactttcatgtaatttgtcatcacactgcctcctgcccactatttctccttcagatatttgtttctttagaatattaaaaattacaagagtggagttagtatgtgattttgaactgtttccacgtaggaaaatgatgttttctgaattgaaactgaaatcctttccaatttcttaagactatctctttttcaaagatttgaaattaaactcagggggatatatttagtatgatctcagagagaaaaagtatataataggatgacataagatgaagtctatccttttcttataattatccctgtaatactgaagaatgttctatgcctttctgaaacatattattcagaaaagaggatcattattttagttcattaaaaaaaataagcatgtataggagaagcatttgtttttagattttaaatgtagtctcatcatgttagggtaaaatctatagttgaaagagtattcattatagatttttgatagaggggaggaattaattatgttgctataaagactgtctgcaaataaaaatatttaaatttaatatattcaagtttatattaaaaagttactggatgttatcgaagatggaaatgtgggctaagtaaaaatatatgtg

SEQ ID NO: 41432 - DNA, 1391 bp, Bovine  19866881339032
  misc_feature (1)..(1): n is a, c, g, or t
naacttaatccaattatgtaaagtttaaaaataaaataaaattaaaaaaaaagaattatgatattggcataacaagaaaaatatctcagaatgattatctacatgtgagcaaatcttaagaaaaacatctaaacacagaaatgatactatttgggaaaatgtcctatgatttcaaatggaagctaaagatgaccgtaaaacaatgaagagctctgatagccagaggagaggaaggtgggcttcgggtaatgaggaagagaagaaagaggtttctaccttttacaatgaccttggtgctacagctcgtgctgccagcaggattctgagcctcacaaatgaaatccccagtgtcctcagtaccaagataattcatctgtaagacggccaccgaatcgatgaaagccattctgtatttatcgctggctgggagttcatgttcatttctgtaccacacaactctgatgtctggggatccagttattttgcattcaagtcgtgctgagtcacctgctttcactattttggtcgcttctagtttctttacaaactttggtggttctagagagtgaagaaaaggggagattatgagggaacataacagatataaataacacaagttcagttaagtagtacaaaagaaaaacatgaaacatgaacaatgcctggccaatagaagggtattttcttgactgggtagatgcattgtaaaagattagagaaaggaccagagccacaggcagacagaaacataaaacaatcaaacttcccacacctgtcacaagcaatgttgtggtacaagagtcactaccaacatcattggtaacttggcaagtgtactgtccagtcttggaggcatccactgagtagagatttaagaagctagttgacccttccaagccaatgaaacatttaggtccagaggcaagttccacatcatccttaaaccacttgattttaaatggtggtgttccttttagcacagctttaaattccactgtagagtcaggtatggcttgttgtcgctcaggtttcactaagaagcttggaggttctatagatttgaagagaaatgcatatgattaaatgccttgtagttggattatttcaacagttttaaggccatgtaagaaaacactactgaaaagaggtaatgactgaatatttcttgaactcaatacagatgtatctaaagaaacagaattatggcgatttttagttttaaaggacaccaggaaagagtgttacatttaaaagcaaccagagagaagagccagaagaggttaagaaagtctaaccttttacagtcaagatgccgctgcacgctgcatcccctggctacgtttgatactcggcatgtgtatttcgcagtgtcttctaattccagggttgtt

SEQ ID NO: 41433 - DNA, 886 bp, Bovine  19866881373968
  misc_feature (1)..(1): n is a, c, g, or t
ntcttgacctgtctagattattttcacaaagctggtttcaaagtctcttggcataccttaactataatttgtttccatttcaactcttgtctggtggtccttgcccctgggcactaggttcgggggaaagcctctatgaatagatactgaagctattttatgctgctgctcacaaggaaaaaccaaatatacccagaaggtttcctgtgtagagtgtggaggagctctattcaaaattctggcttatcttaagccacaatgaggcttttaagagaatgtgccttacccttcacctcacattaaaaaagctgcactgggttgaggtaactggagttcgggacactggggacccatgaggagtcaagaagatatagtcagtttatgcctctctggctacttaaaaactattccctgaaaatctgcagctaactcagagttgtcattggtaatgattgtaagtgggctagaaactatctctatttaaaaggaatcccaggtggactcttcctgtgaagtaagaaatcaatccttaatccctctcttttgcaatcaggaggagctctgcaagctggatttgcttaatgctcgtaacacctgcttgcagcatccatggggcttcggaaaagctgggggtaatgtcagtatcacctccagctggccaatcccagctttcagcctcagacagaccaccacattgggctaagtcccagggagattaggaaatccttccatctgggtatttatatgacatctattggtggaacccattgatattttttgcaaagaaactaaaaatagcacacattgagagcaggtaagacaggctgactctcaacatgcctgctagacagggaaagagagaggaatatacacaacccatggcttt

SEQ ID NO: 41434 - DNA, 1593 bp, Bovine  19866881386689
  misc_feature (1)..(1): n is a, c, g, or t
ntgaggttttgttgatgcccttgaaatttctaagtgtaccaaaatttcatacaaccatgatagtctgtatgtactagcatatattaatttaatcctttattttgcaatatcctgcaattgctatttcaagttgagttttcaaagaaccctttaaatttctagttctaccatataacaaatgaaactaaacattacctgacccagaatttactgtctaacccttcgacagcaaatatgagaacaacggatgagtgacaatttgtgtgaggtttagatgaagaaacagatcaacgtatgataaatttaacagcaactctaacctaaatgaaaatggaaacgccagattctcccgagtcttaaaagagagactagtcacaggctatactggggataaagaatgtgacgcacttgaatggaaatgaaatttttatcactcagtaaaaaggcgaaaggtatccatcatatgaatgatttgccattatttgttagtacaattatacacaataaccattacatttaccgaaaacttactacatgcctactatgaaacaggtaagaatttctactttgtatggaaaatgtatcaattttcattttaataaatattatgttgtctcagcaaaaattaacatgaatagtcaaactttgcctttgttttctaagctgcatatcttccatcactccttgtatgtggtccacattttccttattctcaatggttacatcctttccataggcccaggatgcctgattggagatctgatccagaagaccttgacctttttcacgcaaaccttgcaatcctacatctaaaacaaaagttaccagatttaatctcttaaacaagagaagctttccctcccttaattaaatcctctcagcagatactgtacttggattgctaggataacagctttgtacattaaactactttggtctggagccctctgaatatttcaatcaataaaacccatttaaacgtggctcaaattggagctccctctcattcaaattctccctaatgagaatttctaaaaggtgaacttccgtagacaactaattacttttcaaaattgcaagtagaaagtgtgagaattcctgtcttgatgagtaagattttcaattctttcctttctgtttttacatagttcagtttttaggagaacatagaaggcaaatgctttgttcaaaaaatatatcagagccacaagacattaaaacagtcaagcactgtgttctcactgtaaaaggacactgaacattttgaaaataggtgctatcagcttatactcaacaagaagcaacacttaggatgtatttataagactttaaattaggtatgtatattggaattcctttagcatttttaaaggaaaaacattgctcaagaaaacttgtgacatttttgaaataaatttcatttggcaaattagatactaaacatgtaattacatcatccattaaaataacaaagactataagcaagtaaaatgccaatacaaacatgatttttcaaacccattccctcaagtccttttcaaaattaattaaattgggttcagtcacatgccaccatttcccactaaatcgctg

SEQ ID NO: 41435 - DNA, 655 bp, Bovine  19866881391831
  misc_feature (1)..(1): n is a, c, g, or t
nagcagatctccatacgcatgtcccctgctaggatgtcccctgcacggatgtcccctggacgcaggctggaggaaacagatgagtcacaactcgagagactgtataagccagtctttgtgttgaaacctacttctttcaagtgtgtagaaggacagactgccagatttgacttaaaggttgtgggtcgacccatgcctgagaccttctggtttcatgacggtaagtgtaagttttcgctaataagttattaaacacaaaaataaacttatctgtgtgtctaaccacttttaaaaacaactattttaacgtgattccttttttgctgatttttctgataggccagcaaattgtcaatgactatacccataaagtagtcgttaaagaagatgggacccaatcactgcttattgttcctgcaacacccagtgattctggggaatggacggtggttgcccaaaacagggcagggaaatcttcaatttcagtgattttaactgtggaaggtatttgctccgaagactcaaaataaataaccttatcacttgggttttacacaagtagttcagccctactcactcagaatcacaacctttctctttcagctgtggaacatcaggtaaaaccagtgtttgtggaaaaactgaggaatctcaa

SEQ ID NO: 41436 - DNA, 1051 bp, Bovine  19866881434353
  misc_feature (1)..(1): n is a, c, g, or t
ngtatagtgaagcacgaaaatgtctgaaattcgcttctcctaatttctagcgttgaagaaaaaggagtccatttctgttttgtctgagacagtgatgtccacctgtacccagaggtatgtggcctcttatccagacctttgtctggattagactccttaattttcataagaaaatgtcaattctaccaccaggctcagctgacactgatacatgtgtccttcattgtcctcatagattatctatactcgagcatctctccacagaggataaccttgaactctgctgtcccaaacacagagcttgattactttatatatgtttatatattatattcatgtgtattattatatctgaatatatattatatattcagataaaactcccagatggccatattgtctatttctctgggacttaacattttatcattgatccttacaactgtatcctacaaccaccttgccgagctcctcacaaaattacatttgctgagctgagtttagccccaaaaccatgtgcttgcagtgaagaatcttataagtaagagccctattgcattaaatgtagaagaactgttgaaatagttgttcaccatatcattacattataaaagggaatttttcccaaaagtcatcatgatctttctaagcaatagatttgttttaatcttatggacactataattgtatcatcaacttaaaaattacagaccacaaataaccctctgtcttagctgctgtaaagtcctgggccagatacatggtgttcctccaacaaatgtccagatgcttgtttgttgaactgatctctgattttcttctggcattgactttctccttttttttttttcatttttatgtgctccttcaaaccatatgaggaaggggagaaaagaaataaatggatagataaatgaataaaagcaaatttgtgttgggaacttatggctgatttcaaatcagcacaatgagcatgagagttttcttccttcatctgtttttctagaacaatttacagagattcaagagttggtgacatgatgatgacatg

SEQ ID NO: 41437 - DNA, 3967 bp, Bovine  19866881437603
  misc_feature (1)..(1): n is a, c, g, or t
ntgtggcggccggctccggggcgagtccccgcgtcagcgcccgcggctggctcctttgtgtggccggtgaccggccctggccggcgggtgggggacgccggccagagacccccgggctgcaggagccttctggacggctctcttggggcgtgggggcttggcttaccccgggtatgctggccggtaacatccctccagcctttgcaggagtcacaaaaggaagggagagcgggttggcagggatatctggatggtatttatttttatatgtgaggtagacttgtattggaaaggaaccgcagtctggcaggctcttgagggtttctgtggcatttcaccccgcgatgcaccatttggacatggcagctgctgcgactcccccgtggttctcctcttggtgctttgacatctttcttaaacagacatcacctgagaagttggaaatgctgttgagtaactcgatacagctgtttgacaggtcttccgtctcttcacgttttgtctgtaccaagtaaacccaccgtgtatgctagcataggttggcaaaccctcaaattgagatcaccgctcaaaaatacccccatattgggaaatattaacctgtatggtttactttggcttgatgaaccttattttcttagttgtgagaaacttttttttttttttttttacccccaaagaaagaatacaaagtaaagaacaatttatctttgtttacataccttgggtcctgctgttacctagctggtttcattggtatgctattttagtataacaatactaaatggaaggaaaatatcttccttttgctttgagcaataaaatacttctttgttctagaaccaggaagcttttatacataatactttgtgtggccaaaagttagtgactgtctttaccccgtgaccaaattcgtgaaaaaatacccaaaggacttagaaagcattacccagactctatagattgtttttatattccaaattccaggaaatcattttgttgtatatttagtcaaacaagctagactaaatttaaccttaaaaattgggcctactctgtaaattccccagcattagggaatgaattgactgcatttaaagaatttaccaagcattttgatctctgtgttggaaggagctggtgatggacctagaaatatgacagcagaatgcagaacatggaaacaggtagatgaagcttgcgaagttccatctacttaggttttagttgattgatgggtatatctgaaaactaaatgtccactaatttaaaaacaaaatactacattttgacctattttttaaaatgtactctataaagattccttcacacttgtctctactccctaaaaacaaatgatactaataaggatattcttttgaagaaataagctaatgccaaattaatctgatctgtagaaagtttttctgacataattagtagtttcactgtactaaaaataccatttatctgtgtaacatctaagttcaaagagctttcatagctgttacaagcaacaggaataatctgaaaaaagtaatgtctttactatcaaaaagtaggagaaacttaaatttctacaatagttttattaaaatataactcgtatactgtagaattcacccttttaacatgtacaattcagtggttttagtttattcataagggagtgcaaacatcatcactaatcaacgagcattttcaacatcctaacaggaaaaccctcataccattaactgccactcccattccccctcattgacacttggcaggcaccggtctacctttctgtctcggtggatttgctgatttaggacatttcctataaatggaatcacataatacgtggccttttgtgtctttcactaagtgtagtgtttcccggagttcatgcatattacacatgtattaagatacctcctttttatggctcagtaatattccactgtatggatatgccacattttgtttatctgttcatcagttgatggaaatttaaggttgtttccactttttggctattatgagtaatgctgctgtgactgttcatttataggtttttgtgtggacttatgttttcagtgatcttgagtatatagttagatgtggagttgcttggttctaaggtaactctaactatttgaggaactgcccaaattattttctgtagtgacttcattgtacattctcatcattaaagtatgagtgttacattttctccagccttgttgtctttttgatgatagctattccagtgtgtggaggtggtatcttacggtttttgtttgcatttctgtaatggctaataatgttgagcatctttaaattcttattggccatttatatatctttggaaaaaatgtttgatttataatttttcagtttatgttttcacatgtatttttctcgtttagtctttgaaataacccagttaaatcggtttactcctattttgctgctgggacactgaggtttaaagaggttaaataatttgttcattttttaatcttatggagttagtaagagtcaaggtctgaatgtatactcagatcttctgactctgcttcctgcattctttccactttatgaggcatacagaagttaaattgtgtttgcagctttgcttggttaatcatcgacaagagtaggggtaaaataaataaatcaatgaaaccaaacaacaaaaagcaggtgttgcgtccacactgcctcatgttctccagattttgttatgctttttcaaataaattctttgatttctcctatccttataaggtagatatcatttccatattttctttggggaaacaaacctaaaaacagcttcttagtggcactgctaaacctagaacttgttcactgagacattgcactttctgttcccctggagcttccatgttctctattttcccactaatttataccctttaaccatagagtaattgaataatttcacagttttcataaacatcaagttatttctaggttacactgaaattaatttttatttttgaacagggcagtttgccagattcactttgaagtgtaggattactaaggtgtgtacttcagtttttatgtgttacgtactctgaaatccttgtctccctagagggtaggtagaggccgtatgttacttatttgtctttgcatatccattgtctaccattgtgcccagacatgtaagaaggactctaacctttgttggatgaatgaatacaaatgtattttttccacttgcccccccaaatcaaatccaataaaagtcattcttagaataaaggcagtacaaattctaaagaatttcttatccctcacgtatgacctgaaaaataataaatgataattaaaacttgacttaaaacagcactatctgatggaagaaagtaaatgttcaatgctgggcttaaaaaaattggctgcaggtatctggaggctagcacaaatgctcagtgcccacacatagggttataccttgcgtttgtgttagataaatgaatgcacagtgagtgaataaaataattagttttgactgtgatagctagaggaggtacgtcaaatggctatcaggtcctgcttttcatttgtatattttaattgtcaaatatgatacatgttaattataaaaaattcaaataatatacaggggtatagagtaaaggcctttcctggtggctcagatggtaaagaatccacctgcagtgtgggagacctgggttcaattcctggatggggagaatcccctggaggtaggcatgataacccactccagtaatcttgcctggagaatcctcacggacagaggagcctggcgggctatactcagtccatgcggtcacaaagagtcggacatgactgagcaactaagcacatgtagagtaaaaggcaaaaatgtcacttcactatttgtccacatcccttccttcaccccaaagactactcctgtcacaggtcaccttgttagcag

SEQ ID NO: 41438 - DNA, 666 bp, Bovine  19866881494260
  misc_feature (1)..(1): n is a, c, g, or t
naccccaacaaataaattcttttaggaataagatttagtctgtagatggaggaaatatcatttgaagaatagcatttgaccttttcttgatagaaaatagtcatattttcaaagcatagtggagaattgagatagtttctcactaaaaataaataactctgatgaaagaaatgtgtctgaccaaggccagaagcacttatgctgagtgagaaatagaaacacatgactggtaggagttggctttaaataagtgccatagaagtacagcaaacctatacatcagatatggaagaatgattgtttcaatccccctaatgtggtattaaatcgaaaagctctattgcactagtgggaaagagagatgttttgtaactcagaattatgggctacaaaaatgctcaagaacttcaagggtagagtttcttcactatgaagtgtgcaaataatgactttaacttgccaaatttcatataatttatgtatactttgccatttatcctcttgataaaaatgaaatcataccaataagaatttttatacatgaaaaatccaattagcaacgttctctctaaacattctcaaattctgtgaaataagtcattattgattattttagcagatatccaacagttaatataattaactccatgatgattaaacatcttg

SEQ ID NO: 41439 - DNA, 954 bp, Bovine  19866881602001
  misc_feature (1)..(1): n is a, c, g, or t
ngccggtcaagatatttgtgatgctgtggtgtctgtcttaggtgtgttgacagtttcctcttcttcttgctcttttctttctttcaaaacatcttcttttagttagtgcgcctgattgattatcatcctttctacctcagaaccgccttatttcattgagcctctggaacacgtggaagcagtcatcggagaacctataactttacagtgtaaagtggatggaaccccagaaatcagaatttcttggtataaagaacacacaaagctacggtcagctcctgcatataaaatgcaattcaaaaataacgttgcctccttggtgatcaacaaagtggatcacagtgacgtgggagaatatacctgcaaggcagaaaacattgtgggagcggtggcttcttcatccgtgcttgttatcaaaggtgatgacagttttctctgcaagtctcactgtgtgttgacagatccattttcttaaaaacatcacaatgttaatggattgaaatacgccatggttgttttctctcttgtaaataaggattgtctataacttctttacagagcgcaaacttccaccttcctttgcaagaaaactgaaggatgttcaggagactcttggcttcccagttgcatttgaatgtcgcatcaatggctcagaacctctccaagtgtcttggtacaaggatggggtacttttgaaagatgatgctaatctgcaaacatcttttgttcacaatgtagcaactcttcagattttgcaaactgaccagagccacgtaggtcagtacaattgctcggcttcgaatccccttgggactgcttcatccagtgcgaagctcgtcctcttaggtgagtaactcatcacatgacctcttcgttataaagcagcttcactgcacccagccaccaaggactggtgccacatagtgtctgctccacgtctagagcacggaaact

SEQ ID NO: 41440 - DNA, 686 bp, Bovine  19866880403789
  misc_feature (1)..(1): n is a, c, g, or t
ntttaacttaaagaatagcatgttgccgtatcactgaatccttatgcaagagtctcctttatcattccttcactggagtttttgttagtaagcttatatagcttttttaactttttcctatttttcagacattttattaaaaataggttatattctacccattctttctaattaattacatgttagttactttaatggagaaggcaatggcaacccactccagtactcttgcctgggaaatcccacggacgaaagagcctggtgggctgcagtccatggggtctcgaagagttgaacacaactgagcgacttcactttcacttttcactttcattcaccggagaaggaaatggcaacccactccagtgttcttgcctggagaatcccagggacgggggagcctggtgggctgccgtctatggggttgcccagagtcggacacgactgaagcgacttagcagcagcagcagcacacctgtgtattgaagtgtttcagacttgtggttttacatttttcttgtcacaatttaaaaacattttatattgtctccatatgtatgctaaagtaatttgtcaaacttttggacccagaataattaaagtttggcattttcctggaacttgcagctgaatttaaggcttccaccaagtggttataggtagtcaatgctatttaattcaagaat

SEQ ID NO: 41441 - DNA, 806 bp, Bovine  19866880478358
  misc_feature (1)..(1): n is a, c, g, or t
nccggtaggggtcccctaaagcggaggccgcgacagttgccacttacactttcttcttggctccctttttacctcctttcgtaaggcgcttattcttgccgaccgccatggtgccgctcagagagccaaaagggcggaaatgcaattcgcgcgagaacttaggcgtgcggggcgggacgcgctgtctacgtgaccttcgacattacgctcttccggcctcaagaatatcgcgacaacagagacaggcaagcgtccgactgtgcctgcgacagcgcccctcatgtgtgtggaggctgtgcagaatgccgcggccgttagttgagaggctgagctccggaagtgccggcgctggtaatctgaggtgcgggctcctggtaatgatggttcccgaggctctgaagtccggaagtaggtttccttggaagcggacgcccactcagcgtcgttcaaagctaaactcaccgtgtcactttcaagcctgtttcttcttaaaccccaagcctgtgggattcgggattagacagcaggtcctacgttcttatgctagtttcagtaataatatttagccttgtggcttgtctgtacttccttgtatttgagatggaggcgatagtgtgatctacctcgtaggattaagattaaataagtgtaacattgaagatactggttatgttttgcttgttgttgaaagctgctggttggttagtggaatacgttcgccttgtgagcatccatcaagctgtacactaactagtgtacttttctgtaaatttctaatacattgataaaaaggtgttttgggggcg

SEQ ID NO: 41442 - DNA, 919 bp, Bovine  19866880479768
  misc_feature (1)..(1): n is a, c, g, or t
nagaactaggtcggaaggaaggaagacaaattacttgcattactttgaggcagatggttgtctatttcttctgaaaagtcagtctgagttgctgaagtaatagtgtgccgtggagtggcagcagcattattattatttgtagtgttaacttgaacttggttgatttcttttatgacttgttcataagatggtgggagctgcaaaatgaagaatgaagattttaaacagctgtaggcgatagccaaggttcttatctttgaacttcatttaaaaataaaatgcaaagaggtaatgcgatatttactcacctcagcaggaaccagctcactaggcctccaagggcccgctgcagaagctgggggaaatgccagtcctggcgggtgggctcctggaaaccacgaggtgggcctcagcggctcagctgccacaatggtgatctctgggcgcctggaaacagacagaagcctcagtgaggttttgtctatttgcaagtgttcaaagatttatgaaaataactatcagccaagaaagtgacataaagcctgccagtcacagaaatgacctgtctggcctgggctgtctctagcagtatacccagacaggcttcgaaggagcaaatgacagccatcctccaagacactggcctcagagagttagagatacacctcgagcacacttcactctgccttggctgatcagaattcagatccaagacccacacaacctcgttctcccagggttctgctatctggcctatggtacaaacataggtgcatcgtaaggtagaaaaatgcattggtcaaatggaaatgtttcgtttcctgttattccaaagtacatactctgaaacaatactatataattagaagaacagcggtcttcctcctcactggacctctccctcagtcagttatcttta

SEQ ID NO: 41443 - DNA, 1211 bp, Bovine  19866880802017
  misc_feature (1)..(1): n is a, c, g, or t
natttccagtcgagttgtcctcagtcttgaaagctccttaacgcttcttcctggctagtgcctatcctaccctcacagacaattgttgttctatattgtttaaacaacagattaattttgccttttctagaacgtcatgtaggaagttcatgaaggacttacatccttacatccttaaaggaaatacaaagtatgtgttcttctgtataaggcttccttcacttaacaaaatgcttttgagattcatacatgttatgttaatcagtagtttatttctattactattattccattctatgtgtataccaccaaattttaattcatttttctgcttaaagattcagggctatttccagtttttggttgttattagtaaagcatttcttaatgttattgtatctattctttatggacttaagttatggtgaggaaatttctaagagtagaatcgccggtacataggataggcttatggcttaaatttcaaatatagaaaaaacggtttcccttttctaaatactaaattgttgctcctatcagtacttggctcttgtatgagtaaactagatcttgctagttgtttcttttgtggtcaaatgtcagagtaaatcctccagtgttcgcccctctcccgtcaaaatagcttgttagcaaataagtcgctacagattttcttaaacaacaggcttgtgaagttttgccttcaagcaggtaattcacaaagaacattttgtattgttttgtgaatgtactaccagcacacgtgtacacacacacgtgcacacatgcaggggggtggtcatcccccctccccccaaagtcaataatcttcacgtgatacaagctaccgtgatttaagcacagcattttggattgagggctcaggtggctgttgcttctattttttagtgtatagttaacattggcagtcacccttataatgatgtgccaccagccaccccagtacattggctacgccatgcctagcacagagaactggatttaattggtggcagtgtttgctgtcacatgataggcactgaagtaaaacagaacctatttcacttcgtgttatctctttcgatgtaacaaaagaaacaaaatatattttaaaatattggaattgtataattttcacttctgaatgcatttattgggatcaagtgtctaagtaactttatttcaaaacgaataaagctgttaagggaata

SEQ ID NO: 41444 - DNA, 2578 bp, Bovine  19866880804396
  misc_feature (1)..(1): n is a, c, g, or t
naggctccaaagattaaaatgtggaaaaagtaataatgttttattaaataataattgcttcagagagtggtattgtaccttacagcgtggggacgtcctggtgatactgaagcaggcagaaggtaattacttggagtgccggaagggagacgatgccggcagagttcacctgtctcagatgaagatcatcacgccgcttgatgaacatcttagcagcagaccaaatgtgaggaattgataccgtaccatcctcatatcacacatggcagcacatttcatagaactattaattatagctcatcctcaggtttttattagcacgtttattttaaccagagtaaaaattacagtagcgttttattccattttaagaataaattacttctaagagacttgccgctgccagactaatcactttgatacagagtgactaccgggtggcttgccttcctcgtatcatgctgacttacagcatccaggacacgtagtcattaattttcaactgtgagagctatttacttttgaaataatgtaaatacatttaccaaagtactagagattggttttctagcagaatggataattattttaaggagggccctataaaggctgacattaaaacacttcccagtaagatttaaggtgagtatagaccttgtttctctgatcatagctcataaaataatgaaatgaaatgttacaacactctgaattcactatttaggcctaataaatctgtggagcctaggagaatacaatgattattgaaggtcatttgttgagcaagaaaaatgccattgaacaatttacagaggcatattttttaaagagctgcttagggtacccagttaaattttcactgtcttaggtaatgtggcgaacatgaagaatgagacctatcagtcattaggccaagttaaagtctttggtttgccatcatcctagtttgcataatctcatccagttcttcttggagggcagtctgtcatttgaggtttgccaagaaactaaagattccgagtttcagagagcagagaagatatgtgttatgctggccacagctgggaatgttgacatttctgacttcagccctcgtggggaaagctcttctgtcgctcactttctctttgtttcaggaagcattacccatctgtgaccactgttctgcctctcttttgaacacgttggtgggtagccatggggattgtactgccggaaagctttccttgatgacaaacagaagctgaaaaaattacagcttattctttgtaaacactcacggttttgtcccttggaacattaccttcctcatgcttgtgccatagacttgcagaaaggtgaccaccagtgacccacagctggtgaaacccaagtggggcctctctcaggctctgggtcatggctaacattacccttttcagaaaagtaaaacctacttgaaagcctagtgtgaaggtaaatatccctaaaactgtgttaggctctcccctgccttagtcaacagaagacattgcactttatgagttaaggccgggctgtccgagcagggaggcagggattgtcacctcgcgtggctcccacagctgcgggtctcacttcccctcccaccaccggaggcagtgatctgacctctctgaacctcattttttaaatgtgtgaaatagatatgagaatcctcagagttgattatagaattgatttatcattatgattccatttatatgaaagttcagaatggggaaatccagaaggtagatcagtggttgcccagggctgggggaaggtgagggggagtgatggccaatgggtgggaggcttctggagggatcataaatgtgtcctaaagttagattgtggtgatggtcacacaatgctgtgaatatgctaaaattaggtacactttaaatgcttgaattttatggcaagtgccttatatctcaaagatccttaaaaaattaaatgagctgattaatttaggtaatttagcacctgtaaggtgcttagtatagtgaatagtgcatagtgagcaaacagcgtatattaactattctcattactcattagtattagctattatagtcatactagaaggaactttgaaatatgttagattttcctcccagatacccccactaatggtgtgttcctgcccctgagttgttcctgcccctgtggccagccccgttcgcctgccctctcgcccttcacctgccaggccaaggtgatgagcagcatcaaggggacagccgtgcacaggaggcggggaaggggagcgggaggcacaggctgcctgcggtcccacctccacccatttggctggtgtctaggcctcgggccatctgcaggtccatgtttatgtttggtgtggggtaggcctctgccttcactttttccagatgtaaagccatcatagtctaacaccattattggagcagtcatccctttgtctacagatgtaaatcagaaaaaaatgaaaaccacacatatactaaattggataaatagtaatttttaaagcccctccaggcttcacatatctcatagttcctttacaatccctaaattcccattatgccca

SEQ ID NO: 41445 - DNA, 2196 bp, Bovine  19866880956289
  misc_feature (1)..(1): n is a, c, g, or t
ntaatcttggctgtctatagaattagttggtaagggtttttttttttttttttttttttaaatgaaaagagaatctcactccctcttccctagattctgatttaattggtctgggacaagacccagacaggtattttaaaaaatgttttccaggtattttaatgcaggcaagattgaggatggttgttatagatctagggaagctttttgtgttatctacaatattctctatttgaaatttcctcttattgttagaactattcatcttcaaagcctaccttaatatctactctagtagtgaaacttttcttgactcttttagcttatcctaaaataatttctctggcctctgaattaatagtatttcatagctctattgcactcgttttgcagttaattacatattgccacatgagctttcttatgtttcagtaggggtatttattacctttggtttttcacttaaaattgtgtgtatgtttaatcttctccattagatttttagctactgagggacagtgtctgcaccattgtatattcagtaatacagtgctacaaatacaggtgaaggtaaatattttctgattgaaatatcacacttaagaatttgaatcatgtcatagaaagttctgtatatcctcaataacaactaagctggggctgtctatttgaacagcagtagcaacatcaaaatgatgttatctttcagcaactctgtggattatagcatgtttatgattttctaaaccacagttgggtttctctcgtggttcagcagtaaagagtctacttctcaatgcaggagatgtgggttctatccctgggtcaggaagatccccaggaggagaaaatggcaacccactccagtatttgccagggaaagcccatggacagaggagcctggcaggttacagtccatgggttggcaaagactcaaacatgacttagctactaaacaacaacagcaaactacagccatctttcagacttcgattttaaggggctcagagtctgctgttctggaccttgtactgttactcattgactcccttattcatttaggcttgtttgtttatagggcatctggaatataggcacctaatttttatctttcaggcttaaaaaggaaaatgccctcagcatctgggaatgtccattatgtttaaacataaatactcattgtaaatgatcaggagtagtttcagttttggtcaaatttcatgccttccttaatattttttagttaataaagtatatccactagtaatgcagtgaaaaattcttgattttgatatgaaagtaggacaaaagtggtttttattttgtgccaagattataattacaatctttgtagtaatgagctgctataacaaaattctttttttctaataaatatttcttaagataggctttacatatttttgtatgattttctttttttgatctgttttttagttattcctgctgtttttttttaatttcttatgagttactccagctactagttttctccagaacaaagacaatttctagcttttgagaacaattatgcaaagtataaatagtaggtttattataaagaagtgtgtaagttcatgaataattgctgattgctaaacaggaatcagttttctcagcactgtaggaacagtgctgcaaaagcacggtgtatgtgggatgtttacttcatagtatgtgggggtgttcacttcatagcgccgctgtaacaggagcgttggcctgcttttgttttgtaaggagcgtgtgtgcttctgggtatgtgtccgtggctatatgttgtctgttaacatggaggttactatcaagctaattaagcagcttgctttttagaacgagtgtggtccgaatagagcaacctgagagtattactggaaagaacggtaaaatgctggtctgtttctttgatttgagctcttcattttgatcctctaggtgcagttgacactctacacttacctgtccacggaattcattggtacagtcaacatatataatgccattcggagagttggcacagtgcttctcataatgcatacactgaagtactactactgggcagtgaaccctcaagatcggagtgggattaccccaaaaggattaggtatttcatctctatctgtatattatgttacatatatatgcaaattcaggattttctcttccctccttctttcc

SEQ ID NO: 41446 - DNA, 1022 bp, Bovine  19866881084458
  misc_feature (1)..(1): n is a, c, g, or t
nttttgaaaaataattttcctgtataaaaacacactggatagaaatgattacattttgttccatttccttccactatcagtaaagtaaaatttaatattatttttcaggaagatgttttggttttataagatgccaacatataaatatatttgttctcaatattttattcagtatttttctatatcattttattttgtattctttatagtttaatgttttattagctgccacataatattgtggtaaatggacctaactgttggtatatctttcagaatcagatatcttatttccgtttatttaaaaatttatcctttacattgtctctttatgttctttcctaatgtgttttgtttctacttatcttattgttcttttttgaaatttcatgtttgttttatgatcaatagtacagtaccttggaaattttcataatgcattcatactaaaaagtgcagtgtttttcccactgaaattactactcagtttttagtacctgacattttaacttggtaattttagaaactgctcatttcagtctccaaatttaatagaaaaagataaacagaaaagttatcttctgtatttaaaggagtgatgggtgtaatacccttatacttatcctcagtgatcgtttttgcttacttcagaattctgaagctctactagataggttatcatctatccgtattataaggcgctgaaaacagtgctgacgtctaatctcttttgactttctacattgtgttgcctactgcatgtctttagtgcttccctgagtttttattttaggtttagattattattattattattttttggtttagattctatattacattatttttttatgtttatagcaactgaccaagttggcaaatctgtgtgtgtaattttccttttcaaaaaagttttttatatgtaagtataaaatacttgtattatgttttttaaggataatggagtaaaggaagatgaactacaggccattcttaattatctactcactatgcataggtaa

SEQ ID NO: 41447 - DNA, 2302 bp, Bovine  19866881159986
  misc_feature (1)..(1): n is a, c, g, or t
naaaacattttttatgtctccttcatcaagtaaatagtaaaactttgcatttgattttttttttctgtgtaattgcagaagaaaagctgaagttatgcttggacatgggttgttttcattgttagctgaaagactcatgcttcagacaaatttcatcacaatgacaacgtataacgtcttatttgaggtaggaatgcagtgagcatttaatcttaactaatttttagcgaaaaatacctatataattgagttgactaatgtgtagatgaaataaaagcatttaggtttgatgtatgatttttaaactagttatttaaagacacactgctaaaaaaaaaataaaaaaaaataaagacacactgctatatcttaatctgttagtctgtgagttattaaacagtgtggacatctctgtttaactattttctccattgtattgactatttgatgtctcattttataattactttaaaatagggttataatgttgattagtgttgtacttaaagttcattaatagtaatagtgatatagtgattatgctaatccaatctggtctttcatttctgtagattctcatagaacagatatgcactcaagtgatacataaacaacatccagatcctgattcttcagtaaagatacagaatcctcgtatgtatttaatatactttgtttttgatatttggtttttttttttcaagatttattgttacatagctgacattacaaggttgtgtaatttcaaggtgtacagtgtaatgaattgatacacgttgtgagatgattaccacagtaatgttagtgagcgcatccatgggctctacgtggttttaattttttgtgttacatgtggtgaatacccttagcactttcaaacgcataaagcagtattgttatctgttgtctccaggttaaagattacatccacggaacttattccaccttgtaactggaagcttctagtttttgagcgccttcacccatttctcccgttcccttccttttaacttgttttttataagtacatcttgttaccaaatggaaaggcactgaagaacctaaagttgatattgttggaaacacattgtttagataacatttcattatagacattaatataatagtagttttgtttgtgtttgatgttgactataatttcaaatttaccttaggtcatggggaaatgtttatatacagattttcaagaattatatgcataagatatatgttcagatttttggtaaagttttgactgtactatttaggtgatgacaggctaagttacatggaccatgcaggtggctttctttttaaattcctgtcaagttaagaatacgaagtgtggaattgaaaaatatctgtcttcttaattgtttaagaacttagtcttggttaataatcttttcttttgatatttagaattcttaaggacttataaaatgtgtacatttctcatcttgctttttaagattagtgatattaaaacaactggtttgtggaatttataaattaaattactttttgtgtgatgagttgtgttcatgtttgtgatactgtttcagtactaattttaaaaacacatgtcatgtgtgtgtttaatttttcttagcctccaaataattgtgatatcattattttatagagtaaaaaaggaaaaaatacctcgattatattgttgttgttcatttgctcagtcatgtccaactctttgcaacccatggactgcacatgccacctttcctgtccttcactatctgctggagcttgctcagactcatgtccatccagtcggtgatgccatccaaccatctcatcctctgtcatccccttctcctcctggcttcagtcttccccagcatcacggtcttttctaatgagccgacccttcacattaggtggccaaagtgttggagtttcagcttcagtatcagtcctgccagtgacttttcaggcttgatttcttttaggttgtattaatctgatctgcttgctgtccaggggattctcaagagtgttttacagcaccgaagattgaaagcatctgatcttcagcactcgccttctttatggtctagctctcttatctatacatgactactggaaaaaccatagctttgactataaggacatttgttggcaaagtggtggtgtctttgtttttttaaaatggtatctaggttggtcatagcttttcttccaaggagcaagcgtcttttaatttcatggctgcagtcaccatccacagtgattttggagcccaagaaaataaagtctgtcactgtttcttttttgtccttat

SEQ ID NO: 41448 - DNA, 771 bp, Bovine  19866881338540
  misc_feature (1)..(1): n is a, c, g, or t
naccagtggccagagattctcacgttaaagagcagaattcccggagcagtccggtggccgcgcaggaggaggcagccccgagccggcccccgtccctgtgggaaggtgccagctgccccgagggccaggccgcgatgaacacgatgagcgcagagcagagccgcagcactgtcatttccaggatcaaagcgcttgagggccagacaagtacagaaagctcgggactgcccaagaagccggaaattgtgccccgcacaatcccgcccagacctgctgtttcctcagggaaaccctctgtggctcccaaacctgcagccagtagagcctccggagaatgggactcctggaccgcaagcagactcaggggggccccctcccccacactctccgccgaaagaagcaaggagcagccccgtcaccaagcccgaattgccaaagaaaccaaatcctggccttatccggagcattaaccttgagagtctgggtggagggcccatggctgagagccccaatggtgggaagaaagccccgactcctgctcctcggcctttactgcccaagaaatcagtgtcctcagaaacctccccctgctctgtggctttgctgaaaccagtcactgtgcctccccgactctcggtggcgtcacaagccaaagccttcaggtcactgggagagggacccccagccagccccccggttcctgctcagcagagcaagcctccgggtgacatcgacctcatcagcttcgatgatgatgttttacccccacca

SEQ ID NO: 41449 - DNA, 749 bp, Bovine  19866881410323
  misc_feature (1)..(1): n is a, c, g, or t
ntttaaacaagtcattttcctcataattaaagaagacatactgagaatctgaataatcatgcatctgaagtgtttaagcttgttaattctttatgatataaatgctcgcatcctttgtatttcgtgcaaaagaacacaagtaaaacttacttaacacaatgagatgagatggattcccgtttcccatttcctcctggaacatcaatctagtaaagacaaaaatcaaggcaacaattgtattatttcataagataaatttaaggctaagtaattaggaaatttacagctgaggttaaccagtttagctaggtattaaatcgacaaaacacaccatagatgctaaaaaggtatgaaatccagaatttgggttttgaaaaaactccataacttgtgatgtggccctccttgcatagacaacccatcttcctcttatttgctggaataagcacattatgtcattcccccctaactggggctctctatctcacatcccctaagttgaaaacatcaggtgaggagggcttagcacagaaactaggcataggtactatctagacgcctagccaaagtgttggtagaactctgcaatacttccatgaccccaaataaaaccttttaatcaaacttgtgaagctctcccttttcataactctgggccattttttccccttcactgtaagtagggaaggaagagaggacttagcactcagggagcatactaggggtgagcacgttatataatacctcat

SEQ ID NO: 41450 - DNA, 1614 bp, Bovine  19866881425575
  misc_feature (1)..(1): n is a, c, g, or t
ntgtatggtatattacttgtactactttaatgaaaaagcatacagaaagttcatttcatagtatttaaagcaatttgtcctagaaaatataggcttattcaaagctagacttgaacactgcaaataaaaggtaactgatcctgcttaccttctattctctctactgttattaaaaagtttaatcatgtcagaaagaaatgctctgcgaacttccatgctctctgggcactgcacagaatttcgaagtagcgttgcaattacttttagtatctctgtaagacaattcataaattagtaaaaaccacaacgttacaaaaaattcatgatgcaagatcatcagtatatttcaattttatttccctgacataaatgtctacctaaaatatccttttctgtattataaaaaaaattatctgtggacaagactgtcaaaacattcactagaaatcatatataaacaagaaaggaattttttattttcatcattagacagaatacttaaattttaaaactttgtagtaaatcaaattaaattataaatgaattaaatgactgctgacacctctccataatctctgccagataataaagttgatcttaaaatatacatatttaaaatttttttaaatactcaaaacatatatataaaatcaaaatctcagaaaaaaagaattctcagcttcttcaacaatatgtataataggcacatactttatcctttatcattgtgaattttagaagctatcaagattttcttccataattctaaaagtaaaattagacacaaaaatatgaaaactaaattaaaacctactaaaaactctaaataaataaaactgttcctgtaatactcttaaatattgactaaatttgtactataaattttaagaaaaggaatgcttaaaatatataaaaatcaaagtagaatgatcaaataataatatcccaaagttttacacaaataaaaattgaggaattctaaacctgcaattggccaagatttttggtgtttctaaagcaaaaagttcaaaatatcaaataaaagatattttatcataaacttaatgacaatttttgaattcttctaatgacgaagtctacctgaacaatgattaccatgacaataatatccactaactttgaggatatactactgtgagacacttttttagaaaatacagatattaatacatataatcctcacaaaatgataactagatactattatcatctggattgtagagatactattatttacccatttggataaattaatgtaccccaaaatcacttagctgttaatactgaaaagcagacataccattttttaaataccacagtgtacagattatcttttctgctaatatattacacagacaatatatttaaagttcttacttcaataagtcatctttcccataactacataaaatatattttatattatatatattaccaaggctggatgaagcacaagctagaatcaagattgcctaaagaaatatcaataatcttagatatacagatgataccaccactgggggcagaagaggaactaaagaatctcttgatgaaagtaaaaagaggagagtggaaaaagctggtttaaaacta

SEQ ID NO: 41451 - DNA, 1020 bp, Bovine  19866881835171
  misc_feature (1)..(1): n is a, c, g, or t
ntctccctctcccacagagtccaaaagactgttctatacatcagtgtctcctttgctgtcttgtatacagggttattgttaccatctttctaaattccatatatatgcgttagtatactgtattggtgttttctttctggcttacttcactctgtataataggctccagtttcatccacctcattagaacatgattcaaatgtattctttttaatggctgagtaatacaaaagatatttatagtacctgtcaaaagatctgacctgcacaggttgttcagcagagagatcaccaagagctccaaggcaggctggtggcagaagggcaggatccacagtgactccatctgctggtatgtttactaagcttcggagaatgtccttcacgttgacattttttgaaactggaactgatggtgcagccttgctatccgattcattccctccatcacttttggtttcctgagatttactgacttctgaagaaagagtgcacagtgcctcgttgacggcatcgggaccggcaccgacgcgcggaggcactccaggagcagccacgtctgcgccgctgcctagcccaggagctgtttctcccccagtgcctgagttccgccttggagcaggtgatgtgctttcagattcctccacagatgctggagttaatgggcttgatgctcctggtgagtcctctacatcttacccagaaaaagaagaaaagtaaaaataaaaaagatttacaaataattttaaaaaggtacattcactcctaattgttttagattatgaaatatacagaatgttttaaaaggctaaaacaaattaatctataaaagtgtactgagtaaatatacatatagtgaaagtagtttaataaaatagtaataataaataaggttagcaaagtatctgagaaaaccccaaactgaatatgacataccaatgggtagcaatacaagattgaaagccattggtctgcaagaaaaaagtccaaaatcctttagggtatactcaaggttcttca

SEQ ID NO: 41452 - DNA, 871 bp, Bovine  19866881992317
  misc_feature (1)..(1): n is a, c, g, or t
ntctatgaaacaaaccaaaacaactgcctttttctatcagcctcatttcacttgaaaattatattttgaccctccaaataaaaagaaaaccctctaaaaattcataaagaacccatattctaaattagctttatgaaaaactctacagaccttatttttcttgtctcatcacagattcaagacttctagtgatcagtggaaatcagtgattccttccaaatatggtactgagtccaataaaccattaattctatatttgacagttgccttgactaagtttacttcataggtggcactttgctggtttaaaaatttcccaatggaaaattttatcaacccccaagtcagaataaaaattgaacttgctttcttcctagactgattcctctttctgcccaagagtgcaagagtcacaggggagtcattaatgaagtcagctgcatctagtttattctggagacaccagcacctgagggatttgtcagaggtacaaatttcagtcctcaactttgccttgtaatgaaagctttttaaaaattgtatttctctaacactgttgtcttttatggtgcaatcatcagttttaaataaaatatatccattaaaagatagcatgagaggtgtcaatcagtttattaggtctcaactgtataggaatttcaaaattcatatggaataaaatggaacaaaagctgtcactatagcagacctagtaaagtctcaactagtatggatataagaattgggccataaagaaggctgagcactgaagaattgatatttttgaattctggtgctggagaagactcttgagagtcctttggactgcaaggagttcaaatcagtcaatcctaaaggaaataaatcctaa

SEQ ID NO: 41453 - DNA, 2029 bp, Bovine  19866880460468
  misc_feature (1)..(1): n is a, c, g, or t
nttggttttgtaatataatagcacgtgaaggtcagtatggttatgagagaaaccttagatgctgtgacaaatccaataactatcagggtattttgttcataaaagtaaagcatttctcaaaatattctgctgatttgttaaggtactgggaaatattttgctggctctggggctgactttctctaggatgctacatagtgtcaacagatttgacagttaagcagtatcttctctcaaggctgccaacaaataaacacagaaggttcagatttgtattttggagtaaggaagagccccagaaagaataattagttgaggtacacaggtatttgaagcaaggagacaaaaggacaaatatctgcaggcctgttatgtatacatccagcttcatggatgtatacaatgctgacaaattttcatatgggattttaaaatcctttttcaggtaactcctccgccccaatctaacaggctaaccaacttagcagaaaaattttactttcctgtttatgtctcctgcgagtgtttgaaacaaagggtgattcgcatattacaaggccaggaatctgaaaagaacctcaggaaaagtttcaaactacctgaagctcctgcaacaaatataagactgcactgccctccagaggtgactcttcggcaaatacttttaatcctttcatgccgaggaccaaatgctgaggtaatcctcattgcaattttactcttgctatctcaaatacttattaaatatacattcaaaactcaacttaatgttttcccctaagaagaatattacattttcatggctcttccaccttactcatttccatttgtcctattcaaagtattatttgccttagcttttgctaaatgttaaatattaattttttgttgtttagcagagcttatttattcatgtatgtattttcagagaaatcagactgaatacgtagcctaaggaaactttagcaaaactgagaaggctcaaagatgaaaaaagtatgcttaactgaatattttacagtctaattatattgtcatcacttaactaaaatttgaagggtacccacagctactgtgagaaaaatataaatttattctgaactctcttcttcttgagcttttcttctccaaagccatgtaaactatttctgctccacataccacctcaaataaggaacaattttgtggactttcccttttgtcactttccctttattccctataaatacaaaattttcaagatttaagacaaagctaacaatttcatgataaaattgtgataaccagtatgaatgactcaaaacacattaatgataagtattaaatcataaacatttaattgggaaatttaaactttatctctttatataacaaatatttatgtagagcattgaacatattaacttttttagttatcataacaactatgagattggtattattattaccatctaccttgcatgaatgagacacagtaaggttaactaactgttcaagatcatgagctgagatgtgatggagctgagattcaaactcaagtagtactttgctatcagagtcctgagtcttaactccctgaatttaacccaacttaggtggacttttcaagtgatgatagtggtaaagaacctgcctgccagtgtaggagatataggagactcgagtttgatctcttgcctggggaatcccatcagctgaagtgacttagcacccatgtaaatggtaacacatatatagatttttccttcacatcataaaaccattaataagacttaaaataaaggtaatacttttcaggtagattttttaaaatttaaggcacatagaaagctttaaaaatgtcaaaaccctggtacatggaaatactggaagttagaatgaaattgtaaatcactttttgtgatgagtttcaaatatttactaagccattaatctttgaggaaaggtaaaaaatgaaggaaatattgaaaaaacattatggaaacaataccatcttctcagagtaaaaataaattatataaatagatcg

SEQ ID NO: 41454 - DNA, 1150 bp, Bovine  19866880699706
  misc_feature (1)..(1): n is a, c, g, or t
nttgggggtgttttgcactgactgaccgtgcaactagaaagaggagatgtttactgactgtatgtgtgttctagtgggactttaaaaatcaggtaagttcatattggggctacagtttcccttgcagccgtctctagccagatgattttatatttacagtgtgcctacagaatcacatctatttatagacctaccttttgaaatgtgtttgctacaagagttgtgaaggtagttttaatttggctttttttccccctcagcccgaaatgaaacttcttaaggatgaaataaaattattattagcagatggttattttaatcgtcttcaaagcttttggggagtctagcattgtcaggcagatgcagtggcataacacacatataaaggtgttatgtgcaggtgcaacattttaaagaataacagaaacagactgcgatttctagtttctctgttgtatatgcttgtgccttcaagaagctgagctgatgggagatgaagcttgtcagctttatcagtttctgtttgttagaagcgcagactctcagggcaatagcacggtacatgggtacttgtaattgttgcttttcatatttatccctagctagttctgaaagcctgagggactttttgtcttggttctcttccgaatgcttcagtctaaattggcttaaagttctccctcacatcttctgtgtttctgtgtgggcttaatcataattatagatcaccacctagatttccatattaagaatgtggcataaagcagcgtttacttggtagaactagatgggaaagaaagattccacaggttggcttcatatctgttttagcattgaacgccttctcatctctgtatctgtgtttgaagcaagttctctttgaagctcggttatttggaatgattttaggatccttctgttccagagtaaaatatcaattttgggtcattttggtatgttcacacttaagtgacaggacttacattaattcgtggtgcctgcttattgaaagcaaacataccagaatgtcagtatagtttattacctttgcgcctgcaaagccgacagaagcatggggagggctcagcctgtatgtctctgatggaactggtcacttagcattttatttgtaaatatctaccagctctat

SEQ ID NO: 41455 - DNA, 1810 bp, Bovine  19866880979270
  misc_feature (1)..(1): n is a, c, g, or t
ntttaattttaatttgttaaaataacaagacatctaaaattaagacatcccccaccttttggcatctttttccaaacaaggtatgattgtaaaggatagcctcttcctaaatatttaaggccccgtgcaagctaagtggagattatttaaagacttaagtacacagaaacctgacacactcatttttaatggggaggtagactgttgtttatttagcttttgaaatctatcctaaatttggctttatggaaccaaaaaagtctagctttaaattaacagactgctttctactgtccaagggataatttgaacttcactgagacatgtctatgaatggaaataaaaataactcacattaaattctaagtacttccccacacgcatttcacttgccacaaggcccattgttccatgcaatgcttttaaccagcctgtaggaaattttcactgaaacaatttcccataaccaaggaaaggcaggccaaaatgatttcacttaaaaaaaaaaaaaaaagctttgcaagctttcagatctagggtattgaaagcagctctgtcagagtagcaggaatgggaaatggaaggctcacgcaatactcaaagattcagttggtggctttaattttagcttactctcctccttcctctctaaaaaatttactccagatgaaatgttctgcttctgattctcacctcacttcatccattcgtttaaaagcttaaacttagaaatatttcaaatatctagaaaagtaacaaaaaatgatatgagcaaaattcctgatttaaaacaggttaatttttgccctatttgactcagatctctttatcctcccttcttctttaccatccaggaaatctaacccatcttatggaaacatctctaatcatttcctatcaaaatgatctcttttccaaaactcttttttctcctaattctaatattcaccaattctacattttatctctcatccaggataggtatgagaaaatcatttaatgtaagggaaaatatgtaagtaaagctaaaagtacgggaaaggaaaagttacatggaggagacagggaccaataataaataatatgcaacatttacaaacattttacttcattctgggcttggctctgaaaattaacttggataaactcatataactctgaaaacaagtccatgaggtaaaaactactggtcccctcattttacaaaatggagaaatttttggaaggtccttaacaccatcaagtctagttcattacaatgtctgctggggaatgcatctgatggtcaaacagtgaggagtgtgcagggttaaatacaggtgaacaggtcgctttgtggcagaatttagaacccttaaaaaaagagtatcatacaatctcatattgctaagaaaaagatggtacacaatgtttttctaacttctttgactaaaagacagtcattgcttcacagagcagctggtgacacttagagtctcccaagtgacttctccatggtcatgcagctgattgccatgaacttgaagtcacaactgagttctggttgccaggccaggccttgtctaggcacaaatagtcaaaaatcttgaaatgtaacctatggaaaatgtatagtaattttagcttttatgagtgggaaaaaatagggtacagaatatactgaagcggagacacattaactgctagtacaaactacgggaattcagaaatgacataccaagttgcctactctagggggtgacagaaaaaagagcagaaagcaagaataaaatcaaacactcaagaacaaagtaaccctacagagtttcta

SEQ ID NO: 41456 - DNA, 1709 bp, Bovine  19866881022264
  misc_feature (1)..(1): n is a, c, g, or t
nttgctcacattagcttcatcctaaagagaatcatcagttaatagttatgtatgtaagtgatattagtatagctatatttattcatcagtaaatgataagcacagagtttggatttcgggaccctcaatcctattatttccatcacatcaaatcgattccttgtccatctacttctctcaatgaataaacaatgcaaaaccaccatctacatttgattatctggctactgccaacacatggatgagctggaactataaattgtagataaaaataaagcctcatttagcaatgcaaatttttatgaaaacataatgtatcgaatttacgatttacaaggtacaaccatttgtaacagacattaaatgttttatacccttttctttgcaaagaagttcaatgaaatatttattgcatatgtgaaacatcaaacagtccctcatgataattccacaacttaaaattaagacagatggatttctaaagatcagtctatcttgaaattagtataaaaacaaaacaggtacatttgaattttttaatcaaaaatgaatgggattgaggaatattttccaatttgctgtaccattattcacaagagtttctgatagatttacaccaactttcaacaattgcagacttttatcattaaaattactacctgaacatttgagataggtgacccaaaaataacctttgcacaattttatttggagtagaagcctcctaaaatatttcaatcatattgtaagtgaacaataatatggactttagcagtaacagattttttaaaatgtactttttctcacatactacttcaatatattcaaagaaaataggtaacagccatcaaaataagtatttatttattagttgtagtactattagtaaagcacaagtgttatttatttcaatcttgacatagtccatataaccacagactttgatcttcctgtgctgaacacttccttctagatggtttaagcacaaacaatgaacattcacattttcaacataatacaccgttcagaatatggaaagtagcattattctcaattccaggtgaagatgcaaacaggagtacagcagaattcttcaacaaaagccccaaatctgagaggttgggagtatcgtgcatcaccaggtttttgataagaaatttatgccaatttccacaaatgtttttccattcattaatttaggatttattggttgtcgaccatgagcaagaccccttactaggcactggaagtccttcccccaaaataagtttatgtccttatgagagttcattatccatcagaacaaacagataagtataatgggtacaaaacaacgtactcaacagaggaatgaaaaagggagctggcagtgagaacacagagcaaagggaggcttcccaagggtagataatctgctgcagcccctgctacaacaccactgcctagtttagagttggagtctagtgaaagtcttgaaagtgttggtcattcagttgtgttgactctttgagaaactatggactgtagcccccagcctcctcactccacgggattctccaggcaagagtactggggtgggttgccttgcccttctccaggaggtcctcccgacccagagattgagcccaggtctcctgcattgcaggcagattctttactgtttgagctaactgagaagccctagtccagactagagtctagtagggatc

SEQ ID NO: 41457 - DNA, 791 bp, Bovine  19866881034528
  misc_feature (1)..(1): n is a, c, g, or t
ntttacctagaggctgcagtataaatagatatatatttattagggctgtttgctcttatataaatatccaaaacatgatctcaaacgtggggcccacaaaacacagaaatttaaagaaagggttgcaagaaagaaaaagtctcccaattcttgcctgtaacaatggtgatggctactaatgacattccgatgagatgacctcaggctatgtaagtttcataaagggaccattagtgtcaaggcccttggtctcagtcccggcccagttagttgtactaggaattactaccatattaagagatcggttatttttctgaacttacaataccaggcagagccattttctttttctgatgttttatttatgtgaactagccttgcagagttggacacaactgaagcgacttagcagcagcagcagcctcctaagagggtaattaaaatatttatgccagaaagctacaggaggtattagatgacgtctgatttttctatggctgagagaatatctgcttatgtgaaagtcaacagacagatccaatttaggtagtggctcattcattcacttttactttatcgagtgccttctgtaactcaagaactgggtactgtaggtacaacaataaaaaagacaacaagactctgccctcatataactgatagtctagtgaggacaaaccattaggctggttcttcaatatttactgattttaacaggattcatttctttctagcatcaaattcacaaacacacacacgaaataataataatagtatttattgagtaccaa

SEQ ID NO: 41458 - DNA, 1305 bp, Bovine  19866881116013
  misc_feature (1)..(1): n is a, c, g, or t
naagcaccaagtgaaaaacacatatattgaaaggaggtcttcagtaacttttggggactaactcggatctttcccgaaggtgagataacccaccagcactctggatacaccaaataccctgagctggaacgcttggtttattggcttattagcacttcccaaacactgacagacaaacctctgctgcaaactgcttctagttgagcagcttagcaccttttcacttggcaagagatggatttccaaaactaggctttgattcacaaatacttccttgactaaattataattccttaaacctgacttttttttttttaatctttgccacaaaatggagtttgctttctgtacctctcaccaaaatagggcgctttttgtaaagcttatatttcactgttcttgtaagattatctgcttgataagaatatcatttggagtactttttcatttaaaaaatttttagatagaagtcctgaaatacattcctaggctcattctcttgcatttcaacaggtcaaaagaacttgtaattcttccttcttgaagcaaaatatacttaaatgaaaacaaaagtaaggaaagtgggaggagcaagtatttaaaagttatatttctttcagtattattgtatactctattgtcacacatttaaaaatgagagtttaaagactaaagaaagtccagtaaaatttattttcaggtccttataaaaatatattatctttacaatgttaggtgtgtgtgcctctgtgtgtatctataactgccataatcagaaagcattctttgtcaaaacaaacttctaaagctttggcacagagttttgtaaagaaagttcttatgactgacaccagaactaaaagtcccaaggggagtgtccatccagcaaaattttctttcatcattaatactgcccaatgccctaagcagccctggtctttgcgtccccacggcatgccggcatgcccaccctgtcttatagcatctccatcccctacccctgcccaggtctgccatccttgccattcccctactctgaccacaggtaaaccaaatgagaaataatcattttccaaaaaatgaatttgaagaaagggtatatttttctttcctagcagcacatacaaatggatgcagtgccttcaaactaaaacatttacattcaccagtagaacaaaaaaactcaatcattaaagttccaaaagaactatttttcaatgatgatttaaccctacaagaaacaaatataatctgctctctgccgcaatggataaagacaaatatgaaattaaaaattaaaaataa

SEQ ID NO: 41459 - DNA, 1024 bp, Bovine  19866881865807
  misc_feature (1)..(1): n is a, c, g, or t
naaattgtaggcttcagagttactaaatgttttttgggtggcatgaatcaccagttttccagttatatctgttttcctgctacttgattctcaccactaagtcaatcttaaattttgggcctctattgtagtcccattccatttcaaatggtcaatttctctctcaagctaggctgggtgtggtaatagagagaccccaaaatgtcagtgattttttgccatatgattttatttcttctttatttcatcagagaccttgtagttttagggttatatatcagtacatctttcctcccgtatggacccatagagatggtacctttgaaatcttccacacctagctttcagtgttgcgtaggcgctgggagagagacagtatctggaggacacctctgggttattctgtagatgctggatttggagtggcacaggtcacttctgtttatgttccattagagagaacgttgttcatgtttatgtaactgtgcagaagtctagggatgtgtatcttagaaaaagagaggctttgagcaattagctggtagtctctgccacaagatggtgggggaaattttaaatgtgtcaaggatatgtgtaagaaaaaagaacatgactacctgaatggcagtcggacttgtgactagatgattaaggaccaaatggtaaaaaggaactgtgaactaatgactactatcatgtgatattctgaaagatataaacattctcactttttttaatctagcaaagaagagtgtggttaataaaaattagtctctacagctgtatgtgtaaagagtgtgtgacttcctgaggatataatattttatttattttggcattttgtgaataggactaacgtgttctctacacacatcaattagtgcacttgttttgaaaaaataagatatttttagatttcaattttgcttgcccctggagaaagagacagcattatacacatacacacacacacacacacacacatacacacaaacacacacacacgattgagaagggagttgag

SEQ ID NO: 41460 - DNA, 1040 bp, Bovine  19866880695345
  misc_feature (1)..(1): n is a, c, g, or t
ntgaggagacagtgttattattctcttggggtttttaaattctcatttatcttttgtttccagtcagtccacaactatggtttgactattaatctacaacatagaggaaatgtcccattcacaaaagtggtgtactccaaacctttgagagttggttattttgggaacttagaatagtttttcctccaataaacaatactataaatgatggtgaggtttccagagcagccccacaaaagtcttcttaactcataatgttattgaggccctggacttctactgtgaaaatgagtggagagcaattttgttgtaacaccaatacacagactcaaagatggatgatacagtatcccttctcttgaattccacttaatgaaacaacccgatcaatgaaagaaaacaaagggaaagatagagactttttagggaaagacctctacttattttgcaggctggtagcagcactttattgttattttgtctggccggtttcacgtgtacagcttttttgccattttccgtcacagacatgacacaaaggagccatgataagaacagatttgaggctcacatcaaaggatgggggaggaaaagcaaaaagtctgaatgagatttccttgatggggtgattaaagcatgtggttgcaaggaggagactgtctaaatctgtattaacttatttgctaaggaaattgaggagaaggtggaagacccggtgttagtgtctcaggtctttgagcctggaagagagtccactatttggacaggcagttccttctctgaccataaggtggtgccatcagtccagacagtcgggcccccaagggggcgtggcttgcaggaggaggagctctacacgtggaagccacgtttcccactctggctttggaactcagacagcctggaccagccaccaagtattaacatcaacctacacaacactgcctcatcattcaacaacttcccatcctccaaggcaccacctgctcacaaccaagtaagaacatccttctaggcacagcaatccacataaagattcc

SEQ ID NO: 41461 - DNA, 638 bp, Bovine  19866880735238
  misc_feature (1)..(1): n is a, c, g, or t
ntcctgggaagagctgggagaggagggggcctcccgagagaggagggacctcccgagagaggaggggcctgggctgccaggccttattacaactacccctctgttccctttggcatgcttcatcttgcagctgtgggctgggagacggggattggccatgccaggtgccagccaggatgccagggctagagcagggagttctacctgagacatcgcaaactatcaaaactacagggcccctgcagggagagcaaaatgcagagcctccaagaatgcacctctggtacatcatggcaggagtggggttaggactgctgggtcgagtgagtggagacaggaaagggaagcaaagatgagaggcggagaagtgacccaaggaatcctaccactcgccaaaggccgggaaaacacagcctggccactccagggccaagacaaggccatccctgagttctgagggattggagagattctttgaattcagaaaaacatcagagtaactccacccactgttcctggaagggggccacgggatgacaccagcaaccctggcccagatgcgggttataagccgtcacaaggaagaaagagcaggccaccgacttgggggaggctgtccccagccccagccatcctgc

SEQ ID NO: 41462 - DNA, 1349 bp, Bovine  19866880799089
  misc_feature (1)..(1): n is a, c, g, or t
ncatggtaagattgtataatctggtcccctatggtcaggtggggcctagatctggcccatgagttgtgagtgaaagtgatgagtcatttaatttctatttcccatctgggatggtgactgaccataaggaagatggtagctgttctatctgcttaggagcccttgcctacccaacaatgaacatgtaccatgaacaagaaatcaacttttgttgttaaaagccactgggatttaaaaattgttcattactgcagcaaagcctagtctaacctgtctgatacatatacccgagtttcatctactttactcctcagcactctggaggatgggagaacttgacaagtgttttatcaaattgcttattttctcccccaaacctatgactaatatgttagtgttcttctgtcatttttggtcatgttcagtggcacagaatttggtaaaacaggaaaaaagagaaagaaaggccaaatgtatttctttgcttcttactgagctgcatatgagctggtgtgggatccatgggagtagttcctcctctcacaatctacaaatacctacacttttccataccacttctagttcccagtcaccttctgctatgaagtttctttttgaaggtattatgcaaggcaacttatggggagtgacgtttggtccacccttctatggaacaaatgttttcctagatatctagcttgggtgatgtgaacaagattccatcaacatagagggcaatttcttccacatgtgataacattacctctcactagaccacaaatccagaggcaaggtaaactgaataagtgactgtggcaaaagcacccaagtagagaatacaatgaactaagactaagaatccaatcccaattctgatatcatatttgtctaccagcctcattggaaggcaagtgaaagaaacccaactcacacaatttataagaacactagaaaataaaaacctttccagttctcaaaaaatgtcaagaagaaactatcccctctatgacagcatactgttgcttttttgctggctctgttctcagctctgcttttcccaagtggcagcaaagatgaccacagcatgtccaggctctcatttcagcagctcagcaactctgggagaaagagacaccctcttttccaagggctccatcaaaagtcatagaatgaaatttcattggcctcatttcagtcacacgctcacctctgaaccaatctttgtggccatggaaatgcaagtgttctgagtggccagtcctgggatcatgcccacctctggagacagaggttggagcagcctcagtcaaatcacgtggaccaagagatgggaggggtaagtctctgca

SEQ ID NO: 41463 - DNA, 1250 bp, Bovine  19866880875203
  misc_feature (1)..(1): n is a, c, g, or t
nctgggacctttatataaagaggtcctggggactgccctggtggcccggtggctaagactccttgctcctaatgcaggggcccacgttcaatccctggtcagggaactagatcccacacgccacgactaaggcccagtgcagccaagtcaatgaacagcaacaaaaagcacgtagtgatttgaaacatataatttaatcattatcgtaatttgcatcgtttggtaactgcagctcacagggacaaatgcttttccttcttgaactatcaaacccttttttgatctgatctcacgtaagagtttgcaaagagggttctgaacttccccgagatgctggacgaagcaagataagcacaggaagggtcccaacgtgaacccgagctgcctccctccctggctggggcttgggggggccgttgctcctgctgggaacccgagctgacctgggggatcaccaagcaggctgtcgctcagtgtccccaacaccgcggcctgtcaggctgagcccagtcccttctgctcagcgccagacacctccagaccccggagtcaggaggccacggaaacaaaggcctttatctcacgcaggctctcgtgcggctcagcggggctgccggccctgctctggacagcataaaaagtcaggcccggatgacaggcagaatttagagcccttttggatggcagctgggattcaagctgtcagctggaggcaagtgatcacagtcgggctggtggggactctggtgcgtgcgagagggcaggggtgacgctgtgcagagctgccctgcgcctccttctatttataattccccttgataatagggcccattcattccctctgcaggccactaattgctctggagcggagggatgacagcctaattattaacttcacaaaaattaaagttgggccgtgtcaacagggtccatttgctgtcacccagatgcaattcgttgcccttcattgtggcaaagggcagttagaaaaaaaccgaaaaccttggcctggttccagttccagcagacttttattttctggcctcaaattatcgtggggaggttctgcttcgaggagacagaatgcctctttcctcttggccgtaaactgcggtaagcctgccgctgctcctctgacaggagttgacatttttggcccctggaaatatgggatctgagggttagaagggaccttagagagactaaaagccggcaggtacggctgcagtccagcccacgggtgcgcttca

SEQ ID NO: 41464 - DNA, 1771 bp, Bovine  19866880911698
  misc_feature (1)..(1): n is a, c, g, or t
ntccctagccttccaccatttagaacagcttttaaaagataaaaatcgcacaagacccccagaaaggtagaaactgttattcctcctttacagataaacagactccccagaggttgagtaacttcctgcaggtcatatctggagaggccaggacttgacctcaggaatccccaagacagagtcctggtttctctcctccatgacacaggcactcctccaaggggtctgggcggccacccgaagcttttggattctctgcagagtcacatcaggcctgtcaataagtcacaagatgccatgactcatctgaagacaagataaacaacagggaggcccggtgggatgagaggccctgtttcctaggaagttgccttctgcagggctgaaagagtacacagtcagcaggcaggaacctcttctgcaaacaccagcgcagcagtttgcagacaaaggaaaagcactgctggtcctggagatgggtggcagagctgggagccgtgagctatttccatcctgaaagggcttttgtcaagcccaggccacgagcctgagcatatagaattccaagcctttcccttccaatttctccaaaaccagaagggaaggtccgtctgggctgatctaatgtgagttctctactgcatcccttccaagaatcccaaaatgtttaaccagtgtttctggataaaactgcagaccctccaagtgaccttgggcacccatttcctcttcctgcacgccagctctcaggggagaataagatggctctcagggggacgaaggtgatttggcagagggcaggagcttactgcccctagcacccatccaaccaggtctgtctggacacaacaggctcatagggaccagtcaaagcgcagagcccagatggcccaacaggaaagtggcaggtggtcaggaagggcggggcagagagtgcagaggccagcaggagggacccagcccagggctcagggacggggctcagtcttgcaaagactcaggccacaagaagaaatctactgtcaaatgaaggatccaagtagagccttgaggcttggtcatcaggaaatatgacaagagataggcttgctggactgtaggtcagagtgaggtgacataatgctgattcagccagagagaacttagaggaaattttcactctccctaatcagtcacggagctgatgccagagtctgcaatcgaggcaacttcgaatgtttggggatgagaggacagggaagccccagaggcaattcaggaagcagcacatgcctggccacctccctcctgtccacctgctcagaaggaccttctcctccaaaccatcacagccaaacaggtagccttcaaagcagccccaggactctgtgacaacactcagaacaacgtcttgcttatccatgacctcttcttggacacctccagtttgaatggaccttcccaatgcatgcattttgtctctgactcaattctaatttctatcgctattggctcagcagtaaagaatccacctgccaatgaggagatgcaggtttgatccctggatagggatgatcccctggagtaggaaatggcaacctactccagtattcttgcctgaaaaatcccttggacagaggagcctggtgggatacagctccaccgggttgcaaagagttgggcatgactgagcaactgagtacacattgttattttaaaatgactgactcttactcgatcccagcacaatgcagggtactcagaagagcttagtaaatatctttgtctttga

SEQ ID NO: 41465 - DNA, 1681 bp, Bovine  19866880125323
  misc_feature (1)..(1): n is a, c, g, or t
nacatgggaataccaggcccacctgatttgcctcttgaaaaacccgtatgcaggtcaggaagcaatggttagaactggagatggaacaacagactggttccaaattggaaaaggaatacgtcaaaagctatatattgtaaccctgattatttaatttatatgcagagtacatcatgagaaatgctgtgctggaggaagcacaagctggaatcaagattgcagggagaaatgtcaataactttagatatgcagatgacaccacccttatggcagaaagtgaagaaaaactaaagagcttcttgatgaaagtgaaagaagagagtgaaaacattggtttaaagctcaacattcagaaaactaagatcatggcatccattcccattacttcatggcaaatagatggggaaacattgataacagtgcctgattttacttttttgggctccatagtcactgcagatggtgattgcagccatgaaattaaaagacgcttactccttggaaggaaagttatgcccaacctagagagcatattaaaaagcagaaacattactttgccaacaaatgtctgtctacacaaggctatggtttttccagtggtaatgtatggatgtgagagtcagactgtaaagaaagctgagcaccaaagaattgatgcttttgaagtagtgttggacaagactcttgagagtccgttggcctgcaagcagatccaaccagtccatcataaaggagatcagtcccaggtgttcattgaaagggctgattctgaagctaaaactccaatactttggctatctcatgcaaagagctgactcatttaaaaagaccctgattctgggaaagtttgagggcaggagaagaagaggatgacagaggatgagatggttgaatggcatcaccgactcgatagacatgggtttgggtggactctggggtttggtgatggacaaggaggcctggcatgctgcgattcatggggtcgcaaagaatcggacatgactgagccaactgaactgaactgaaacctcttcctaagaaataatacctaaaaaaaataaaaaagaaaaaaaaagaaataatacctgcaaaattgtatggttttcttttaatacattttttttattcctgacacatattaggttgaactgtatgaaactgccaatatttgaccttttaaaaaaaaaatcctcaaagatatccgtttcatgtggcttaaagtaaacataactattaaaaatcagaatgagggtttcgtggctcacattgaatccctggatataataacagaggaacatgtcaccccggaggaggtctggagttggagggatcaagccataaacagtgggtcttgtgagattcctcagaggaggggggccaggctgcaagcctggaaggaaggaggcacagagaagagagggaggagcctctgtgaggatggctgtccggggagcagccatctgtgaggatggctagggggccaagcggaaaaggagagccagtggactggagggagcgctctggactcctctgctgtaaattattaatccctgcatttgtttgtttgtttgtttctgatgcagttgtgtgcattttttaatgggaggctacttgctttgcaatgttgtattagtttctgcagtaccgcaacataatcagctacatgtatacatacatcccc

SEQ ID NO: 41466 - DNA, 2890 bp, Bovine  19866880400898
  misc_feature (1)..(1): n is a, c, g, or t
ntggtagccattcccttctccaggggatcttcccaacccagggatcaaactcaggtctcctgctttgcaggcagattctttaccatctgagccaccagggaagccccaaatagagtatactagctaataaagggctttctgagtgattcagtggataaagaatccgcatgcaatgcagaagatgaaggatatgcgggttcgattcctgggtggggaatatcccctggaggagggcatagcaacccactccagtatttctgcctggagaatgccatgaacagaggagtctggcaggctacagtccatgggttcgcaagagagtcagacacagactcagcgactaaaagcaagagcacttaaaatacctaatacaacgtaaatgccatgtaaatagttgttgccaaagcatcacaaattcgggttttggtgtttggtactttctggaatttttttctttttcccaacatttttgatccactgttggttcaatctgctgatacagaacatacagatatggaggactgactgtgtgcccaggaaactatcatcataatcaagtaaatatatccatcaccccccaaattttccatgtgctcctttctaataaggcagagcatactgctatgaccataaatcccccttctatgtgtagaaccaacagaaattaacacatatgttcagtgaaggcatgtattagaaggctgatagcaatattgttttaatagccccaagttggaaattatccaaacactcataaacagaagatggatacatgaattgtagcagaggcacacagcagaaactcatatgacaattagaaagaacaatctccaattacacatattcatatggctgaatctcataaaagatgagagaaacaagtcagatgcaaaagagtatatactatactatttcatttatacaagtccaaagccgggtaaaagtaatctgtgcttttaaaagaatcaggataatagctgtcctcggaggtagaaggggagctactgaaagcaacataacaaggctttaggggtacttataatgaactatttatttactgatccaaacagtgtctatatgaatgtgttcaatttgtagaaatttatcaagctattccttatgtgtaattttccgcaatgtactcccataattttctttttgtaaagttgataagctttatcaaaagttttaagagtgttaccaagatctttctcttttatgtagataccgagaagacggccagttggcagcgttagtacagtgcggtgaattcacaataaactagaaagccagggttatatagcatggtgcatctggggaacgttgtaaccagccaggaatggttattgctagtcacagagctgaaagctctcaataaattttgtttcctccattgcacactgtctgatgattggcaaagaaataaaatatagaatcaagaaagccagaatgccctctgcaagaataaaatgtactgccagtatggcacacagctgtacctcccaccaaagttgtatggagctgatgagaggtccaagctgcttcatgacttggagagcttgtgtgcatccctttgccagaagcacagttagaaaaagcaaacagaaagtatgtttctgctgagatccctgagggaaggaaggaaaattcctctccaaccaagagaggaaaggagaagagagtatcaacttcttgtctttttaatgatgaactctaggaagcaaaggagaaattctttatctacctgaacaagtgttattttcctttagtcctcacataatgcccaagaactacttggttatcagagtttatattaaaaatttcaactcttcttgtattggttttcaattttacaatttctgttaatgacgcaaggaccatagcaagcttcttatacagttttcttgtaacttctatgtggctttgtaattgaaagacaaaacccgacaaaactaggggaaaagtgaatgccaaaaatgaacaatggttaaacacgtcatggcatgtcacggagtatcacagagccatttaaaaagtcaatcaatttacttctagaaccaagatggtggtctctaaatagcattttctaataaaagggagcattcttccttggagaaatgactcaatccagatttggtgtagaaatatactaagtctagtataccttattgtgccagaaagcatggaaaacatcatgaattactggggttttattaaaagaaaacaaaaggagaaaatctgaggggttcccactggccaaggatcaaaccatttggacatccaacaaataatagctgcaagtaaaagatatagatacgaaaatctatgagtccaaagatgtaactgaccatcactacgggttgttaaaagaccaactcagttttttaaaaattgacaagcaaaataaagcctttattctgcctttcctaataccttgggggattaccaatgattgacaaaggagaggtcctcacagaagaatcccagaaaataaaagcagaaacataccgatagattcagaaaatcatgcttcaactctgagtgaaataatgcacataactagtgttcacttctgaatgctaaaaccattcagttcagtcacatcgtcgtgcccgactcttgcaaccccatggattgcagcattccaggcttccatgtccatcaccaacccccagaaattgctcaacctcatgtccatcaagttggtgatgccatctaaccatctcatcctttgtcgtccccttctcctcctgccttcaatcattcccagcatcaggctcttttccaatgagtcagttctttgcatcaggtggccaaagtttggagtttcagcttcagcttcagtatcagtccttccaatgaatattcaggactgatttctttgaggatg

SEQ ID NO: 41467 - DNA, 1574 bp, Bovine  19866880445056
  misc_feature (1)..(1): n is a, c, g, or t
ngctgttcggcctgtgtttacatcatcacccaggcaccgccatattgtccaggtatctggacaagtttggccagacttcccatttgcttgctggattttgttttgggaccttatttgtatgttccaccacttaattacttctcttctcattcacccaaactcctatttttgcttctggtcaggaagtcttcctctcccaagtccttggggatgcaataatcaggttgaagtgaaagtgttacccactcagtcgtgtccaactctttgtgaccccatggactgtagcccaccaggctcctctgtccatagaattctccaggcaagaatgctgatgtgtattgccatttccttctttaggggatcttcctgacccaggggcggaacctgggtctcctgtattacaggcagattctttactgtcttgagccacctagcagaacaataatcaggttaagttgctgtttcttccaggcattttgaatgacactctctcccctgagtccattttcagaaaagtaggtcgaagtcataaagaatagacttcctgcgtggagactttactgactcatcatcgttaatcacttccttgggaacaattgggagaataaatttcatgtgactccaggcaggtatcaaggaagatcttctgttgagccctgtgagaatataggtaatttaacagagctggaaaaaaaaataagttttccatttttcaaacctaagatttcccctttcattatagaatctcaataacttccacttttatcatttcagtacatcctgggaaatgattccaaggagtttattgtatagttagaagagataaagagtacttcaatgtggaagggacataaaaaggtgttcccagtctaccacaggcacagaatgttctcagaagtaattccttcccggtgggttggatttattaaaccagaaatctgtggctcaggaaaggtaataagccttgtggacccttcagttctggattgcttttacctaattatgaccctttggctacagcccataataaagagatattcacactacaaaaagtctctaaagggtaactccagacttgacctgtacttattaccacaaatgtttgaaagctctgtgagagattttgacttataaccagtctagaatcttctcttggtagaccagacaattgtccaacgtcttttaggaatagggagcccagaagcaaggcagataccctggcctttattccgcaggtgggatttcaaacaggcccgagctggacatgttgaagtctagcttctatagggcggcatagctagaagctgatggagaccaacatcctacgtttttatatctctggcagagaacaggcccctagagactgagccaccagcaggaatgcctgtaaagcagccagcccagctactgagcaaaggagcccacagtgttctcactgtggagagaccctgatttttccagtcatctctttactgacaggaagcagcatttatccagcccttaaagaataagcatggagctgctgaaagcagagatggggctccatatataaaataagcctattttattcgtgg

SEQ ID NO: 41468 - DNA, 1826 bp, Bovine  19866880500440
  misc_feature (1)..(1): n is a, c, g, or t
ntttccctctcgggcacagaaaggagcttcaggtacacattagggacacagagacctggagggaaattcgtctctggaatcgcacagcatcaatcaccagccgacacgccgtttaataggacgtcattaatgagcagcagacacgtccggcgctgctgcagccggtgtcatcactgcctgcctctgagattcatcagctagttaaaatattcttgaaaaagtacatttaactttgctctgcttcaaatcctcctcacgagaaggaataaactatgttgattatctctgaggggatatttttttaaagcttttaacaaatgtttagagcatcctttaaagtgtgctggatggttgtgcttacactcgtctcttcttgtatatcccaaggggcatctgcagacatatacataaatcactcaattttaagcaagtgtatgtggagagctggctatatgctcaggttgatctgagcatatagctcagatcagaactggacccacggtaggtctgacattgcggtgatgctttttctcatgattcctttttttccataccattacaggccagaagacaggcttatatggatactctaaaggaagaagaaaatcaaaaattgcaaaagatgaaggaagagcagcaccagaaggtattcaaagaccatattagcatttggttgcggtactagataatgttgaagagcttgagagcagtaatatttatatacatgaaaatcctaaaaacaaaacaaaacaccacaggtgttaaaaatggtgagatgtgagtatgttttaagagtatggtggtgtgatggcggcttctgttcaactacttattggctcctgctacttactcagcctctgagggctacagtgtgtctgctgtagttggtgccatggtccagggagaagatgatagaacacttgggaacttctttttttttttaactttttattttgtattggagtatagttgcttaaaaatgtgttagtgtcagatatataacaaagtgattcagttacacgcataaacatgtatctatactttttcaaattcttttcccagttagcttgttgcagaatattaagtggagttccaggacacttgggaactttgggtctacaaaatataacaagtgccactgccatttttaaaattaaagatatatgatgttgcaaataatgtccagagaccactataatgcataatggaaaaaagcaggcacacaaaatcgtgacactggcttaaatgttcatctaaaaatacccaaggaatgaaacgacgcactctacacgtacacaaatatgtgaggtgtttccaaaaaacacaatattccaaataaaatgagcaatagaaatcagggaaatgaacactgagaaaagtacttaatgaataagaaatttctgacagggtaactgaaaacagtattgtgacttgatggtcatacctgctttgattcataggctcagaggctcctcaaccaaggatgggagtcatgagagagatgggagtcagctccaaggggccacttcgtcccaggtcctttaaaaaagcaaaaaaaaattattcagctagtgggagaccattatcttccccatatttattttcgaactttttttcttgttctatttgtacttaatatatcctgccatttcttccaggatatccctcaagtctgtttcttcaattattcaattaccttgaattctaacgcccattctgatttccttaatttgggtttggtttttcctcttatgtctttgctctacaagggtagcttattatagcaattggagtgtggaaatcatattataacatattcatattat

SEQ ID NO: 41469 - DNA, 1164 bp, Bovine  19866880604666
  misc_feature (1)..(1): n is a, c, g, or t
ncatgcttccaacccatcaaggtttctccccctcactggaacacagtcactgggtaggaacccactcctttgctcagactgagctgctctctgaactctgctggagggcggtttccaagctccatgtgaagaagcctgactataatgaaacctgtgttctgttcctgatcttttcccagagagggattctgttcagattctcaagcagaaaaggaagctcgctaatgtaacacctttctgctttcctccaaaaacaacagcaataaaatcctcagttttgccagaagcaagaagccctgcaatgttccgccccttttaatagtgctaaagaaaagcagggttccatctgcttgccatttacctccggagcctggaagccccgcaattctccgaggagcggcagagatggaggaagctgtgtgatggccgcgagggcgtgtgcccgcgcgcagcgtgggaaaataaacacagccagtactaaggtgtctgtgccttccgctgccgggggggggcggggggaggcaaggggagacaggaacggtgtgggcggtccagagagcagcagggcgccgtgttttgctttgtttttttctttttaaaattagaagactctaatgctcgctaccttcccagcccactgttccccgggaacgtgctctgtctcccagttctgccaagatacatatttctcctcctctggaccaccctgaaggtgtgatttgggaatggccctagacaaacaaccccgatgccagccccatggtgagtgcccggccccagagaaagctccaggggggaggggctggagggatgtggtctggtcaaagagcatctatctctgcttaggactctggagacgccatttctactccacacttctggcttatttggagctcagattggtgtggggtgggggagggggtcatttaccaccgactagactgccagtcttggaatggagtagcttgaatccaccccctttaaggctgacctgaggctgtgcccattctcctgatggggaagtaaggccctagctggagaggcacatatagacctcttcttagtgagaccccatgtcccaaatcatttactcaagacatggccataggaaagatcaatgcccggagagagggcaagatcatgcgagggcatcagaaagaaaag

SEQ ID NO: 41470 - DNA, 1149 bp, Bovine  19866880641014
  misc_feature (1)..(1): n is a, c, g, or t
naatgcctgtgaggttgctttctaattgtacacattaatctgcctgtgcaagctggctgaaatacacaagcagattgcacatgcagatggagcacacgggatagcttttatgaaaggacctctggaatgtactcctgcagtactgccttttccttaacaatcgaacgactgtgactatttcagttggcggctgagaacagaccagattaatggtgcattaagtctgctattctggctggggacagactcaaatttcatggtggagagttagttctaggattcttgagcatgaaagtgaagggtagaaataggcttctaaccttggcatagttttcatcattattttactctgtcattcttcactgcttataaagggtgaaacgtgatttttcaggattttttttttatgagtcaatagtactggtagatttaaggatctgaagtaacagttaataaacctgtgtgtgtgtgttgttataatcaaagaaaggatgttgttttttagattttttcaaatttcagcatttttaatttaaatggtaatttattttgagtcacagtcatctttctaaccatgtggcttttggatggatgtcaagacaggtttgaatttggagactatataacgagttatgggggctagggtaaggtgtgaatggggcaatcagatggattttgggtgcaggtgttaggaaaaacagtgctctcgtacggatttgctggaaaaatgagaattgtgtgtgttttaagcatttataattttaattcctatctaataatcatttaatataatagattatacatttgtatggttttaaaaatatagaaagtgcgtggctcttttaaatgctatttcaaagtaatgagctgctctactattgagaacttagggtatttcagccatatgaggcatactatatacatttttcatttaatttttagatcaatcctattagagatatatcatctttattttaggtggagggattgtgtaatttaaattctacccttcctttcgtgcttaagaatcctagaactgactctccactgtgaaattagagtctgcccccaaagtcacagacgcagtgaacgatgcagtccgatcttggtcctgaaatttggggggctagggaaaatgagcatttgaga

SEQ ID NO: 41471 - DNA, 1682 bp, Bovine  19866880680147
  misc_feature (1)..(1): n is a, c, g, or t
ntgttctgggggagcacaggcacctctgggccccaagggtggcctgtgttcaatcacaccacaggggcacctgcaaaagcaatcaagagataatgagacacacccacacgcaagtgtatgtcttcgattggggatattctccatcctcttaacttggtgcaccttgacccactctgtgcctccaatgggtgagaagtgagctgggaagttgaattcctgagccccaaggtccctgggctatatccagtgtgccactcattttcacatacatcaccatctgcaaagcactgggaacgcatgacccttgcacccaaactgtgtccttggacttgagcatcagtatcactctcaggccccacccccatcctgctgactagaacctgcttgttaatgtccccaggagactgatgacatccaggtctaaggagcatgaccagagacaacagtaaccagtagcgaaccctcagattagttccctgaggtaatcaagggaaaaggactcaggtgagagaaagaccgtgatcacagcatgaaagatccggctcatgttaatttcatttgactactgaaagcagctgcaccctaagcttgtgaagtgggtgaaaatgagtttagttgctcagtcgtgtccaactctttgcgaccccatggactgtatcctgccaggcttctctgtccatgggattctgcacacaagaatactggagagggttgccatgcccttctccagggaatcttcctgacccagggatcaaacctgagtctcctgcattgcaggcagattcttcacccactgagccacctgggaagcccaaaatgttaccactcccacaccaggagttgaacctgggccgcctggatgaaaaccaggaatcaagaccatatgggaagtgctaaatcttaaaaaaatccaagttttaataaacagttttgaagccactattatatttaatagtatggagcacaaaggaattttgcctgactgcagacacagaaagtgagcaaccacctctgtgattttcagaagattttcctcaactctctctcctgtcccagatatttgcttcaaaaacaaatttactctttctctgtctctctctgtgtatgtgccttatggaactgttctaattttctgagtggaaaactgttttgcatgttcgcagaggcaatcaaattaatactgatccatcatctgtgtgtgctgtgaatgcactctgcatttatctttttggttcattttaaatggcatatgataaacattgcattagactgtgtgccaaggtctatttggcaatgacaagcatgttttagttataaagctctccctccaggcacctagcatcaaatcattgccaaaaacaaggcaaaactcctggacattttctgatggttattgagcttgagatggagtgaaataaactagtgtatgcttctgtttaagaaaatagaatttgatcttctggctcctggactcatttgagttcagtgactccttgagttcatttatctcctatttggaccaggattggatactttggagaaagatggctttacgtttgcatgttcacttggggtctctttttcatacttagttgttcagtcatgtcctactctttgcaaccccacagactgtagcccgccagggtcctctgtccatggggattctccagcaagaattctgt

SEQ ID NO: 41472 - DNA, 2411 bp, Bovine  19866880700680
  misc_feature (1)..(1): n is a, c, g, or t
natatatatctatgtatagatatatagtatccgaatcattttgctgcacacctgaaactaacacaacattgtaagtaaactgtatttcaataaaatttttttaaaaaaatttttaagaaaatagaagataacggccttgctccctttcagactttctgacactcactctagcagcattgggctggtttgaggaaagcaggagcccagaagagggggtaggaggctattatagtaactttggagaaggcaatggcaccccgatttagtacttttgcctggaaaatcccatggacggaggagcctggtgggctgcagtccatggggtctcgaagagttggacacgactgaccgacttcactttcccttttcactttcatgcactggagaaggaaatggcaacccactccagtgttcctgcctggagaaccccagggatgggggagcctggtgggctgcagtctatggggtcacacagagtcggacacgactgatgcgtcttagcagcagcagcagcaatgagaaatgatgacggcttgaaggaaggcagtggtcctctggctggaggcatgaggatggatttctgagctctttgcaaggtgcaagtctgcaggatttctctgcaggaataggaaactggctattcattttcagaaacaaccctcgtgtggcattcatgtgctaactcggctgatgaatacactattctcgtaactaggttggagaagaattacaggaagggtatcattaagatgttaaaatgaatgcattacatatgttaacaagtgtatgaaccctgtattatatctggcaaacggggtgttaaatccttgttcaaccagccagatgtccctgcagctgcctttgggattgcagagggaggcagccacctgagaccccagctaggagctggtgccagtggcttccagaagcatctggctagacaaattgctcctcctgtgctctgactgacaggtaccgcatggatggcgcaagtcacatcgccagtgctcaggtgggctctttagtctgatgagaccagactccaagcgacttgacttttctcagggttatctttacagttgggagtatcctcagtgaagatttgtatctgtttatccatatgattttataagaccaaattaataacgttcacttttgaattggaaggctcaaagtcttgttgggggcggttatccagctgagtttgcagaggctgggttgagcgtttgctgtcaatgtttaaataacctggagcaaaattcccatgactgctcaaaaggagctgaaaatgctgacaggtgtttatatttattcttatggagtgcgatctctcctaagtggctctgatatattaagattgagccagttctgggatgtctctcccctacttctctttggcaaaatgatccgaaaataatataagatgttcaggggcgcctggcacaacagtctccccatcacactcccgggaatcgtacttagatgttgaattaaggcggaagttgaagagaagccatcctagagaccacagttacacaatcctattgatcttttgtgtactctctttcttgaaggagaaattgtgaaatcccaacatttttctctgagtgaaataaaaagtggaaattaaagaaaaaggaaatatcataccggttgttttcttgtccaaatgtactgtgacggcaaagatgaaaaagtcagtgcagtctaaataggaaaataccacaaggagattttcaaaatgtttggtaatttcctcatcatctattgtttttagaactttgtggagttggggcagaaggcagtttgaaacctgcagtctggcttgtcaatgttagacagtgtccactaggtggcagcatgtcagaggatttcttttatccttgaattggcagtgatttctttggctgtctaccagtagttcggtttttcttttttgtcccgttttgaagggttaaatgaagctctcacaatttagacgcaaattatgcttatttaaaaatgcataaattagctgaaaagccttcttgttatagtgtgaccataaatataagttcattcatgcatgggattttcctaggaacttacaggtaagatcctaccagtcctgagtaggttttggaagccagcgggtaggtctctttgtccttgaatgtgacagacgctaaacatgctctcttctgagaaggcagatcgccgatgttcctggggaacaggacgctggtttttctttaggagttctcagccaacagaagatagggcggtctgcccagctttctcaccctggagactgtttctggcttctgctggaggctgttcgctgggaggcgtgtcaaacctctctatacttctttatgcatagctgtgggcattctggagacaggagggagacaacctagattgtactgtgt

SEQ ID NO: 41473 - DNA, 1294 bp, Bovine  19866880706041
  misc_feature (1)..(1): n is a, c, g, or t
ntgggaagcacctctttacaccaatcttaccattaaaacctcacaatcctaccttgaaagtccctctctgtagactgttgagtgaagcggagggtgtccggtcagaacccaagtgaccaccacagctacatttcagatttgtgtctgatcttgtctgagatcctagagcgccaggcaggtggccaagatccagcaggcaccagtttggctaagaggtttgcatgactttgtgagggtattcctggcttacttagcctgtggggcttcccaggaggcacagtggtaaagaatctgcctcccaatgcaagagacacgggtttgatccctgggtcaggcagatcccctggagaagggcatggcagcccaatccagtattattgcctggaaaattccatggacagaggagccaggcaggccacagtccatggaatcacaaagagtcagacatgactgagcatgcacgcacgcacaatagcctgtgattacaaagcaaggtcatatttccctttcagaatccaaattcttattgcaggagacctcatcctgcttgcctgcaggaaatggttctttctcaaagtgtcctcctgccatttctagaagtccctagagggtgtctcatctgtattcacaaatcaaactggcacctgctggcaccagaatgtgcattagccggggccagcttggccatgtgtcagaggccgtcaaaaactagcctatacaagagaataattgactcccgttgttaagaaggaggcggaggctctaagccttagcaccatcttctgagaaacctccgcgtcatgagagcgaagcagaggaagaagcaaacgcacaagctgaagtgccaaagaagaaagatgaggcagagggccaaggagactttatacccacagaagccacatgaacagaaacaagggaagccagaggccagggatgctggtatgaactgttgcattatggggctcccctgatgtctcagacagtgaggaatctgcctgcaatgcaggagacccaggttcaatctctgggtcaggaagatcccctggagaaggaaatggctacccactccagtacttttgcctggagaatcctgtggacagaggagtgtgacgggctacagtgcatgaggtcccaaagagccggaaaagactgaagtgacttggcatgcacacatgcatgcctacagtctagaacctgtctcaatgggtttggaacatctggagctattttgacggcctcaactgcctttgagagacccaccttgctcatatcaaagcagtcctctggtccttta

SEQ ID NO: 41474 - DNA, 1812 bp, Bovine  19866880750832
  misc_feature (1)..(1): n is a, c, g, or t
nctgtaacagtttttgcctgatctcaaagaaacatgcagtattacattatcctgatggaagataatgcattttctgttgactaattcaggatacttttcatcaagtgctgtttcagttggtctaattgggagcagtacttgctggaattaatcatttggttttctggaaggagctcataatagaggactcccttccaatcccaccatgtactcaacatcaccttcttcggatgaagaccggtctttggtgtgggtaggggtggttcactacatttgccccctagtctcttccattcacatcattatacagtatctgtttttcatcacctatcacaattggttttaaaaaacagaatattttcattgtgtttcagtagagaatcacatgaagaaatatggtcaagttgttttttgcttaacttatatgcaacccaaacgacaaagtgattaacataactaagctggtgcaaatgattttcaatgcttgacttggatattttgagtatgttgtctatctcctgtgtggtgtaacactgattgttttcaattaatgtctcaatttgacctctatcaacttcaactggtctactcgactgtggatcattgtgcagtgagaaatctccagcatgaaactttgcaaaccacttttaatgtgtttgatcagtcacagcacctgctccatacattacacaaatctttttgtgtttcagttgtgttttaactttttttgaaataataaagcataatatgccgaaaatgttgctttttctccttccatcttcaatattaaagtggctacacaaaaattcactaattttgataagtattttttaaatgcatgctgatatgacagctgtcacaacacaatctaacaaaattgtttcaaataaagttaaagacagctaaatgttactacagccatcttatggaaaacaccaaacttttttgctaacccaaaagatttggtctaaatttgcatgctgctagctcacccagagattccagctgtaattctgctggatgttttagcttctaagtcttactacttatagccttggggaaatcactcactgagtcttagttcccacgtgtataaaagaaaaagcttggatttccagactttagacctcatgctaatgagtcagatggtgcagtggcaaagaatttgcctgctaatgcaggagatgcaagagatgtgagttcaatccctgggttgggaagatcccctggagaagaaaatggcaacccactccagtattcttacctggaaaattctgtggacagaggagtctggcggattacagtctatggaactgcaaagagtcaaacccaactacacaactgagcacaacaatgagttcatagatacagattcaaagttctttggctaattgggattactgctgggaaatggtaacctcacaatgaccctgtctgctgtctggtcgaagtataatccataggaaatgctcacaaatcctttgctcctaaaactcctggtagtgtagacccagggcagtgcagtcatcactctccaccactgtcatgggcaactggaactttcccagaagggtgtcagcactggtcctcagggtgtatactttctaagcagtttccagaaagtcttcttcattaggcttgaggtgagaggactagcaaccttcctcttggaggaattggaagggaggagtgttggagaattagcatagcagtagttatcaaatgaaattgcttcgaaagtttctctcgctcttatatcctttcagagtcgaaggggcttccaagaatattgaaatactacaagcggggagg

SEQ ID NO: 41475 - DNA, 848 bp, Bovine  19866880755704
  misc_feature (1)..(1): n is a, c, g, or t
naacactctaataattttagatcctaaattatgctaatttgattttaatgatttagcgatttcctgtttgttcttaaagatttaaaaatagccagcagtgctttagttgaggcagttttgtttaatgtctattgtcacggaaactacaccctcttaacttttaatcattctcaacctggttgattccacacaccacttagggctaatgtggaaaggtaactgtattcagattctgatgatgccttatctgcacagaagagatttctgccggttggcactcagctgcagccattttccaagtcctgtcattttcatttctcagcatcacttgtatgatgctccctagctgagggcatttggacacaggtaggctctgcggggtcactcccaggggactttctatcagacgcgataaggaagaaataattgaatggcagcacgtctcctttgcgccactttggttcttttggagaaattgtactctttccgtctatcaaagtaaaccccccaaacaacttgtctcctctgattatgtacttcaggtcttaaacatatcagcgtcaagcttgttacctccactgcagcagatgatttaggagagctgataggtattgtttgaaatactgtgaacagaggatgctttgttagttacttcctgtctgctctaagatcgcctttgctcacaggcctcctggaacatgagatggatattaaaatgtcttagatgcccaggagagtgttcctagcttcagtggttgattcagagggatcctgactcagaagcattgttggcatctaaactctagactatccaggttgcactgcttagcacgacatctgcattaatt

SEQ ID NO: 41476 - DNA, 1858 bp, Bovine  19866880771719
  misc_feature (1)..(1): n is a, c, g, or t
nacactagagcccatgctccccaacacgagaagcccacacagcaaccagagagcagtccccatgtgctgcatctacagagaagcccacgcagcaaggaagccccgcacagccaaaaatagatgcatacatgagattaattcaaaggattactctgctgtgcggagacaggtacagagtagaggcaggagaccagtaagagggcacaaccataatctaggcaagagacaggggtggtttggagcaaactggtagaagaggaagaagccagagccgtcagatttggggtggatatggagagcagaaatgacctttgcttggactgaatgtggaatgtaagaaaaagcagggagagatgacgcggtaaacactgccgtgttcagcacagggcccccttcagcagtaaggcacttgctcctcagaccccagggctgcttctggcagacagcactctgctgtcaaactccagcaagggcctcggctgaagaatgccacacccccttcccagggcagcctctagctgacgaccggctgacctcatggtacaaacactggagttctccagggctcagtctgtgagctccttttctatatttacttcccaggtgatgtcatttagtttcatggccccttgccacaacctgggacaaccacgatgagtcacctgagagtcagagcccccaccctgtgccccccaccggctgcctcaacccttgctaagactgcactgcagcctaaattatccctccatccttcttccctgttttgccttctgggagctgttgatcctcagagcattctctaataaactaacagcttgctaatctgtgtctcattctgctttccagagaacttcaactgcaaatgactgcaaggtttctggcctaaactgccaattattgacttagaggaggaatggttatttgttttttgtgggtaatggatatcaggagattggttttggttatattaagtttcagatgtctactatgtatgttaagtggaggaaatgtctgacctggggataacattggggaattatgagtacacaggcggtatttaaagcccatgagactaaacgagatcacctggagccggagtgtagctaagaagtaggaagactgagccccagagactgcaacattcagcagcagagaaaaggagggggtcagtaacagacactgggtaggcccggcagtgcgggggaggagaagcaggcgcccaaagtgaccaagtggaaacagtttccagggcttctgacaggccaaataggagcagagctgaggctagacctctggatttaacctttgctggatggcatcactgactcgatggacgtgggtctgggtgaactccgggagttggtgatggacagggaggcctggcgtgctgtgattcatggggttgcagagagtcggacacgactgagcggctgatctgatctgatctgaaacctaaggctaagtgaagggactgggcatgaaggtttgattagagtgagtttaggagagaacaggaagaaaggaatgggagacagcagagacacaactgttctcaggagctctcagagaaaactgtatgcgtgaactcaactttaccaaggaaaaacatacatacatgactgaatgtgcacatgtttctaaaatgtgaactctttcctaaggaatgataaataagtacgtgcttgcataaaacaaaatctgaaagtatataccccctcagtgttattttggggtggtggaattatgaatattattttcttcatgttcatttatactttctaaattttcaacaatgaaaatggttacttatacaattttttttttttaaaggactaaataaaggaaaccaaggaaatta

SEQ ID NO: 41477 - DNA, 1941 bp, Bovine  19866880778741
  misc_feature (1)..(1): n is a, c, g, or t
ntgttactggtttttagactgagtcatagttttcctcttcgactcaactgtctaatctagaaatacctgatttcttgtgtgtgagctggctgtgcagtatagatccatccttaagaagtctatataaagaagttaaagacacagactcaaagagaacagatttgtggttgccagaggcagtggtgggacagggacggaccgagagtttggcattggtgggtggtttaggcgcgtccaactctgcaaccctatggactggagcccaccaggctcctctgtccatgggatttcccaggcaaggatactgcagtgggtagccatttccttctccaggggatcttcccctcccagggattgaatctgggtctcctgcattacaggtggattctctactgatggagccaccaggcaagtttgggactagcagatacaaacaattatgtgtgtgtgtgtgtacatgcaaatagggataatggataaacaacaaagtcttgctgtatagcacaggaaatcatattcaatataatagaccacaatggaaaggaatataaaaaaacacatttatacacacatataactgaatcacttttttttttcatacaccagaaattaacacaacgtggtaaatcaactacacttcaataaaaattttttaacaagttaaccttccaggttctaacctcaaggccacaaaaggctccggtagcccccatatattcctacttctgaagagagcttctgcgccacccgagacccctgtgcctctcatggcgacagctcgcacagccttcagtaacttccactagcgtgggcatcccgacagctctctaagcctgctctgcttgtccgtgcaaacagggcactgcctcttaatatgaacatcgcgagctctaagaaggttaaatagcacaaatggctctgctacatcctctatgggtctatatccctgccatctaatcattttaattccttttccattcattagaaaaggggaacgctcacagaagaggatccctgaattcatataagtctgagtaatagcccttaaaaaatgtataaaagatttcaattctcctcactttctcttctcagtcagattcaactaatggtacataatagagggagtcaacgtcttcctttaacacttacaatatgcaattttgcagctagagtaagaaagaagtagaaattttctgtctctggcatggctgggatttgtggtataatgtagctgagggataggaggtgagttctgtcctggatttccactgttttatcggcagtggcggtcagtctggatgagtccaaggctcaccaggagctctatgtggtcaatcagtgctggggcatgcgcaggtatgcccagcacagcaagtctgccactcgcttcccacccttggcacagtgctttagagaattcaggggctttaaaaaatgttttagccttatttttggccatgctgggtcttttttgctgcacatggactttctctggttgtggcgagcgggggctactactcttcattgttgcgcttgggcttctcactgcggtggccactcttgctggagagccccggctctggggtgcaagtttcagtaacaccagcacacaggcttagttgccccctagcatgtggaatcttcccgggccaggaatcgaacccacgtcccttgcactggcaggcagattcttaaccactggaccaccagggaagttcagagaactcaatgggctttagagcttgacctggcttagctgcttaccaggttgttgtttagtcgctaagtcgtgtccgattcttgcaaccctgtggactgtagcccgccaggctcctccgtccatggaattgcccaggcaagaatactggagtgggttgccatttcctcctccagaggatcttcttgactcagggatcgaactcacgtctcctacaccggcag

SEQ ID NO: 41478 - DNA, 709 bp, Bovine  19866880795291
  misc_feature (1)..(1): n is a, c, g, or t
naaataatcagaagcaaatgaacaagcctggaacaaggtggtaagaaagagcacattaagattcccatggtggtgccccaggatactatcaggagctttttctccagcaacttggagttacagtctgctcaagtctatggttgcccttttctacagaaaacaaagcaaagaccaccactcccagtctgatatttgaatcacacatatcatggcatcaaaaatatttcttatttgtgtttctattttgtgatccttcatttgaacaccttcagaagaatctaactttggggtaagaagatggaatagggaacagcctggttggtctggtgaaaactttgtgctgttaaaattctgacagctcaggggagacttccctggtggtccagtggctaagactccatgctcccaatgcagggggcccaggtttgatctctggtcaggaaatgaagatcccacatgctgcaactaaagatcctgcatgccaccacggaggtcaaaaatcctctgtgctgtaacgaagacctggtgcggctaaataaatattaaaaaaaaaaaaaaaaattctaacagctctcctattcagtctctccaccataaattgagtctaagaaaatatgataaaggcttgttatacagaggatccatcttttccaagaagtttctttcatatttctagctatataatggtcattcatttcattagctacta

SEQ ID NO: 41479 - DNA, 1244 bp, Bovine  19866880813821
  misc_feature (1)..(1): n is a, c, g, or t
nacatgactcctactcacatactcttttaactcaataatttgtcaatttcacacacaatacatagatactgttttgattcctttctatctttgcacattgtctctactctgaatgccttagtgatacacaggagcatacattataaatagacacacccactatgcattctctacaatttgcctacatttaattatcttcaatatatatacgtttgtgagatctatccataaattttaaccactagatgcattccaaggaatcacgcatatcaaatctctaacagattattttctcaaaaatgattttttgtccaccaagtatttattaaggggtgatctcctctagagttaccaggtcagcaagtacttgattattttctcattttttaccagtttaaagatttctgtctgttcctttttttttaaataagtacaaatatacttaggcttcaattaaattgtaaaacccactgtgcttagttttaattctgtacacattgcaaaccccacaatcccatacattccaaagctttggtgctgtttaaataatctactgtgcacacaaaacacattacacacatattacaacacagtcgcagggctttcttccaccaaatctgtaagaacatttcattttcaaaaagtgccttttgccatagggtttttttaaaaatcattttgtagtgaaaaattaaatactgatttctttgatgtgctagtttcactgaaagaatatgttacaagagaatgcttactatttttagaaccatatttcactgaaaatcttcctggaaaaaaaaaaatgttccttggtttttattgtatgcctgggcaaagggggatttttttttttttttttaaagacttgcagtccaggcaatcacacagcaaacaaagggcaggtgtcattttttattgtgattggcattgggctaaagctgaaatcaggactttctccatctctcaaaagctattgtggaatttacagtaatcaccccagctgcctgcccaccacacagctgaatggcacaccaaaaaaatatttatctagagagaaggccacaacatattttttaaattctcattgtttttattcttcaacttggaaatatttattttttgagaaaaaaaataataaaactcacccagctgttaccactattcatattccaataaccaccaaagtgctggaggccacctggttgacttttgccttggagtcggtccaaaaaagcattatttac

SEQ ID NO: 41480 - DNA, 767 bp, Bovine  19866880832117
  misc_feature (1)..(1): n is a, c, g, or t
ntctataaagggatctagattttaaccatcaaaatgtctcacagcattgacagcaatgcttcatttcttttagttcctccaaaaggcgttaggcatgagcccctcaaataactcgtgagatgagatctgaaggtacatcaagtggagaagctcagggaactggcccagaggggacttgtgatgggagctctcctgtgatgtacaaattgtgctgctaaactgctgtgcttggttttataggagaggcagaaagggggtccccagatcagctctcagtgtgtaaggtcatcttcactgtaggggagacgtagttggcacagggtagccatcctgataagcaggcagtggggcttggattcacgtgtgggtcacacactaacagatcctgtgctggcagcaccgccaggatgtcagcagccccggaggacagaaggtggtgtttctggttcactcagctctcagctttcccctgccctgatacctcgacttcctgtagctcttgttcatggtggaaggcagaaaggagacttgaactccaggtcagccttgtagccagctaccagcggaatgagatagcttgtgaaggaagagaagtaggcaggaaggagcactagtacagaaggggtgaggggaacagtaacccaactttacctcccagccctcccactcaggtggccccgaccagcctgtgtatcttggcagccttctctctcactgtcctctttgtgttggtgatggtgatacggtgagtggagatacagtagaag

SEQ ID NO: 41481 - DNA, 874 bp, Bovine  19866880839681
  misc_feature (1)..(1): n is a, c, g, or t
natttttgaggattaattggattataaagctttaggcattttaaagatagtgatatgtcacattaataggcccctctactaagaaattaatcttcagtgggcacccaataaaaatacattatttgattagaggtcaaaaagattactttttgttataggaactttgacctttatttccttattgctgaatacctaaatactgatggcactatttctttccttcaccttctattctttctattgattctagttaaatatagatcccagtttaatccaataggaaatccctctggataataaactcagtaaccagttttgaaacaattggtcaagtctttatacatattttatttatactatcagtttttgataaaggctcatgtttgtattgtcctttggtgtttacagtgagctcttccatcttttcatgctcattcagttgtcacttaaagaataaaatagctgtgtccattcctgctgagggcagcaatacaagctatgtggtttggggaaaggggtcgttaagttaggttttctccagggacataattttattggagacaagaagacgatgtgttttctactgtttggaagttcacatagcagaaaatgcagccctgagttttataatagaaatcatgcacattcctaacaagctttacaaccaaccctgtaacgattgaatctgatggcacctgaacctgacccagtgtaactttctgaggaagagaagaaagttaaaacttcagaggaaaaaacagagcgctgggggtgaaggacttgaactgggctgcaagctggaaattggaatgaactgaattgatttattgaaacatgaatcatctctgaacaatagtttttatccaagttaagc

SEQ ID NO: 41482 - DNA, 2552 bp, Bovine  19866880872632
  misc_feature (1)..(1): n is a, c, g, or t
nctttctacttaatacttactataaaaattcttttactaaatatcatctcctttggtttttgcacttgctattctttcatgtgaataaaccagagactaaactttgaaaagaggttttgcttaaaatttctaaacagcttcaacggttactcaaagatccattcaactaatttactttgcattgtgggctttcagagtcattgacttagaaacgaatgtgttttaagggcctacttgaagctttctgtctcctaaacatcttccatcccttccaggtcaagtgtgtggccttctctgattgattgcagggggatcaagcacttatgtctttcagatgattgacaagttattgattgtgtctactggcaaagaattaagctctaaaatgtttccaaaagaatatatatttttagatactttcagttaaaaaaaaagaatgtttatgtttgttatgagccagtagtggttaaagaattatttattctgagattgtatatttaagagaagtggggctgttggttccccgtaatgtgcttactaatatcctccagtatggtggcattgtgggagggaatggatgcagaagtgttattccccaatttttgccttctagctagcagcatgggcttgaacatcccttaatctctctaaatgtcagtgttatcatctacaaaatgaatggatttttcacatgccttttttgggtatatgatgtaatgtttttatgctgttgccaccaagttgcttcagtcgtgtccgactctgtgcgaccccatagacggcagcccaccaggctcccccgtccctgggattctccgggcaagaacactggagtgggttgccatttccttctccaatgcatgaacgtgaaaagtgaaagtgaagttgttcagtcgtgtccgactcttcatgaccctatggacttcagtctaccaggctcctccgtccatgggattttccaggcaagagtactggagtgggctgccattgccttctcctaatgtttttatatacctgtttaattaatgaagaaccctatctctctatttggatcacatttttaactaaagaaagatgcttttaatcaacagttgtcaataacagatgtgttgacaactggagacatcttgtccatatagctgctcattcagccaacattttacaacacttggagtttcagagagttcttagacttcttcaaacccatccatatactcatagttaagaattcctgctctagtaaaagtatgatgatttaaggaatattgcaactacttgagggaaaagaattcatgtatgttggagctgggagataatcataaatctgaaaactgtcccttcaaagggaaggttgttttgcttcatttttaaagggaagaagataatggattttgttgttgtttatttttacaatggtttacatattctgatttctaactctagtagttttttttttttttttcaaggaatatttatttatttattagtctgcacagaattttagttgtggcatttgggatctaattctctgaccagggaagtgtgagaatgggcaggctttcctggtggctcagaccataaagaatctgcctacagtgcaggagaccctggtgtgatctctgtttctggaagatcctctggaggagggaatggcttcccactccagtattctttcctagagaatcacatggacagaggaccctggtaggctacagtccatggggtctcaaagatttggacacagctgagcaactaagcacctgagaatgtgcaactctcagtttgcctcctcttcttataattcttcaccatatttgctttggccagctcacccttgagtgttatataggtggttaaaaaaattgacttgtctacccagtgcttctgaaattcatgaatattctccccgctaccaccctaccccaaatgacttttctcttggttttgccaccagctggtaaaacaaaagctagaacttcaaatgtgtgatctacgataatttgttacatatttcattatcaccttgggcagagaaagtgacaccagaaaaattaggtgtggaaatgactggaagtaagttttttgtaaccaattttaagtgagcattcagatgtactttggtaaaaagtaaattttgccttttctttgagtgaaaaaatgttaatgcagtaaaaatgtctcagatctttgatctgatgcctttagaataccttttaattagattatagttgtaaaaattactggagaaaaaggctagttgttatgaagtcagtaggagtggtgttagtcactaagttgtgtccaactctttgtgaccccgtggactgtagcccaccaggctcttctgtccgtgaaattctccaggcaggaatactggagtgggtagccataccctcctccaggggatcttcctgacccagagatcaaacccaggtctcctccattgcaggcagactctttaccatttgagccaccaaggaagcccatatgaagtcagtgaaagtgaaagtcacatccaactctttgcgaccccaggactgtagccttccagg

SEQ ID NO: 41483 - DNA, 1258 bp, Bovine  19866880882185
  misc_feature (1)..(1): n is a, c, g, or t
ngaaattctagcactgatctttccccctcattttcttcctctctctgatagtcatacatttgaagacttctactactaagttcccccaaccccagcccctgcagcagtatcattatcagtaatatagttggaatttgggagcaagagtgtagaattttttgctgcttatatttatgcttgcattgtcccttgtttcttcaaaggaatttagcgctctgcttatgtgaagtgctttaaatgttatgagacgaaaccctgactgccaccccaggaaagtgaactgaagcttgatggaatttactaaagggtgttttgtaaagcagtggttaggaaagaacgctgctctcccagagatcccacggctgtagcatgagaacttggagagctgctaaaatgattaaaggtttacagaatgagccctgtgaggaaagcctggaaattgctgggagaagtctgagggattcgtacttaattatatagtcttctggtgctgtgtacttattcaattatgcattctacaaatatttatttaccacctgtagcgggtgaggcactgtaggggtcctcaggagttccaggtgtgaaccaggcacggatcgtgacccaaaggaacttgaatttagaggaaagataaaccacaggagtactattagagaggcacagatgataggcaaagaagttcaaaataaaagactattttacactgggcatcaggggggcgtgtcatagaatcagtagcgtagagctgggctttaaaaacaatgagatataccatatgatgggtgagtcagaattagcagaaatagggtatattagttcattggagtgcagggtttctccaaagtaacggatgaacacacagtctggaagggctggccctgtaatgtgcagtgcattcaattattttttttttccccctcaacacagcccctggttatcatcacttttctaaaagggagaaaagagagagtcagaataccagcatatttcttgtactgctttacgacgctgggctcatcccaggtaaacagaactaccacgtttcatctgtcttaaacgctcttgtaatagtctagaggcatctttcattttacgacatcctgtagttgggagttctcagcattggtgatactgactcattgagctgctgattcctgcttgggggggggctctcctgtgtatggtaggatgattagcaacatccctgcctgcacctacgaaaggccaggagcgccccctctgttgtgacaaccgaaaa

SEQ ID NO: 41484 - DNA, 1059 bp, Bovine  19866880903246
  misc_feature (1)..(1): n is a, c, g, or t
nactatagaaagtgtataattatccctggttcttaaatacacttcaaaatgttatgaaaacattatcacctagaaatatgttacttgggtcttttctaaaggaaatgtctgtttctaaatggaccaggctcatgtgctatgaaaaaagggctgtgaagataggtaacaaaacctggataactaggagaattatgaatgaagtctcttctccttagtgtgagagataacagaatcctatccaactgaccactcagtcaaatcacaacatcacccagttttttgctgatgtgcacagcagggtggtctgagacgtccagcttctgtattttactgaagatctgagatctgattggctgaatgactggctgtaaagcagtgggtcacacgggcagaatttctgaagtatggttataattcagttgcaaaagcattacgcacattgccaccatttggcagagatgaatcagatgcccgctgtgtaccaggcacctgctaggatctgcaaattaaaagttaagtaaaataaaattgtgactgtcaagcaatgcaatgtttatcgaagatgaaatgcttgagtcaagtcattgttggaagggcttgagatggattttgaaaagagtacaaacaaatgaatagattggccaatcatccttacaactttactccaaactgaacaatttttattgggaaatgtaacggaatattttcggacctttttctcagaaatagcatggcatttgggaatgttattttcaatggagatgactaaccagtataatcggagaaggcaatggcaccccacaccagtactcttgcctggaaaatcccacgggcagaggagcctggtaggctgcagtccatggggtcgctaggagtcaaacatgactgagtgacttcactttcactttccactttcatgcactggagaaggaaatggcaacccactccagtgttcttgcctggagaatcccagggacagaggagcctagtgggctgccatctatggggtcgaacagagtcggacagactaaacgacttagcagcagcagcagcagcaac

SEQ ID NO: 41485 - DNA, 1036 bp, Bovine  19866880953186
  misc_feature (1)..(1): n is a, c, g, or t
natttaaataataatgaatttgtcacagaagtacattaagagccctatatgcaaataaggggcttccctgggggcccagtggtaaagaatctgctaggcattgcaggagatgcgggtttgatccctgggtcaggaagatccccttgaaaaggatatggcaacctgatccaggattcttgcctggagaatcccatggacagaggaggctggtgggctgcagtccaatggggtgctaaagaagccggacatgacttagtaactaaggaacaacagcaacaacattcaaataaatctctccactgacttcaggtgaatccactgttttctaaatcaatacctgttgcttagaatgatcaaaggcaaacttttgttagttcctccccatgcagatcatctcagagtaaaattattatggagaaattagggattcataaggcaagacagagagggttttttgctattgttcttgttattgggatttttattaaccacaagctcatacgactgcatttattgagagtgcctaactgccttgaaatgaaacatcacatgattctaacaagtgtgctctgtctagctcacccaaattaggaaggcttccctgtattcattttgtctctttcacaagcatccttgaggttctttattctgaattacttatgactgtgtttcaggtattaagagcacacttgaaatttacaatttttctaaattcctaacacttattagctttgttttctgcctagacctgttaacctaattttgtcttcaacacttcgggggataatacactgcttgtttttaaattctgcatagctctttctacattcagaaccccaaattcaagctttagtttactcagtatgaatttgatgatcctctgctgctgctgctaagtcgcttcagtcgtgtccgactctgtgcgaccccatagacagcagcccgccaggctcccccgtccctgggattctccaggcaagaacactggagtgggttgccatttccttctccaacgcataaagtaaaaataaaggga

SEQ ID NO: 41486 - DNA, 1365 bp, Bovine  19866880994049
  misc_feature (1)..(1): n is a, c, g, or t
nccagctcaatgcttctggatattgtgtctcataccacaggatcttttataatttaacttgacatcttattaatttccagtgaaatagttcgatgcagttgtcctgattcacagaaatgatgccgagaactacgcagaaaaataaagtagctattatcgcagtcaccatgattacttccacatggttcctgtatatcctgagccgcttcatcctgggaataaaaacaaatcacaggaacagttacaaaacagtgtttctttggctctcgataatagcgttgtcagattcctccctagtacttcagaatctccagtgaatgtctcacttatattctgcaagcgagtccttttgatcactgctgatcaccagcaagttcattctgctcccaccccagggagggcttccagtggctgtgcctccacatgcggtccctatgggctgcttagagttgtgatttctacccatgcccattcgagggtgacagagcctcacatctcgggcgcttagctgcagctcaggagtgagagcgatcttctgtacactgatacatgctgctgggtaaatgctactcacatgttgcatttctagtacaccactgaggtttcagatcaactgcttcttctttgttggcactgcattcattgtcatttctctaccgaggactcttgctcacctgctccaacagtccctctgtattcagaggggatactttgttattctcagcatcagttctttctacgagtagcattgtcccttgtcttagaagatccttcttgatccttttccttccattcttagcttaggaggctccttggttcctcttgtctacgtggacaagtccacggatgatccctccacatgccaggggacacctgacttcagggacacatggggcttcaatttgggacataaataagtacatgcctgggaccaccccagccaaaaggggggacaccttagtgcttatcacaattagatcttaaaaatattacttcccaaacatgtaagattatgagtgaccagaataatagacaagtgttacgggaggtgttatggcaccactgactcaatggacatgaatttgagcaaactctgtgggttagtgaaggacagggaagcttggcatgctgctgtccgtggggttgcaaagagtcaaacatgacttagtgactcaacaaagcagtgttatgggaagtgatgacgtactttgaaggagaaagcttgtcatgaaggcacttctctgccctctctatcattctggtctgggatgtgtatttttcttgaagaaaggtttatagagttgagaacctatgaagttctttttttttaagtgaaactttttttaatgaaaaaagtgaaagtgc

SEQ ID NO: 41487 - DNA, 1137 bp, Bovine  19866881099330
  misc_feature (1)..(1): n is a, c, g, or t
natgttattgcaatatattttatgactctattagtacatgttataaaatatgtacttatgaacaattactaccacaatttgatatacccaatccgttgatgtaggaatttggagcaacagtgtcatttttagtgaagaaattgagatgaataaaaaggtgaaattcaagattctatagcatgtgtgaaatgaaatgatccattttaaagactggatataactacactaccatagatatacttccatttaggacaaactattccacttataactgttaggaatacattaaaactagaaaattaaagtcagacaaaaatctcttaacaaaatgtcaactgtttcatccacaaagaacagcatgaagcttttttttaagcctcttcttttttgactaatggtttaaaacccatgctaattttcaataaatgcaagggatgattgcagtcagcagtttaaaaatgagaaaatgaatgatttaggaggcagactgtattaaaaaaacatctagtccctgttgaaattatcaaagccaacacagatatgggcgggggagggaatgaaaaggacaataaaagttggtgcagaacagacatactgggaaaattttatagggagaaaaagataaatcaattaaagcaggaaccacactgtttattgtgataaatcatattaatagaattcttctgaacaagatattcaattgaaggaaattttatttatttatataaataaatcagggttttaattgactgcctttgcttctggatgcaaaaagacaatgctgcacattcatggctgggtctgtatcaccgcagacacacgctttggcagggaactctgtgtgcaaccagagccctgtttatgaacatgcccacagcaggttccgaagaatacaacatttccaaagaggagggaagcatggaaatcacagctttgctcagaatgacattctaattactctcaattaacataaagagggtgcagctttataaagactagtgaaagcagctccatattttcttgagtgccagtgagggagtgggtcctggggaaggcactaaagaccgtggatggaataaagtgcttctgcttagattgtctttgctgtttaccttccggctttgcggctcccactct

SEQ ID NO: 41488 - DNA, 672 bp, Bovine  19866881164518
  misc_feature (1)..(1): n is a, c, g, or t
ngagggagaagttttgaggagctgtaggtagtagggtaatcccgtgtagagatgctccttgacatatgtctacacggccttttcgtgatggaggaggggaggcaagaccggagttggatagctttaccacctgggtgcttggctggcaggacggtcttgatttctgtttgaagggtcttgaatcctgtggctgaaacacctgtgtgcttgccctattgattttggctcatttcttcaattgaacaagatcctcctggaatttcaatattgttgtccaaggcattagtaatctctcccagagctgcatttcctgtggattgattagtgccttagtcgtaagatcctcaggctattaatagaaaatatacagcaggattgcacccaggatggctcctcaccaagagcattcaacagcggcttccattttgacaccaaactagtaataatttgtgggtgttcaatatatttcctgacttgttacccatattgtagtcttctcatactgtctaatccatatgcatggaattcctcagagaatgcactgcagaaccattttttaaatgctttaggaaaatcaaatatgtacattacaccctctgtgaatttaacggcagacaccttcagtttgccttaattatggtcaatgcgcagaaggtgaacactgcgtgatac

SEQ ID NO: 41489 - DNA, 1467 bp, Bovine  19866881179014
  misc_feature (1)..(1): n is a, c, g, or t
nacaccctctcaccagatttctttgccccagcctttccccactcccatcagttctctgcaggacttaacacaagtgctctctggaactacagatctacattccacatgtaagtgatatcacatgaaacttatctttgtctgtctgacttacttcacttagtatgacaatttctaggggagggataaattgagagattggcattgacatatacacactaccatttataaaacagataactaataaggacctactgcatagcacagcggagaaggcaatggcaccccactccagtactcttgcctggaaaatcccatggatggaggagcctggtaggctagcagtccatggggttgctaggagtcagacacgactgagcaacttcacttttacttttcactctcatgcattggagaaggacatggcaacccactccagtgttcttgcctggagaatcccagggacgggagccttggtgggcttgctgtctatggggtcgcacagagtcggacacgactgaagcgactcagcagcagcagcagcagtgtagtacagggagctctacgtaatactctttagtggtctacatgggaaaagaacctaaaaaagagtggatgtatgtggttgtaaaactgattcactttcctatacacctgaaaagcgtacagtattgtaaatccagcatacaccaataaaaatgacaaaataaccccacaaacacacacacacaaaaacaagtaaaaaactagagctctaatcataggactccccagcttaccactcttcagccatatcctatagcgtcctttatttgttagtgtcattgctactcatcatgctgatttgtatttgtttatccctgcctctctatttctcccactaggctctcatataggagagtgaggtctatgtattgtaatcccagtattcatcaccacatctggcttgataaatccaagttaaaagagagatgcttcaggagatgaaaggatttaacaaatgcctcttcatatctgggcatattgaagaggataaaggtgttcctgggaggattaaacaacccaacaaggaagctagacaaaaaatattcagaggaagcagagtggaattaaaatgagtgcaggcatccatgagtgagagaggaagaggacagctcatgtccccatgagctgtgaagctaagctcttctcagagtggcagggaacaggggtgtggagagtgaactcagagcttcagaaggaactgcaaggtaggaactgaggatgaactccgatacctgtgagatttaagccatgataaggcaggtggcacttccacagctaatggggagttgtgattctgaacacgtatttgaaacacaacaaatgtcacactaagaaacctgaggtaagagatatatgtccactttaagtcaataacagggcttccctggaggctcggatgatgaagaaaccacctgccaatgcggg

SEQ ID NO: 41490 - DNA, 720 bp, Bovine  19866881221263
  misc_feature (1)..(1): n is a, c, g, or t
nacacacacaaccctgtccctatctgaaaaacctctcccgtgggcccttgttctctcctatcagatggacacatgtattacattttaaatagaactcgctctgccatacgaagtactagccttgaagatctgcagtccatgttgtaattttgaagaaggaaattggtgaaatgacaggagaaatatggcaattcacacacaaaattctttctcagtttcgttctctcttctccttatttgtatccctggcagtaacctcattaggtcaagggcttcaggcatttcatacagaattggtggatgttttcggcgacagtggtacatgttttagcatctggacagtgattttccctcctgtttgtggtgaggggagcagtagtttccatatgtctgtaatttttaaattgaaaagttaacattacacggtgaattttgcccaagggaagcctttcaagcaggagactgaagtttgtttcatttttcccatcagtcaggaaactcctccgacagtcaccagcagctcttagagaccacgcaatggagttaacctcagtggtgagactgatctgggaggatgctgttctttcatttgtcttcaggttatctcaggcgggcttcctaggtggtgcagtggtaaagagtctgcctacctatgcaggagacgtgagttccatccctgggttgggacgatctgctggaggaggaagtggcaactcagct

SEQ ID NO: 41491 - DNA, 1700 bp, Bovine  19866881235275
  misc_feature (1)..(1): n is a, c, g, or t
naaaaagcccaatgaacattgtgtttggtcgcccagtatatcaaatctcatgtttatacaaatgtcatacaaatttatttgtcagttatactttgatcagcctgggggtggggggacttatttgtcatgactgcaaaaggaaacttgggctgcggatagcaggattttgcttaacattcgtggcccaatcagattcaacattactgcctgaacagtctctaaaatttgacttgtagtcaagtttttttggcctaccaaaaaaaaaaaaaaaaaaaatgacagcatcccctgaagccacaggcttgttggtggtaggtattttgtttcattgctccctgaccctattctaagaaacctaattcgcccaagggagtctcacacaggaaaggagtgtttgcatctgtttagggaaatgtacccaaaatgacttaaaataatgacttacttagaacgcggaatccaatggaatggaatggattgataagccagtttgagcaagctgagagccacccaggcctcgcagttataaaaggagccctgcagcaatgcattttgcccagaccatctgccaagccccatccccattcaaggaacgttctctctctcagctctgttcaaaactccgacttttccaaacgcctcaaggcacgagatctcctcttaagttgcacttagactgctaagatggtgcggatttctcggttcagccctgcagaccccagggtagaaattgctctccgaggtatgttacccattttaaacttcctcgagcccttctggtgaccgcagcaagctgggtggtgggggtagtgctctgcccagaaggtaaagcctgctctaggtggccaggagaggtggtgggtgtgaacaaagcctgtctttcctccagggagagccgggctcagcttctttctcacttattgaacttaaaatgaactgggcaggcagaagtaaggggctgacatctcatctagcagaatgaaggatgaattgaggcaaagaaaaaagaaggaaagaaaacactgccctgccaggttcttttgtgctgcttcatttcccgtttctgtggctttgtctttttctctcttcacttgtctgccaaggaaatatagttgatttgtttatataaccctagcctcaaggttggcagcagctctgaagggttagctgctgctgctgctgctgctaagtcgcttcagtcgtgtccgactctgtgcgacccctgagacggcagcctaccaggctcccccgtccctgggattctccaggcaagaacactggagtaccgggttgccatttccttctccaatgcttgaaagtgaagggtcagaggtgacaacaaaagcttcctaaaatatattttgaaaatctgcagctagattaatttctttccttcttaatctttctccgtatttaatatatatatatataaaaaaaaaaaagctcaacctttgaccatgatttagttagcaagtttgaactgaaacttctgttcttgcagggtggtaatgacagtttacgtttttttaaaaatttagatccatctttgcacaattagcaaattattatatgacctttccttcagagtctgcaagcacttgcttgtttccgctaataagagaacatgttttacaaggttcacgttgattaattgacaaatgcgataaaatcaaagcagggctaaaatgcagcgcaccagc

SEQ ID NO: 41492 - DNA, 948 bp, Bovine  19866881265548
  misc_feature (1)..(1): n is a, c, g, or t
ntgctttagcatctccaaaacgagactttgtttatcagaggacttacgtaccttctctcgatggagcgccatctgaatgcagggaggcgagcagagcagtgagaagacacacgttctctcccctgggagccttcgtggatacacttaaaatgttgaaccttcgggaacatttgctccttgtctctagtttgcatcccttcttattctcttgtcatgttgcttgaacttgtgtccagtgatgcgtttctttctgtttcgtgtcacagctgtttcccgggtctgtcgtcctcattattctgtggtttccttcaggttggaggtgggtcttctttgcatctgtatctcagcctgaatccaggtgtctggagaatggttggtgcttcagaaatatgtgttgagtgagacaagatttgacagtgtctcagatgctttgtgtcgtgtccctccgacttggagagcatttttattttcttagtgtccaaagctcagtccttggaacaggaacgacttgttttgtatctgtccaaggaggtgttgcacttctgggttagaaccacatcaacgacccaggaatatgcttataaagcatgcagatgcatctgcagtggctgtcagctcagcagaagaaattaattagttgaaattatcctttgtggcaccaaaggaaaaccagcctctctctccctagtaaacacgctttgctgcttgtagaataaaaatcccgagtgcagcggaacgcgagcacccccttctgccacctggggtcgtggtcctgcgtggtggtgcctcatcgactcccctcctgcctccctcctgctctgttttcttccctcccctgtccttgcctctgtaacagcaggctctgtgctagtctcttcctggcctctttttttgccttccctgacagttcttggcttcatgatgtactgttttgctcttttacatttt

SEQ ID NO: 41493 - DNA, 1373 bp, Bovine  19866881322968
  misc_feature (1)..(1): n is a, c, g, or t
nttgtcctgctggatctttatgtcatagttaccctggcatatatccaacccaactaattgcccttttatcagccctttggatggatccacagttgcctcacttagaaatgggatcaccaggcctctctgtgccctgatgtcattcccctctggtgcatttgaatgtcctttgctaaatgggactttggtaaatggagaccagagacatgcttcacctgctcaccactgcctgtgtatctggtctcaaaagcatccttgcagaacaccatatactgtaaaaatcaacctaacatctaaaatgtgtacattcttcagtgccttatatatgcgttttgtttttccatttgaaaaacaaatatgttctcaatatctattacactaaggaggtattagtaaattgagatttgtttgctaatgacttgaatgtccaaggcagggccttgcatatggcagtgggaaacagatgtgctgatatgaatgaaatgatgatgctgatcgattttcatcattattattagtcttatggtgggtaacgtttaggatacttgccaaattatagaactgtttccttatcagctttgtcccagttttataccttgtcacctgaaacagaattccttttttttaaagacatgtcaaaatttatttgacaagtgttatattgatagatgttttggagcagaatttctaaaatgtgaaaaaggtacatacatgaaggtggatgaagaaacaatttgttcaaccaaatggctaaacgcactgtgatcaaggctcgggatctaaaaatagtcatttttagagcagtcgcttcaatttacatcaaagtaacatctaaagttacattaagcccttggcagcattgccatctcttttgagggcctgccctacaaccctcacccttccccacccccaagctattagatgccaatatctgaccgtggactggcaagaagtttggtggctgtggggctgggtattgcagctcttggatttgcaagttgttatgtatttcagatctggaaacctctaggacaagtaatcacagaaactgcaaagaagatatcaactcctagcttttcatcctactataaaggaggatttgaacagaaaatgagtaggtgagaagtaagtcttattttgggttgcaagcctatctgccagcaaggccaagattagagcagttcacaggagaagcatgattttgaatcacccagataaaggtggatctccttacttagcaaccaaaattaatgaagcaaagacttactagaagcaaccaccaaacactgattgatgctcaaggaccactctgaaggagaaaaagggggacttcataaaaaatgtctttttaagttaatctaaaccatggcctt

SEQ ID NO: 41494 - DNA, 1300 bp, Bovine  19866881333095
  misc_feature (1)..(1): n is a, c, g, or t
naaccgttgaaatatcctggttgtgtgaaatataacccttgaccagccaaagccatttgtctgccttgcctgttgagagaagcacatttaaaattccacacctgggagtaacttcttggaaagaatatttcatgcaaatgaatacattctttggacttgcactgcaatttggattagaaaatatgagcttgttatgcctggacataaattttgttagaggccaccttgagaatgacagcatggattattccgggggtcttgtgtaggatccgtcacggagcaggttttggatgtatttgtctccacatcctgtgtgaggggtttgaagcttgaactgctgctgctgctggtttaatgctgtatgttgctagggtggaggccctgcaaggttcagaattttaaaataaagtgctggaatctgctgggaagaaatggagattggttattaattcccatcttgagggctttatggatagttactgggggggaaagaacttccaacaattaaagtcagagattaatattttgtacacgttttgtatttgggagaatgttatgttttccttgagaggtttgactttattttttaagctagcctgtgaaatatggctaaggaatattggagaaacttcaagaagtttctaagtaatgttgaagaaacttccagtcaagaccagggacactaatcctgccccagactttctttttcacaacttgccatttctgaaagcctgagcttggcaggcagctgagtgtggtttgagcaccttactagagaaagctttgggacagccttgctgtgaggtcatgggggcttcaggccctgggcagaacttggttatgagtctgttactgccatgtgcttggccatgcacactgcaaaaactttataaattgaaaaagagggaattctctggtggtccagtggttaggactccatacttccagtactggggcccaggtttgatccccggtcaggaaactaggatcctgcaagccactcaacatggccaaaggaaaaaaaagtaattggataaaaaaaatacatatatatatataattatagtgagtgaaaatcgctcggtcatgtccgactgtttgtgaccccatggactatacagtccatggaattctccaggccagaacactggagtgtgtacccattctccagaaaatagtagtattaaattaaaagttcatatcataaaattgtattaaattttatattatagtctgacctgcctcttgagcaacctatatgcaggtcaggaagcaacagttagaacggacaggaacaaca

SEQ ID NO: 41495 - DNA, 810 bp, Bovine  19866881380929
  misc_feature (1)..(1): n is a, c, g, or t
naccagagtccatccgtcctacaaccaaggcagagggcactgactcctggacttttgttcaaagacattgggctttatttccataagtaatggaagtcacagaactgtaatgtttcacatggaacttagagaaacttgaagacttgagggcatttctcttaaatcaccaggccaaaagcttcataaatatattttccaccataaaatataattgtgaggtacagtgtatagtctgttttatctgaaacacattgtttatttgtgtcgcaatctgagctctccatcactgaattagcataatagctttagcctattttcgtcctagggtattgtttagaaggaaaaattaatacggtctgtttctactaatcacaaattccattttgtgtttctttgatattctttctttgatgtgagggaaaagactaaatctcttttaaaggaaggaaaaaaaaagtgtcagtgagtctgttcagcatgtatgcaatctcaagaatttagtaagccacataagatggggaggctaatgttctgtatttggggccgctttgcttgtttgaggaatttgattacaattcgggtggctttctaggcatgtaaactattcttaccctatgactatagaatgttttgcaactcctctgtttgatgtactaggccgctgagagacaagttagataaacaccaagcagacttttctagaagcaggagccaagggaactaagccgtccccattgtcctctgtgttcttcttctgtagaacaatgttgttttccctagaggcttcagcggtcattgccgggggggaaa

SEQ ID NO: 41496 - DNA, 1108 bp, Bovine  19866881485418
  misc_feature (1)..(1): n is a, c, g, or t
natgagcaagacccaatcccatggagaaccagaaggccaggggctggaagggtcagaaggcagcctccttgcgtcacgtccagagtccctctgctgtgtcttcctccctctagagcactgtgcgccaggcaagataatgactgagagctaaatgaaggtactttaacttcctctcgacgctcgtttgagttcataatgaaacgaaatgcaccagcctccctcactctcaccacactctttgggcagaaacatctcatttgaaacagcttgggctccctgggctctttgcaagaattggtggggatgagttttgatgtttacaactgtgaaaaatcctctgctcacagcctgagggagagcaagtccatgcgtagagtggggaccaaatcaccgggctccaggcacactagaacctgaaaccagaagactctagatggcagtggggtctgctgagtgatcaggatggggaagtgggtatgactaaacaggggctgctgaaaatgaaggaagatactgcaaactaaagaagcactgcggtactacattctagccaaaatggattaaataatcaatgtaaatccttttccatttgagtgaaaatcccagtaagtcagctcaaaagatttctggatcagcagcttaccttcaaggtggttaaagacagtcttaatttgtatctgttgtgtcagggttatctctttcagcattggttcaggatttttttttttaacaaagtattattattattattgggcttacctcgtggctcagttggtaaagaatccgtctgcaatgcgggagacttgggttcgatccctgggttgggaagatcccctggagaagggaaaggctccagtattctggcctggagaactccatggactgtataggccatgcagtcgccaaaagattagtggtagtagtagtatcactataattattatttgcattaaagtcagccagggctcagtagacttgcagtgagatgctctgatgtgtccctcagaatccctgggtgtgctaagttgtttcagtcgtgtctgactctgtgcaaccctatggactatggcccaccaagttcctctgtccatgtgattctccaggcaag

SEQ ID NO: 41497 - DNA, 1476 bp, Bovine  19866881509500
  misc_feature (1)..(1): n is a, c, g, or t
nctgagtgccgaagaattgatgcttttgaactgtagtgttggagaagactcttgagagtcccttggactacaaggagatccaacccagtccattctaaaggagatcagtcctgggtgttctttggaaggactgatgctaaagttgaaactccaaaactgtggccacctcatgcgaagagttgactcattggaaaagactctgatgctgggagggattgggggcaggaggagaaggggacgacagaggatgagatggctgatggcatcactgacttgatggaagtgagtctgagtgaactccgggagttggtgatggacagggaggcctggtgtgctgtgtgattcatggggtcgcaaagagtcggacatgactgagtgactgaactgaactgactgactgactgatctcctacatatgtacgacacctatggcagttttagctcaggccagagtacacgtgtatacatatctgtccttttaaatcacactgccttatttcttttcttttcagcacatattctaattttccaaagtcaaagaaataggaacatttctctagtttctataaaaacacaggcgtagcatgatgtcagtctggttgcatgaaagcagttttggacgtttaacctggctattgcctggttggtggaaaattacagtactagtgttactaacaccatgcctcgttctccattttgcttttaaatggtcttttcaacgttttgttctgttactgacaatttaattttgaagcatcattgtttaaaaaacattcaaaatagaaattgaagcacatcattgtgcttgacactagatcaaatatggtgttgtgtctataaaagaaataaaatagatcctgttagcctggcggtacaatacgaacatttaaataaatgtgaaatagcatagtgataaagcaaatgtgaaattttttcaacagtggtaaagtagagaagatgttgatggaattctctattatttacaccattatgctaaatgaaccgtaggctatttccttttttaaacctcagttagcttagatgtaattttatactttaaaaaatttaaggacagatacaggtatggttgagagttctctgaactacttggttagatgtcagatagactctcttgtgcctcctacttcctgtatttgcagttagatggttacttttttctgtttgggtcattcacatacatgaagggttgggggagcttgttgttattgttgtttagtcgctaagttgtgtctgactctttgtgaccccatggactgtagcctgccaggctcctctgtccatgggatttcccaggcaagaataatggagtggcttgccctcgccgtctccaaaggattttccagacccaggggtcaaacccctgtctcctgcttggcaggcagattctttactactgagccacctaggaagagctatctaaattcatgtcgaaaaaaaattccattgactttttag

SEQ ID NO: 41498 - DNA, 732 bp, Bovine  19866882113215
  misc_feature (1)..(1): n is a, c, g, or t
nagactggtgagctggactgttagcttgagtgctaagcatgaaagtgttcaggactagaagttagaaggtgtatgatgcttaaatatttttagtgtgacagtttggggccagtatttttatatgtaagggagctcctgtttgtcatttataacgattctgaatttgaaattcacctcagttttcctcttgctctttacgttagaaataattcatcgtgaagaattatgaaaactgacttcattttatttaaggcgcagtgacgctgtctgtgctccatatgtattctgatggcactgtgtcagagagcagggggcataccctttaacgttatttttattatcactgatttattatcatattatttactaatattgaccaatattagtgaaatgcttttagagctgagtagtatatagttgcctttttaacttatttttatgaaaatgtatggtttgataaaactttgaaggcacccttggattgcttcacctccttcagaaagataacttccttcatagaagaatgttctttccttaaaaacaaacagaaaaaattacgtcttggagaaggactgttattttatttacctaaccatccacttcagaaaattctctggtcagatatttggcatttgaaaggtaatgtctgaccagtgaaatgtttgagtgtgttttaaattactcctgatcataagtttatttttctcagagattatcctgactgttaggtat

SEQ ID NO: 41499 - DNA, 910 bp, Bovine  19866880447753
  misc_feature (1)..(1): n is a, c, g, or t
nctctgaggaccaaatgagataatggatgtggaagtactctgaaagatatctaaagtgctccaggagtgtaaagaatgattattattattaaggatgagccaaggaaatactctgtcctaaagagcatcagtagcagacagagtttaggaggcgagttataaattctgactatctgggtcagcggtttgaattcctttttccaagggagactgtaaagctattattctgtgctcttttcctttggtgcctctttttactttcgaattatttaaatgactaaatcttttcccactttgcaaagcagaatgacagtccccagtatattttgctgccggagcacaaaataaatggggatgcagatccgtgtcattatgataaaacaccatcttttcatctttatctgagaatttcagactcctaaggaaagatgaccacctctcattatggaaaatgaatttgccagcaaagaaagatatctcttaacttgttctgggggcttcctgtttccaaaagcatcaaggaaaattagccctgtttactattcttggtttattaaaaatggtttcccttttctcacccactccccacatgtctaaaaatgatcgtgggataacagaagagaatgtagacaggaaccagcaaggaaaatgaaaagagtatgtaacgtttgattaaccaagatatcttctgtaaaggaatagaatctgctttttgaaatgagtagcaaaaggtctggatatttctaacccctgtctggatacactttcttacacttcagaaataattaacactctcaaagcaaaggagatgctttcaactatgccttgaaataaaatgttctttttgtacaaaccgcggctgggggaatggtttgctgtcaccttcaagccctgcattgtgactgatgac

SEQ ID NO: 41500 - DNA, 2316 bp, Bovine  19866880539699
  misc_feature (1)..(1): n is a, c, g, or t
nacacaagagaacagaaaattaatatttagtgtttacttctactcagccatgaggggagatctagtgtaatctcttttcttcttccagtgaataacagtacctaataaagagtgagcatttaatacatatttctttttcttttgctgaaaatacccaggtctttcctggtggttcagacagtaaagactctgcctgcaacacgggagtcctgggtttgatccctgggttgggaagatcccctggagaaggaaatggttaccccctccagtattcttgcctggagaattccatggacagaggagtctggcaagctacaatccatggggtcacaaagaatctgacatgactgaatgacttacactttcacttcttttcatagactgggtggtttaagcaacagaaactacgttctcacggttctgaaactgggaagtataatatcagggtgccagcatagttgaattctggtaagagcccttttgctgacttgcagatggtctccttctctgtgttctcatctttgccatgttctcatctttgctgtattctcacagagtaagagctagctctctggtgtctcttcttaaaaggtcactaaccctatcatcccagggcctacccttctgacctcatttaagcttaaccatctccttatagtacatgtctccaaagacagtcacactgggggctagggcttcagcatgtaaaggactgtatttaggccatgacagcatgcacataatatgagttcagtaatattaatatcccctctcacaacttaacaactgaacaacaactctaggtaggtagatagataatctatggatataagagccatctctctgtctgtctctgtcgatcaatttcacttgggagaatcagaagaatatcagggaagagaaatcacagttagagcttgtaggttgaataggatgtcttagacaaacaaaggtatgccaagcagtgtgtgagtgtgctaagtgctcagtcatgtctgactctttgcaagcccattgtctgtagcctgccaggctcctccatcagtggaactttccaggcaagaatatactggagtgagttgccatttcctaggccaacagatctttcagactcagggattgaactcacgtgtcttatgtctcctgcaacggcaggcagattctttacctctgcaacacctgggaagtcctattccaagcagaggaaacagcaattcaagtcttttaaaagacatagcatattttaaaattagtgaaaatatcactggttttcagcaaaactttgggtttgcaagagaaaggttcatggtaggaaacgcaagagatattgtctgggggcatgtcattaacaatcaaggctaccaagctggggtctttggatttttccctttggttaaaggattcttgtgccttttatctctctctttttagataactggttggattcttgagggcaaggatcttaccaaatgttctttcgtaatccaagcctgagctgagaacactgccttaagaatgtaaaagggatgaatttctacataacctcagcatatgagagccatcgttatctctttcatttgttcaatgtgagttaaaggcagctagaagctctttcctccaggttggcatggaatctaacgttactctcttggattgtggtcagcatgggaacagctctacttctccttcatctgtgcacgctgcctctcgtctatggcagtgtctccctggcttacattgctatgtttgctggcttatctcccagcacagcaagctccgctccattccttaaatgctctgttccaccctcagtggtgaccttggctgcaatccttagcccccatggcccctacaggcacgcagaattattattttctaaagccatgctctccacctctaggtgctgctctgctactggcttggctgaatgttccttccaccttcaaatttctttctatttctttcttcaaatttctttctctccttgagtcttttgatatttttgtcagtaattttcaaaacacaaagcttttatttatctccttcactggggcactctgaattaacagcattgacaggtctgacctctgaaacccaaatgcctgtttaaaataaaagcctgattattatataatgaactatattcagtttactaaatagttaacttaaacatcaatatatgtatatatttttgctgaatagatgtataatttatgctaatgataattacaaataatacaaagacataataactccactgcagcttctggtattcattaccaatgcttcatttggcttctgctccacatccataca

SEQ ID NO: 41501 - DNA, 1183 bp, Bovine  19866880544298
  misc_feature (1)..(1): n is a, c, g, or t
nctccaaacaagtccatgcttttgacctgttatgttgcctcattgatagttgaatatgaaaacaaaatatgtaacttaaattaggctaataccgtttcctgctggaacatttctaggatcttaaaaaaatttttttttgtttttattatttttttaatgagaatgtttcctagttaatatgttagattttcagaggtggagagaacctaagagatcaactggcccagctcccttctttttttcagatgttaaaacagtagccatgagaaagcacttattcttaactcactgtcaggtaacatatcctggcctcctgctgtgcagtctcaaactttctaggtcaccctttgaactctccagcatgttcaccaggctgtcgcctacagtcaaccttgtttcacatcactaaattggcagactcaatgttaatttttaaaataaatggtgaaaattaggtctttacaataagttaaaattctcccaattgcacacaaaataataaaatagacaaattgcctgtctttggcttcagtttggaataatatctgagagtgggtttgatggtcttctctaagaaggaaatggcaacccactccagtatgcttgcctgggaaatctcatggacagaagagcccggcaggctaaagtccatgaagtcgcaaaagagtcggacacaacttaaaaattaaacaacaagacccttctaatcctctgccactaggcttacttttaatgtcagtctaatcataatgcattgtctttgggtgctcatttatctgtctctctcagattctgagctcctcaaaaacaagggccaaagttatatccctattacctagctcagattttgttggaattgatgaagacctatgaagatttactgatttagtgatgtgaggttggacctaggagatatggccaagggagaccagtagggtggctctcctggactgtgttatgtggaacttactgaagtcatcttcactgcatatttcccttttccacaaagctctttccttaaaaagctgttagaaaatgcctatgagtgaaactttggcacttttttccctaagcctgaaaatattaggagaatccaggtggtcaaattcagtgtaatcagtgtttctcaaggaacattgatgagtagatgaatgcagactgattatacagtaaatatttaatt

SEQ ID NO: 41502 - DNA, 1378 bp, Bovine  19866880569961
  misc_feature (1)..(1): n is a, c, g, or t
ntggggttttgttggttccggcagtcctcccctgtgtgtcctcgggagcttggctgctttcaggtatctttagggaacagcagcatctggtggctgcctgaacagtaacctggctgcaggcttcagggggaacacatcgcagcatctgtgtttctccagcagaacagcagggctgttaaaatagctcttaggcacaatctatcactgcactgtctcccttgtttgcacaggctgcaactggagacatgagagtgtggaggttctgatgtgctagtggagcactagaataggaatcaggagacttggctttgccaaccactggatgactttggccacatcacttagactctgggcctcgtttcctgatcttaaatgtccagaggctttctttggtttttagtgacagttgctgcttggggaatataggtggcattcaacacggcaggcttctttgttatgagactagaaaatttgtttcatctctctgtgacttagtttcctcatctgaacataggaagggtgattgcatcataaaaaatgttcttaaaaattaattgggatgctgattagagagtcctagacatgatttgtgaaatgtaatgagcactcaacaaatgtcagatgcctttctacccttaagtcatattactgcttaatatctgtgctgtagtatagggctactcctgtttagtctgagcatagaatctgaaatcacgttagcagtcattacgatcaagtgtgatgtgtatattcccactctacactctagcatgttaatttctcacagatgcttctgtacatattgatccatttgccaaagaacacacctcctttactcatcctacaaggttaagcacaaatgattctccctcatgaaactatgagccttctctaaggagatgtgatggctcatttagtgaaaatgaacccagaccctgtaagtttaacaaagaacggagacaatagacttgataaggaatgcgtggattattccctccactcaggacatgtattatcctatactcctctgtcagccatgtgagaggggatgggagtgggcctcagcccaggaagatgcgcttgtctatctttttgtttcttctgcttccctgtgtgtactccctttttatgaataatttagtgtctggtacatagtaggtataatgagtgtgatgaatgtttggagaatgaatgacatgtgtatctaatgcctcaataatttttcattgagcatctactgtgtcaaggaggcaagcaacgtgaagtttctctccatattatttagctatgtgcattttatttcccagatgaagttaattgattcttaatgggatggtgggaatataggcagcaccatttatatttccttaaggcttcg

SEQ ID NO: 41503 - DNA, 1734 bp, Bovine  19866880604405
  misc_feature (1)..(1): n is a, c, g, or t
ntgttgaatagataaaaagaaattggcagatgacccagttttcaggtcagcattgtgccttctctttaagaaatatttatgtctgctgtcttacagattaggtgccggttgtagagtagctataggaacaatctgtctatcctttctgaagtttctttattctttcccgaatgatgaagcctcctagatcccacctcaatgaacaaagctcaattttttactactaattgctttaagtaaggcttctgtgatctaatcactaattggatgcttgcatttaagaaagaaagatagctaattaacagaaaccagtattgccagtattaggggtcagacctttatatgtggtagcatggtgatgggagacccatggtgaagtttagaaagtctttgggaacttaaataggtttttcactcagagagaagttgaaacaacacacccaaacctaagagggaggaggctttctgacagaggatgaatccgtgggccctgggaacctgtgccttctgtattttgtcagcagtcagaaatgctcaaagtttaaaatgtaattactagaaatatgaaatgaaggctcatgagccacttgtgaaattgccctagaatagccaaggtgattacaattgaaaagaaatagaaaattttactcgcacaggataggccaaatttggccttacatattctatgtgctcagtagattcttactgaatgaatttctcatatgagaaatacacagaaaaaaatagatttctatataacttttattaaaaggcataaaataaaacctgaataaatggagaatataataccttattcatggataggtaaactcaatgtcataaagataccacttctcctcaagttcatctatagattcaaagctattccaatcaaagccctaataggttttttttcagggaaaatcaacaagctgcacttaaaattcacatggaagagtcaagggccaagaagagtcaagggtttttgaaaaacgaggagatggaaaagaagaagaactgacttgctttcatagttatcaagatttactctaaaattttctgtcattttgataatggctttgtttgagtgtttgctggttctgcaagctagtcattcagggaactagtttttggcaaacttgcctagagtcagtgtatactgaggggttaatttgaatgaaagtgaaggcatgcagtgtgaaccttgctgtcttggagctcagctctgaccatgctgagctgcagctcaggacaggagaaagagcaggggtcagatgtgccagactgaacccccggctcttccttcagaagctctgagacattgcatcagttactgaatgtctctgaatttcaatttcttaatctgtcaaattcaattaataaaagcctgctgctgctactgctgctaagttgcttcagtcgtgtccgactctgtgcgaccccaaagacggcagcccaccaggctcccccgtccctgggattctccaggcaagaacactggagtgggttgccatttccttctccaatgcatgaaagtgaaaagtggaagtgaagccgctcagtcgtgtccgactcttagtaaccccatggactgcagcccaccaggctcctccatccatgggattttccaggcaagagtactggagtggggtgccattgccttctccaaataaaagcctagcttgggggaaaaaaaaaaaaacacctcactgttgggctgtattcagttcagtt

SEQ ID NO: 41504 - DNA, 783 bp, Bovine  19866881139176
  misc_feature (1)..(1): n is a, c, g, or t
ntttaacatgcctgcccttccttctttcctttgagggcatttgaaagccatgatatttgcagtttcccaggagtgaacattcctttgaaaggaggtagctaagagaaggcaaaacatcctggaccatatgtattcgaggccatgaaatagcacctgacatggtcaccatctctgactccctttggcttgctttcccttcccagtgggtgcaggacagaggcatggggtcagtaacagaggaattatcacggctattccaaaagaaggcatttacctaattgcaaaggaacacatcctggctgcagacaataaatggtgtgtgatgcttccatgaagtgagatggatggagctctctgttgctaaccggcccgtaaccagggtcattaatcacacgcggcacacccattgcctgtaatggacttcaccccggaaaactccaactcacggtgccagtgggttaaagggaaggcctcgcctgttatggaaatacacatctcccactgggactaaccctgggcgtttgccacccttcattccctgaaaggctcttttaattgattttctttcttattctctctgacctggcagagagcttacctgccagcctctgcctggacccagagacttggtctgaactgtatgaattgctaagaagcctctagtccacaagaaatctcccgtctttcctgcccttgacaagtaaagtaactaaatctcattagcagatcctcattgttgtgtgtgtgtgtgtgtgtgtgtgtgtgtgtgtgtgtgtgtgtgtg

SEQ ID NO: 41505 - DNA, 894 bp, Bovine  19866881144775
  misc_feature (1)..(1): n is a, c, g, or t
nctgattgggatttgtattttctttttttttttttctttttgataaagggagaaaacaaggacttgtttcctgcagccatttcttgggccattctccatgaggcccaggtccctgctcaggctggctggaacccacgcagagaggcagtggggatgggatttgtgttcatcagcatgcatttcttgaaactggccaccagtgaataatgaaatctcctcagaatattcttaagcttccttatgtgtttgattagtttttcccagtagggaatgaaagaaaggcatcagcagttgaaaaaacttgctctctatgtgatacaagtttggcttctggagtaatgttgatcttcagaacagacaggaaggtcagaatcattccaggttttaatggacagcccactactggaagtgcttggtcctggcagtgaatgggggtgaaggaagcaggagaacctgaggtcacttatcaactgtttcacagcctccttaatattctttgattcaatttccctttcgtaaaagaagatggattcttgtataatgttctttcatttattcattctcttgctagcccatagagcatgtactacctagcaggccctctgttaggtgtcaaggacgtaaggatacaagagtgatatgtgataaacaaggaatatacaactcccctgagcttcccaggggggtgcagtggtaaagaatccgcatactaatgcaggagatgcaagagatgcaggtttgatccctgggttggggagaaccctggagtaggaaatggctacctactctggtattcctgcctagaaaattccacagacagaggagcctggcaggctacagtccatggggttgcaaagagtcagatacgactgagcaaaaacacaaaaatacagt

SEQ ID NO: 41506 - DNA, 1241 bp, Bovine  19866881342136
  misc_feature (1)..(1): n is a, c, g, or t
ntttggatctgaaaagagtatttcttatctgaaaagactcaaccttagatgctctggaccagagattaatcagtcttttgctaggaaaatggaagtgtcacttttctgaaaataactattttcatttgagtattttccagtctccagtgccaatcaaacccaatggagatagtcaagaaacagttaaaatagaaccctccatggagggacatcaagtggatagcttttgctgaaaaaagggtggtttcagacatttactgttaggagcaggaacaaccctagagggttgttgaggaaattcatgtttagtaacaaatgggaaggtattcacagagaaccaactcagaagattttttaaattatgggcttactggcagtgggggacatttaaagccatctggtctcataaactcataagtaattctatctcaagtattcatgagcattttatagaaggcatttgaagaactcttccatattatgaatccagcacatctcctaatgtcccacacaagacagaagaagagaaactgtgagcaaattgacagtcagagaggatgggtgactgaccggaatgatacaactagtaagagttgatgaaaaatgctctccctcacattgggctccattagtgttttcctaccttctttacttacactactctcagaggggtaagatgatctaactgggaagtaggtgaagagtaagtaggtactctgtccatctccacttttcctcctcctcccttgggagccagtattcttgtagaagacatgaattctctgtcatcattcctggtccaggagtcagccctattctgggattccaccaaagggaccacttggctaattgactaaggccacacggctacaacctgccctgcagcattaatagagatgctgttctggcttccatctttcttatgtgcccagaactgggcagggaagagggatgcttttactgttcccttccccttggggagccaatgcaggtactagatctggacaagctggacacaagtctaacataggaatagcacagcaaataaggaagctcgcaatagtcatgataaaacaacagtgtcagctttatcatcattcattaacaagggttttcctactaccttagctattcccatgtatctgtcttactcatgaattaaagtctagtcttctggagaacaagaatgatatagccatgtccataccctgtgtacccagcacagttcctgggcatgtcaa

SEQ ID NO: 41507 - DNA, 601 bp, Bovine  19866881842756
  misc_feature (1)..(1): n is a, c, g, or t
ntccctgcccttggccttgtgacacgtgggtccagattcaaatgtcatgtcacatttcctcatggtaccaaagcacccttgtgagcagggaaccctaacagatggctgaatgccttcaaaaagactcccccagacagcctgagagatgcacggagccctgtcggtggtgatgggttgcaacatatgctcagcaaattatgccagagggaagagtggttcctgcacccaccgcatccacaaaacgctggttcaaatgctgcgtgtcgctgccttatacaaagtgccatttgcttttctaaaatatctattaaatccttgatctctatcctcggttccctggatttttaacggtcctaaaagggtataagggaaaactttttattgacgttgactatttcatccaaagggaaatgaataggaaaaggccattttctcacaataaaggttgctccctctggttcaggaattcctaacatgggttttctggacccttaaaaagcccatgactgatcttaaagaggcctgtgaaccttccaaaattacctgcaaacatgtatgtgtttgtgtgtgtgtgtgtgtgtgtgtgtgtacacatatggat

SEQ ID NO: 41508 - DNA, 1245 bp, Bovine  19866880526817
  misc_feature (1)..(1): n is a, c, g, or t
ngcaggaggggagtagagcagggtggctgtggctcacaggcccccatctcacaccttctgcttcatagctctgtgctcttggccacattcttgccacacactcagaagcagcctcatgaggtgagaacctttggtgacacccagggatcaaaggacccatggctgccaccaccatgagggaaaagccgtgggccgaagcaagctgggctttccctggcctctcaactgttgaaattttaggaatcacctaaaaacgaacctccaaggggaaatccaaaagctaaagtgaagattcccctagaagacactagggggagacccatctctggcctgggaaggggaggaagcaactcaggtctagaagaattcagaccatgtgtttctcaagttgattcgctggtgacctctactaaatcaaccaaactgaaccgcacctttcaagaggacaggcagtgaccactgagtcagagtgatgtaatcagagaggatgaggaaagcgtcacgtgtctgctcactcccagtccagtttccagctaaggaaactatataggatagagaggacccggggtcacacagcaggtctgtgacgggacacaggttcggagccccagcaggcccggttccccacccaggagagatgggcagggccgcttacctacttggtgcgacccagggctaaaagacaatgctagccttttgttcaaaaactgttaaggctttcaaggagaggacagcagagcattaaaatccagaggagggggaggttgtgaagcctgtcctcggactgtagaaaggaatctctctctgagtcccacaggagggctgtctactccaggtgcaaagcagggcttttgcgggcgcgggtggtggtggtatttccacaggaattactagaactgctatggggagaggcagatttgacttagaaaggaaagctctcccaacctttgaggggccggagtgttcgcacggacctaggatcaccagaactccagtcttccgggaaaggactctcccacaggccagggctgctgcgaaaggggaaatccaaccagggtgaacgcggcgcgcggacagcccgctgccatcagcatcggaagcgtcccccgccgtcacgggactcggagccgcggcgggcccgcgagccggagccgggcatcccctgcctgcgcccggctcggcgcgcgcgggggcggcggactgcggcgagcgccgtatgggaagggccggggatgcatccctccg

SEQ ID NO: 41509 - DNA, 970 bp, Bovine  19866880554296
  misc_feature (1)..(1): n is a, c, g, or t
ntccccaagggggaagtattttgaaaaagcagatttgagggtcccaccttcaaagatgcaggagccaagacgtctagagtggggcccttgactgtccattatcaaaaagtgatccaaagacagatttccgatgtcaggggccagggtcaacccgtgagcaccactgaaggcttcagatgctaagaggagccagcgcagtgctgagtaaggaacagcaactttcctccaaaagttccccgtgtatctgggggaggtagggttgcccaccccaggaaccgcacctccttggtgatagacggacaaatacaaagtcaaagagacagggctgcagcccttcaccaagacagtacagcagtttcccaaggtagctgggcagaggtgggagaagcgatgtgtggcagagacggctaagtgttcaccacaaccggcttcctcgtccacctgggctcacagctgtatttcacttctcagcctccctgtggttaggagtggccacgtgaccgagttctggccagtggcgcaggggcggagaacacgcacaccacttccgggcctgacccacagaatctcccgtgtgttatcctgagccccacctgccaatgtaactttccttaaagagggaaataaacttctgttgtatctgatgactgaaaataacggggctgtttgtgacccatcctgatcacacgggatgcaagagagatttcacagcgattaatctcgaccagcattcagccagcccggtttctctaaccagcggctggtgcgacatagcacctgcagggacgcgagtcctgatcttacacggcttaccatcttctggagaaaagcaacactgagaaggccccgggcagcagcaggccaccagtcccccaggaggggaccacagactccagccccagagggaggctatcgcaggccctgccaacacggagagctgagtggtggcgggcaggcttccgagaaagca

SEQ ID NO: 41510 - DNA, 1219 bp, Bovine  19866880559200
  misc_feature (1)..(1): n is a, c, g, or t
ncaagagagaatggggagcagcccgaacactgtggttttgatcttggctgaggaacatctggaggggaagagggcaggttttcagtcagcactgcattcagagttgggaattgttataatatcctgttcttggtcattcgttcatgcattcgtgcaaaattcagtgagcacgcacacgatatggcagagacttttctcttgagagccttcaccttgctctggacattggttggaggtcttctgattgcccactgctaacctgggaagtctgcaggacttctctcaaaggcatggattttgtgggtgcctagcattccgaggcgtcaagtccagctcagacgaccgtcctctgatctgcctgaaaacaggcccagtcaccctcgcctgggctcctatagcaatacctcgggttgtaattcttgcttttcatctctctcccccactacacagtaaaaccagcatggaaagaagtctggtctcttgtccagctttgtgtacctcctgtatcaccctgggatgcttagtgaatatctgttggaaaaatgagtgaatgagtaagtgaaagaatgggcctgaatcagaactcagtctgaatgggggcggctgctgtattttttggaactctccctaaaggaaggctcctttttccccacagggttcgcctctgctgacccaccatcctttgtgtgtgatgattccaatgctggagttctttcccctgttaattcatcaaaagagggaagaatggggaaactatttgtcggtcagcgcagggtggggagcattgatccctcccctgtttgctgaacaccttgaggtcctttcatcagaaactcagaagcggtaaaaacaagggacttcaatctcaaggatgacagctggtggattgatgaccagaagaggtggggaggcctttgcttttcttctcccagctaagggaattcaaatattcagggcccatctggtgactcactggcttgctgtgattaggcctcctttcctgcccagcaccgattcctgttctttactgttgcccaacaatagtttccctgacactgggtcccctggatgtcacccaaaactgaaatcaacacagacaatgctttgtaccctttaaaatctgggtagattttctgtcccaaccagcacttcatggaacagcatcgccatcgcctttgaactccccagtcccctctgcagtgggtagtgcctctcccat

SEQ ID NO: 41511 - DNA, 746 bp, Bovine  19866880692145
  misc_feature (1)..(1): n is a, c, g, or t
natgagtgtccttacagtagagactgtcttttcttcttatgcttgcaaaccctcccacttaacacagccatctcccaataaagatgacatggcttttgcctttaaaagagaactggatcaaagtcaattcatttaattggctacgaatttctgagaatgaaagaacccaccgcacattgcttcctgcgtctgctgtggaattgtgggcttacaagagccaggaaaatgaatactaagagttccttgtgcccagcactgttgttaagggacaagatcaccagggtctgtgcctggcaagctgaaagaccaaggtgtgtcctgctgacatctcaacagcagagcccacgagacacaggaagtccccagcttccaacatcctcccaactgtgcataaaagcatgttttgctcccaacctgccctctatcattccctgcactaaaagaatgatatgaagtcatttatgcagacgcttgtaagcttctgtttggcctcatgagacagacagccccataaaccacagtttgctgtgctcatgactgagatttgggctgccctggccttgccggtcctgccagtggctgctgcaggaggctgaacaggcctgactggtgttcttttattcacctgcggcacagttgggacctgtgggcctcaacactacacctttaatgattaggcaattagtgctaactattaactctgtgagggcaggacatcagagggtggttgtaagacaaatttcctc

SEQ ID NO: 41512 - DNA, 700 bp, Bovine  19866880770063
  misc_feature (1)..(1): n is a, c, g, or t
ngcgatgtgttgagcagagaggccgggctcgaggacgcacaggtgaccctcaaagaggtactcctggtgctggggggccacgccggtctgctcgtacacggcctccaggaagatggctatcctagaaaaccaggaacagaggcaggagaggaggaggcgagggggtgtcaacaggcaggaatcagcgtcagggtgacccacacacagctaagacttgggctctgcttttcagagggagggactgggagatttttcttccccagggttgggagacaaagggtagaggtggtgtcctgaagcagatggagacaaagtccagtgtccagactctgccttcacggcccctcctaccacgctccctagaggcacccagggagccttgtcccctagggtcacccaggactaggtaggactcacctagtccccaagcaagctccagaaacaaaggggttctacgagcagtccactggggagtgcactggcggtgagcgtgtgcttgcacacacacacgcccctcaagaggtttctaatgcacgtcagctttgtaaaggttgctgaatctctcaagttcccagcaaggaacagtggttaacttgatggaactagtacttccccaacctcagactggacccagaagcttccgtatctgagcgccccacagaagccttgggcgggacaggcccctggggcccgggggcgg

SEQ ID NO: 41513 - DNA, 731 bp, Bovine  19866880782468
  misc_feature (1)..(1): n is a, c, g, or t
nttcagcatcagtccttccaatgaacacccaggaactgatctcctttaggatggactggttggatctccttgcagtccaagaaactctcaagagtcttctccaacaccacagttcaaaagcatcaattcttcagtgctcagctttccttatagtccaactctcacacccatacatgactactggaaaaaccatagctttgactagacggacctttgtcagcaaaagtgatttacagttgctggacctcaaaatcaggaaggtgaaactcaaaggacaggccagggaattctccctgctgcacagtggtgacatgctgggtgggacgacggagacaggaggtgtacagacaggaagtatctgttggttccttggtgttctctgagtttccagtgttcatgtgaaatgtggaagggataggagaaggacccagaatttacagtttcttttcaagcaagaagtgaaacttgagtcctttctgatttagtaataaccatgaagaaggagatgagtcgtttgaagactctgttctagttctgcctttggtagccatgtggtttactccagagctttttaaacctgcaggtcaagacctactaggtcaggagatcaaattagtgggccacaactagtgtgtaaaatataaaaattatcagactttatggcatatttattttcatgatatcttgttgtggtggtaggtgttggcttgtaaaaattagaaagccaccaa

SEQ ID NO: 41514 - DNA, 2653 bp, Bovine  19866880848343
  misc_feature (1)..(1): n is a, c, g, or t
nactcacatcattttatttaatctttattactaggccataattggtatctccaattatcctgatcgcaagatgacaaaactcaagtatgacttgttaagtaatttaccaaagggccatacaattaggggcaagtggggttgaagccaagttaaggtttgccttgacttgtcaaagaggttgacagtggggatgggaaacttgagaaaccaagagtctgaagtctcgggggcattttgggggggacatcacagtttctctgggtccaaaacctggaacgtccccttctctaccttccagctgcagtggtgactcaggcccaagagtcaagtttggagtagcccagtgactcactatctagcccatgttttgactagtccacgaccagactggcttccttcctacttcctagatctacagagcagcttcctacttctacagagcagctttgaaggaagtgagaatgggatgtccccaccccatccagcaaaagaagagtctctgcgaagagatgccacctgcaccgtggtcagctagtgatgccacactgctgagcatcacccctgccccgctcccacaacctgcctggaaggaggcgctgccctggcccccacccccaagagcctctgcacaggcactcaagggagattctcatcacccccatctctaagcctgccgctccaagacagaatagctgctctgtccagggcaaaatgtgctacttcaggcttgtactgctgctgctgcttcaaagacaaacaatggtccccaagaaggcagctgtgccagccccagtcctctgtccatgcatacgaggggcaggaacaatgggccactgaaagccagcacgcctgggccatgtgcccaggctggagggcccctctgcaccctggcctaccaatacactacaagtgcagaaagaagaaaggggcaatttataaaaacgtggaggaatttctcacagttccatcatgtgcttagcccagtatgcacctgcacacgtgtagacacacaaagacaccgtgcttcatcacaccaactcaagatgcctttgccaatccaggttatagttggagaagcgttcctgggagctggggatgatggggttttcgtaggttttgtccttagaactacactgaagaagtcaagttctcactttctagaagcagctgtatctcagggctataaatgaaatcaatggccatccagaaagccaaagtacaaaggtcaccatgaatgacctgaagtgatacatgccaaaaatgacctcccctgggcacctcgccaagcccatttgttcagaaaacctttactgagctgcttctgtatgacagaccctgtgccaggtgattatgagggacaaaacaggcccaagtcctaccctactgaagtgtgacttgacaagaggaaggaaaagacaggaaagattgtctcattgcttttgcttcaaatattctttattataacatagccatggtaagaagcccccacctaaagaccaaagatttaaaactcatcagtagctggcaaagatattaggcaacaagactaagaaaatttcaatgccctctgactgtttttctattttgctttataaaaatgatacttgaataaactacagcttcccttgcaaaagggaccaaagttttagagcaaatttcctgaaaatcagacttaacctttggttaatatttcattcaaagattcaagtcaaaatttaacctcactattctgggactagcccttgacgacagttacacaattttgtgaatatactaaaacaaaaaacaaacaaacaaaaaaatcccaccaaatggtacatttcaaaggggtaaattttatggtacttgaactatttttcattaaaaaagttgaaccccatcaaaacagcatgtcctgctgagtgccatcctgccgactaagcggaaaatggccccacaaacaggcaccaaaaggaggaaggccttcttggtttccatttctccacgtgtatgggctgaatttcagttctgcattgaatattcttaaagcaaatcttaggagctgtccctccggacagcaaacttggccaggacaaggaactccactggcagatcaccatcccatcatttccaaagggtgtcggatcaaaggctggaagggaacgttttcatgcatgagctcaaatctaggatcagcgcacacgtcccggaacgcttccccaaagacatgctgactctttgtccaggcttggccacagctgaagttctaactacacctgtcctgggagttagaaggaagttcattttcttttttaggaagatgctgaaagtcacaaaaatggatgaaattcatagaaaaactagacctaataggatattgattgcttaacaaaaacagggccctgccacagcgacaatcgtggagactctaaattatgtaacacctgccaacgcaggtgacacagtcgtctaaaaactgtccacacttcagagaaccccaggaaattcaccagtcaggagagtattggggaattctgttcagctcatcgtttccatccaaagatatcagccccacttgatcctctttcaaaattcatctccttcttcaggaattttttctgattatgtaatacggaacctctttctatgactcccacatttttgaggagaaaat

SEQ ID NO: 41515 - DNA, 3902 bp, Bovine  19866880873178
  misc_feature (1)..(1): n is a, c, g, or t
naaccagctgtttaggaaatatttggtgattgatggcttcagttggaatgtaagatgatcatatatgacagatccctaggctggaagcccaggaggtaaaaggctttccctggtcactcagcgaagtagagaccgccccgaggacccagagccccgggcccctgctcagagcaatctgtgttactctcagcactgatgctggcagagatgttgaggggataatccttggtgatcgtgactggttcatgatggaatggaagcctcacagaactgtaagccatgttctggcttctcagctcaactccagctttcaactgaggggctgtggccaagacacatcaagcctccagattcgggcgccttatctggtccttttaacgagtgtcacgtgagcctgtccttttcttctttaaccgagcgtccttccccactttgcatgggagcagagccttcttagcagtttctcacgggactggcagagagagatcctgactgctaagttctctaaactgtaaggacttccctagggtggggttgggaaaagggcctgaatggttgacacgagctccttctccaggaccacctgggactcaccccagacatcctcccctttgtgttccagattcctccactcccactcaagcctttctcttcatgcctttagactttatccagacttggcccgcttttccctctaaagttacagctcagcacacatgtaacacccattcacccacgttattttgggagaaaggaaaactttacacggctctcaaccctgaatcccagctcttagtttatgctgtcaggctggacgctggacccaggttccaagccgtgagtggcacagggaggcaccatcaggtcaccctcgtgcctgaagcctgttcccagccctccactgatcccggctcgccaggtaacccacacctgtgtgcgtctcagctctgggatccccctgtgtggggggcccagacctgtcttcattcaggacctcatttcctcttctgaatggctcagtcttcccataagatagcaccccagtcctggcaaggcatgtgctctggggataagaggaccagatcaatttgccaggagccaggggcatttaatttcagaaccaggaggaagaagggagctgtagaggcagaaacctgcaggttggattcgctgagcctgcgccttctgtccatggttctgtcctggttcccgtctcttctccttcccctcccctccccagctttatgtgcagctccccagcctgcatcccccatctcacttctcttcttagctgtagaatgaagttttctgtagcctgtcggaggtctctcacgcccctcagatgcctacgatttaatgtgtccagaagcaggtcgtagctttgcccatgactgatttccctccctgtctccgcctcatcctcctattcccccaccttcggcacctgaaggacctcccctctcatgccttccatccagtctgtcactgtggcttctgcctccacggtgtggtctctcctttctgtcccccaccctgccctacctagctgggggcttgtcgcctcttcctgagatgctccaggaggttgcccaaccggtttccttctgtttcttcccctgctgtgtaccctgcatttgatggcatatcattctggcgtcccaaagccttcagagcctcccctttgcttctagagcaaagtccacgctggttcccgcctgctaatgttgcatctaaaatgccgcaatgcctggcctcaatcagaacgctgtgttttcgatcttcttttagcacggggctgagcggtcgggggatacagagatggataaaacgtgtaaagacctatggcctcagccacactgtgcagcagactctagttgctccccttccccacccatgaagtgtcgatggggcccgtgggcagagggtcacctggggggggacactgggtctgccctgcggccccgcggctttcatcaggaggtggcggcagctcccaagatggggggaagggggctggcccccagaatcagagggcctgggtgtaagtaaaacccaggaggaggccggggacgggctggcagcgacaggactgcagcagcctgggagggttggaggagatcagcttagcctctgaaaagcagcgactcctggagctggaggagactgtgatgggtcgttaggccattcccttctttctgaacaggcctgcatgtaggccccacaggcaggggagggaacctgtgctcagcacaccgtcgtcctccaacccattgatcagcccttccttgtccatggtgctactcaacgtggctccagctggttggacccctgctgcctgtgaggctacaatcctaggcttaaaaaaaaataaagcagggagggcggtggcagcacgtttccacctggcagaccaccctggcctgctgtcaggccagagggctggcacgttcaacgaggtcctatgtgagaggggcttagccaagggcgaggcccacaccccacgctcatccaactccagaacacgtgctcttcccaccacacacgtggcgtcttgggtgagagtcaagtttcgaaaggctccaaacaacctcaggtatcccagctctcgtctgctcacctgccgcaggaagctgtctttatcacattcgctctttgcctgctgctgaaatccaggccgttttcccctgttgggatctcgggaaagctggtcgccatacactatcggcgtcccttcaccagcgttcagtccgcgagtcccgccttctcacctcacctcctggctctccccgagcaccaggggtggtgttgggctgcccaccacactgtggggcgtgggggctgcagggacctgctttgcagcggaggatacaaggccgggccctgtgttggcctgaacatgtagagaggctgtgggcaggtacgacctccatagtcacacatggctgggaaagtgtgcgttagcgaggaggatgggcgagctggtgggtcccagtgttcatagaacatttccagctgcaacttgatgcttctctctgctccctgaaaaccaccgagtcctcctctcctgcccctcattttgatggtctgtaattctctggatgaggaaccgtgtcttgtcttgtttagcattgggtccccggcacatggcaggcacagaatgcaagcctgatgaaggaggaggggccttggagggtcttccccacaaaacgtctttccctaaggggtggcaggcgctcctggagggcacacagagtgcttcagactgagcgtgtgaaagcggatctcgggactgtgagaaagggaaacttgctgagattcgggatgtggaatcaatggatttttccagtgactctgaaaagaaaaatctcactgagtgagcagaaaatgcaaggacaactttccaaacacagagcggcccctccatcccatctgtgattgctcagctgtttgccccggagggtgagggcgggcagcgctgggtcactaagcaactgggccctggcaattgctggcaagagttagcctggcccgtccttcagtggggcctccgggggtcggggcagaggccccacgtgcaggggcgggagagcctcagggatttctcctgtctggctttcagccgtgggagtggcagggtggggagtggggaatagatacatgtctcccttgtttcactttcccagttttattctaagcatgtaaagaccccgggttggtgatcccagtcgtttgagcattctcagacagcccagctggactgggcagggaccccaggccctcaagtgggcccagctgtgggcctgggaacccatgcccccagccttccctctgggtgacctcaggaggcctgctccctgctctcagcctcacttttcccctctgtaaaatggggagacttgatc

SEQ ID NO: 41516 - DNA, 2979 bp, Bovine  19866880992599
  misc_feature (1)..(1): n is a, c, g, or t
naaaataactccattaatttagaacacttattattgcattttaaataatctatttaggttatccattcccccctactagaacatgaacttttagtctctataaagagaaaataacttaccccaatcagctttccaaagagcaaaatatggaaatatattttgtgcccagtacgtggaaaaatgcacatggaagtgatttgaagaattaacagaggtttacgaaggcaatgtacttctaacttttgtataagcttcggcttcctcgtccataaaacgaggaaaagaatagtgcctttttcatgaagtcggcacgaggagtcaataaataaccatttgtaaaggtgctcagaacagtgagggcccagagtaagctgcctgcatcagtcactgttattactgtatcattttcatggtctgctctgggctgcaggtagaggttggacagcaaaaaagagggatcctagaaatcaggaacttagggttaaagtcagatattctgagtcatggaaagaaacactgctctcaaacaagaccacacctagacagtcagggctgctgcgtctgctggagaattcggtacagcaggcctgtctaaatgtcccaggctcagttccgtacagccttgggtttgtctctggcctcagttttcttaactattaaatagcagctctattgatttcactagggagtaagagatgagacacataaagcctctagcagtgccggggaacactaggctctagtcaaatacaaatttccctagttcactggcgctcctcccatcgtgtggcaaattatcatatcgatccatttgaccttaggagccaaataagcaatcctaattttttttttctcctttaaaaactggcttaggattacagaattcatggcaaggcagggagcagggaacactgaagactgtgccatttcgttctcatgcccagaaaattctgaggccccctgtcagctgccgagacttccagagcccaggcgatccagaaatggaggtgcagaaagtgttggcaagacagggaatgtgctggccggacagaccctaataaatcatgggcaccgccaaggcccacggacgacagctgtgcattccagctctcgacgcacacccgccaggccgcgcagcgcatgtctgcgctttggaaggggtcaatttttccagtcggcaggcgtgagagcatgtggtttctgcatcctgattcccagccccctctggcttgcttctgctgggttcttggcatccagcttccctatccccgggctcactggttttcaaacgagcgctccttcactttggtctccagctacctggcaggagtctgggctgtgacaagggactgacaagtatgctggcgagacagccagatgagataggagctgggaggtgggcgaggggcagggagctggggcgagaagggcggagggctgaggtccagccctgcacctctgctctaacacagagactactcaatctgagggggtgggctgtccctccaagaaagggaaggcgtgagcatgggaaccaggagagctgggggcagctcccaggagactgcagggtgggagtacaggatgtgtaaccgctcctttctgcttcatgccccagcggcccgttgaccccactcggggcctcgtaccgtcatcgctggtgtggtgctctgtggtcacatcctgggttgagtcttcagccgaggtagtctctccatgagggctgtcactgcaacagaagcaagaggaaccaaaattcttatcttctctttcacacagcttccttgggcatggaatcttacgctctgatcacacactacaggcagatgcttataatgaaacacaaggctctgggaagtctctaggctagctcctgctagcttactactggagactacatggaacttacaaaatatcttgacacaaagggaacctcatttcaacttagaaatcttttcaaaaatacagaatgactcaggtcctcaaggctcatttctttaggtgaattagttcctggagggagcaaggtggaagggaaatactgggctttagcatcggatacaattgcatctgaaaaccagctctgacactcagtagctgtgtgacgctgggcaattacttaatttcttagagcctcagctacttaatctataaattggggataatggtctatatacttctatggtttctcacagaggtgtgcaaggatttagtgaaataagaaggggtaattaacaggcagtgctttctttccttctttcttactttgcttgatgtctctggctgctctgtggtttggtactggtgagaaagcaggaggtgagtcataggagtgagtgggaaacaaaagcagggggagaaagctggctctgggctggactctgcaaagggcacggcatgtgagctgggtcaagctcttgacaaaattagtggagcctaaggtcatgtggggcggagaatcgagaatgaacagggaagttattaggaaagttctttctatccctgatctggactgcagagcacgtgggggagcggcacaaggatgctcttgcttcccaagaagcagagaaaagcctgttcatttccaaggcttcttcctctggcagcaaaaagtgagtcttcccaggcagttccatggagataccaccatccttcaaccccacatcctggcttcagtgttcacctttgagcctccgtgagcctgtgtgtgggctaagttacagccctccctcctcatgagatgggaccctaccctgcgtgaagtgagccggtttatggaggctctccagaccccagagagcactgtgggaggaccgagaactctctgggcttccgaacagcagccgggacatccctggctctccagaagagacagcactgtgggaaaactttctccttatcagaaaatgtgggtacactttctcactgtttgctaggcctaaagaccctctgaaggagttgggtgacattttggaaacc

SEQ ID NO: 41517 - DNA, 1055 bp, Bovine  19866881293394
  misc_feature (1)..(1): n is a, c, g, or t
ntgaacaggtaaactgtctaactgttggtactgttgttctgtgtatctctggccgagtcctgagtcttgcttttcagtcagaatggtttaaatcaagaggacccttaatggactttggggaaccctgcctgtctgtggttttggctccctttaaaccacctgcttgcatgtgccctgaaggacttctgagactgcagccccagccctaccccagtgtggttttatgaggggcgtgcctccttagtcagcctgccttggagctgccttcttaaaaaccatcattgtttctgctttgtgggtgttcagattcctttgaaagttcatgcctttcaatctctaactcgaaagcagtaatattcttagtacttgtacatggctcaatttacaaagcactttgtatacattaatctctggaaattcttgacagattcatgattataacccgaggccttttggcccctagtctgtcagttttggggattggagcagcgaaaggtggtaaggtgcagggcataaccttcacgagaggtgataatctggctggtatttggatgagctcacctcatggcagaccctcccagctattgtcctgaccttgttcaaggctcctttcctataccctctccataccttgaatttttacattccccaggaagcttgagatcaacagttaatgcagatattctaggaggaaccatctgaaacagagtggcactgtgtgccgagccgtcaaattctctttcttgagaacattaggggtcttgtcttttttttttttttttttttttatgtcttaaaagaacagtgtgtgtgcaccacagagctgagaagtgaaattttgtaatttccatctggagcattttgatagaaaagcctcaggcctttgcctagaacagtttaaccctttcaggaccctttcagagcagatgaaatttaaaactctagacatattgtatgtgcacacacacttgggaatgtggattgctggtatttaaacaagctttttctctggggaggtgtgagcggttcttcactcctgccaacaaaggtctttt

SEQ ID NO: 41518 - DNA, 1261 bp, Bovine  19866881324465
  misc_feature (1)..(1): n is a, c, g, or t
naacacagacccacagggtggatttgacaagggatctggccacgtgtcaggatggcatttgagagaggaagaaagtttcaaatgatgtatttcatcatctgacgctctgagacagggaagtcacccatccaccacttcagtggggctttctgaatccacccccactcccacccccccaacagcgatgccatcattgctctggggctctggatgctgcagcttcaggtccagactcctcttcctgggaccagggacaagaacagccagttcctacccttcgcgcattcacttccagaagcatgaagtgctgttgcctaagctcttcctgctgccttctcccctccccctggccacgttatcaccactgttgattattcatggggaagaggtatagacagggtcactggacgctgaaaggaatccggtcttcctccctttgggactatggagcttcagtctggattcttcctcctggaggctggccaacttgtatcacatgtgatctttgccagcttcagaagagtcccagggtcctcgccagcaccatctctgctttgcttggcttccttccaagcctggactcattgacaggtggagtagggtggacagacagatacaaactaggctttgaaaatatctcatgagctatgatggaacatattccttctctcagtttcctcatctgtgaaatgggagtaaaacctgctatcagggttgcagagcaacccaagtgatgaggtgaagggactttgaaaagccctattcagatgtcacttttcataatatttgaactggcagggagccgtaccctaaaagaacacagtgtcgctcaggccttttcctaagtggatctggcatctcgtgtgccgctcacaagcagagactcacgccgactcctgggctactttggcctgttgtccgctgtattttaagattgtacgttgtgaatgtgtagcgctgcacttactctgcagaggtcagtgtatactccaaggacgcaatgtggcccgagaatctggggcctgtttttcccttaaatattgaattcccactgagcaaggaggttccttttataaggaaatgtgtgttctttcactggccagacaaagcaggcaggctcttgctggtgcccaggggtcatgcaaagcccctccctgcaggattcatcatcctgacattggccttcgaggtcctggtgagaccaaaaccagcttcctttccctggaccatagtctctggggtaaccacccccacccagcaa

SEQ ID NO: 41519 - DNA, 2288 bp, Bovine  19866881339891
  misc_feature (1)..(1): n is a, c, g, or t
nagtgaaaaagacacttggaggactgtatcaattgttgaacatttggcatatagttttacgactggcggggttgttgttggtaatggtgtctgtgtgtttatttgtgtatatgcatgatactccatgattaaatgaatttatgcagagcttcccttgtggctcagctggtaaagaatctgcctgcaatgcggtagacctgggttcgatctctgggttggaaagatcccctggagaagggaaaggctacccactccagtattttggcctggagaattccatggggtctcaaagaatgggacacaactgagtgactctcactttcatactttcacattagacagtttcttgtgaaaggaagccccaggtgaatacgcgtgtcctctgatttctgtgtgacttagtagccctcagctaggtgggttagtaccaaccagggatgtctgaacaccggagagggagcagagttggaatcaagggactacagagaggagcctctgtttgtcattattaatatttaactgattgtggacttgtagcctgatggaaacagttgagaaatgttctgatggctggcaggccaaactcaccaatcatctttctttcaactgaagttctaattccatggtggggtggggttttgttttatctttgttttaaaaagcaagggtcagaaacatgacttttgaaaggcagtactctgcagtgcctaagagaacagcctggaaccagaagacctaggtttgaatcctgatgttgccaattagtctctgtgtgaccctgggtacctctgtgttcctcttctgtgttttaaaaaattgagatgatagcattaccttctcaattgtgttcatgtgagaatttaatgaattaatatatggaaagggcttagaacagtgcctggtagaaggcaacttaaacatttagggcagtatgaatgttattattatcccctcccatccagcggctgtaacaatttgcctgggctcccggcacttcttaggatcacctttccgaacagtgagagccgttttccagctctgctcggttgctgagctgaggcgggaagagggtgccccgtgcagcacaggcggggcagggccactcctgcctgctgtgggcatcctcacggcgtgttggtggcctcgaggtcgtcgggaccctggcacctggcatttgcaccacttgtccccagcacagagcacagtctcgtgcctgataaaggcagtcgtctgttttactattaaatctcccagctcttggaaacacgcggagggacagcgggtgtgtaaatgacatatgtctcagcaggaggttgacactgggtgggagctgtgttggcaaaacgggcttttaataagggaagcttttagaaaactgtctccccactgccttttcagtgaaaattcctctatctcaagcttatccctacttcaaggactgtaacggagctctggttaatgctggatttgccaacaggagacgttcaaagttgatattcatttctaggattaaagaactcgtgtttattagatagagaaggaaatctggtggggactgggagggagagagagaggtagattatatgaagtcatgtgtgtgtgtgtctgggggtgggggacagtggccgtggtgagaatccgtttccagcattccaaaagggaatggtcaatagcacacaacccttggaactctcacagactgcctttattctcagggaatgtcccttgcaggttgtagaccctttcttctacagaaggaactcggggttaaccttttatctcgtttggtggatgcattagccatcttggaataggaaatggtctggaaaatgggaaaagctaagttcaactcaacactgagagagggatacttggacatgccgtgcacgttactagtggagcgggtcctccctggaggggtgtgttcagagctgtaaagggttacgtggtaggggttacagggtgaagggggaccctggagcttaccatcctgacctccccctcctgtgggagacctgttttatggtgggagtgcgaggtgtttgccgtggagtctgctggcacgggaacagggacctcctgggtgagagccccttgtcgagccttgatagctctgtctcatcacagcatcagtggtcgggcttaacccacctctctgcacagagtggacccccatgtgacagccacggagtcccacagacccagcccctctcttgggttctttgcagaagaggttactgggacacagacattgagtctctctgtagcaggcccaggaacctggggca

SEQ ID NO: 41520 - DNA, 601 bp, Bovine  19866881739203
  misc_feature (1)..(1): n is a, c, g, or t
ncttgttggacacttgagtcctttggccttttgctccctgcattgtctcacaaacaggggaaggaaatgtgggattaggctgtgtgctccccggaactggggattctgaaagctctgctgagtactgataggattggcccgttggagagacttctcatgaaagctgaagtactagcacatgaaacagtggaagttcgacttccctgatagccacagaaatcacaaagttggctctgggaacgggtcttgagttggaggatcccttggaccaggtgttttaccctgtctctgttcttcagctgtatcatgggagtttattcattcccaggagtggaaaaccagaccccagagaggagctgggagactcaaggagaagtcttagctttctgtttctttccccccagggactgggcaaagaaaggccacctccttcctggaggtgacttgtttgtctctctgtaaaaccacctgaacacatgcattcgttcacatttcaaaaccactttattagcaaaatgaacaaaaggagaatggcatttaaattaaataaattacacaaatatctcaagagtcctggttccagggaaccacatcagtatca

SEQ ID NO: 41521 - DNA, 667 bp, Bovine  19866881743024
  misc_feature (1)..(1): n is a, c, g, or t
nagagaatggaagaggcaatgtaatatttactatttgcctttcttacttttagatcaaaagtataaataggatcaatattttcttttgcacccgtgcaacagtctggctggagcaccctgctgcaacagatccagggggacacggtgggggtggggaaagcaccacttcggcctcctcccctccaggctgtgaccacgggctaggactgtggctgcttccccggagcctgaatttgctctcaggagtgtgggggtagaaacacagctgtgacagagacgggcatgagacaggcactcacagcatcagaacctagtgtacacatctacctttttaccttttgacacagtcagtgctggagaccactgggaccgcaggatgtcaaggcagatgctgccattgctgttgatgttgggatgataaattttggttgtgaaaacaacctgcagagatgagagacctcaagtcagacagaccacagggacattctagattgtttatctgtctggaaaatgaaccaagtaaggtggaaatgaccactactgggatatacctggccctgcacaatcctgggtgagctgggcattattccaaaccagaatgggatacaggagggtgcacctggaggagaagttccccaacccattccctgctgggctcttgaactag

SEQ ID NO: 41522 - DNA, 834 bp, Bovine  19866881974643
  misc_feature (1)..(1): n is a, c, g, or t
ngccttgggtgagaagaccgtctggcaggcgtcgtgtgctgtgctcgaggtcgtccaggagggcataatctgggctccagcacttcctctaagacctctgcaagctccctggaaagatgagtcagaccaaactcctagaagtggctggctggaggtcctggccctccctggggctcctgggtgtgggaagctggctttcccaggcagttcttcacttggttaactggcccaacctgctctgtagactgtgggctgagttccaaactcccctgctcaggcgaaccacagggagatacagaaataacaccccgtagcccaccacagccgcccagcctcagtgctcggcctctttcgtggctcagaccgggttctgttgcctgcacttgggaactcagagcatcctctttctccttcctgccaggctggtggcagccgccagctgcctctgtctctttaagagagagaaggaacgaaatcaggaagtgggagagagtggagagccgaaggctgagtttcttcaggtctccgagacccgtggccaccaggatgctacggatgtggcccgtgcagggcagcaagccctgaaagtctgggggtgcctcgcagtcccacagcctgcctgtcccacagctgagatggggtgagtgtgcagagtccacgctgaggggaggagggttgaatgggggcgtctgggagccaggcggctgcaggacagcaatcagcgaagtgccagggtgctggccggccagggtcggctctgcgggctcctgcccttgccgcgtatctctctgaggctgctgccccccgccccgaggtgccctggcaccatctcag

SEQ ID NO: 41523 - DNA, 1120 bp, Bovine  19866880245857
  misc_feature (1)..(1): n is a, c, g, or t
nacccaaataaagttacattcctatagggtgagggtatagtgggttttagttaaggaaagaatttacttagcctaaggtctaacgtgatttatatcaaaggttaatacttatttcttctatatattcattaatgtgtgtaagggcaggggatgtggagacttagcaacaaacattggctcaacaaatgaaaaacccttcaccaatacaatttctaatcagcccactatacttatactaatggttttctaacttttctaaggaacctgtttttagaaggtttaaagcatctcgtgcctctcacggttgggaggctgtgagcaatcacatgtggccggacaagcctgtcaggcaggctagagaaccttcagaggagtttgtaggttaaaacactcttgtcacgcccaggagattttattaactggagctctaagttaactccttctccgaaagaggtggtgggggacagccccccgtaaagtcagaggtgtaggtgagagcacaagtagtaaagtaggcaggctctggttatgggggtagatgctcaaggatttccagggggactcctgaggctcgatcccgcctttgcgtatgtcgagcctccttcctcagagtgccgcactctgccccaacattaacccacccagcaacttagtttaaccccatcagttttactgctacttagtaaattaaaacaacataagagggaaatcaaatagtgttgcttttaacccccagtttagcctggataaataacaactctaaacgaaaagaaatcaaacagggtatttgaattaaacacctaaggagcttcttaaaactacctaagctatacagacaaatgaaacatttaccataacaatttcagcgactacagttttcaagtctccacagctaaccattttaaatttaattttggctatctgtccaatctagacagtagggtacatctagggagggaagacccatgacttgctgcagcacttaaacctctaatcccacagaaatttttcttaaaatagctgaagtgaccagcatgggcactcttcttgagttgatattaacagcagataaagacatttttagtgaagaaattctaccccaatggcatacacatgcaca

SEQ ID NO: 41524 - DNA, 1473 bp, Bovine  19866880681791
  misc_feature (1)..(1): n is a, c, g, or t
nacctcaggatactgctgggaagactcagtgaggccatctacggaaagcacaataacactggtgtgtagtcagcgcccaataagaccaagaatcagtattgttattataaatgataaacaggagaaaacggtgggaacctgaggtctgtctctgtgttatcaaggggtaagagtctgtaggaccgaaactggggcgatttcaagacatggttggggaggtagaccctccggtgactgcacttagttgggggaccaccctctctcccagcctctgttcccggggttcctccctccctccccatctccccactccacatcctgctgagccccgccactcacagccagctctcaccagcccagagccctctcccttcccaggcctcccacagaacctccccccgccaccaccaccactacgcctgtgactttgcaactttataatttgctgcggtaaacagctaccacccacacaaatgtgagtccgtgggaagagggacacgtgctggtcaggtctcctcaaagacgagaaattcgggggaggcccccagtctcatgctcctttgtgccctgcggcgcccagcacgccctggacggccagctcttggttaacaggcatctgggagatggaaacgcaaacagagctaactgtggatccagaggagccgggttcggctcccagaagaaggcgcaccagcagccactccatcattacgaggacagaccgccaccctgtcccatctccagagacggcgcccgcctgctcccagggacgtgtgtgtaagcgcagatggcagaaggagtgctgggcaagcaactctgccgccctggcctctggctgctcccaggccttcgtgaatgaggctacaagtccagtcactcctgcaaggaagccaccgtgactcccatccccaaggttccctcgacccaacaagggccaggcgaagcccagctctgcccacaaggcagtccagagcagctggccagccaacaggctgtaagcctcttacagattaaaggtcctaatttaaacctctatttgaggtaccacaagtgggtcagcgccctgcaggccggtcagcacagctgatggaaggagaagcaagatccgagaaaggctcctggcctttgcaggaaagatggagccagagaattaccgagctaagtggtcgttctgaggcggggagctggctcaacccaatctcccaggaatcccctccccagacagccagaactcgaaactcccctcccagtccacctgtgaaaaggagaaccacagggcaaagtaatgggtcgggatggccttcctctcccagccctgaccttggtatggaaacagctaatcaagttaggaagccagagaagagggcgcagggctgaagacgctgctcctcagggggtcacacctgtgacagaaggggaggcggcctctgctcccacccctggagagctctgccgggctctctgcccagctgg

SEQ ID NO: 41525 - DNA, 1846 bp, Bovine  19866880713883
  misc_feature (1)..(1): n is a, c, g, or t
ngaaggaagagctgggaggacgggactggctggtgagtgataggtaccttctggttttattctttcctggaaaatgtgggataagaaaggggagatgtggagacctcattttcaatttctttgcaatgtcaagcccctcttgtgatcaaattgtctcgctgcccaagctagaccctggaggtagggcgagaccctggagccaagtttgccagtgccttgtttctccagctatctcagttctcctagaattgggagggggtctgggtcctcttataccccagcctctatactcctcttggaggcaacccctataccaggctaatacacgcttggcttaaggccccaaagccagaattgtggtcaatgtgactagacttggaactcaccctcgcctcacctccagcctcattcgctgggttcccagggcagtgggaagtgccttgaacaccctcacccagcccgccaaggtctggccctgagcagaatcttctctgtctggcagctgcaggactagcacaccagggctcccaggcccgacgctgtggacctgcttgtcccaaacctcacggccaagtgtccaggccccacgagcagggaagtcctctgcaggcagcactctggatacccggtgtctctggagagcccctgggtgacacggacaagggagagagggtcacaaagccacctcccaccccctttgtggagagaggtcaggctggagggccaggttggggtcctgggtcgcgctcagcctgggctctgaaacggcctcactgggtgaccttgggcaggtccctcccatctctctctcacctgtaaactgagacttcttcttccgctcctcatctgagggttcagcaacattccccttcctctggtcccagatgctagggggtcttggccagcgctgatctgactctctccagacagatcctgtcctcactctacagccttcagagccccccttagcttccttccgacatactgcctgccagccctgtggccgtgtgtgctctcggaagcctccctctgcctgctcttcaggatcgcgggcctcacggggcctggcagtcttcagtcttggtcgccagcacatagcacagtgccaggcacacggcagaagctccggttccctgagttaagactggacacagcttggcgtccccggctctcgccttgcctcccctgtcccctgacccgtctcagatcctcaccgctctgtgctctggcttccctgaggagagaggtgcaagctggcttctctgtgggtacccctgcagccctgccagctcccgggaactctggaaactggtacctgcagggccaggtcagatcctgccaccgcagggcaaggtgctgaagatttttctgactccagccttgaggtgtttgcttaagttgctgggctgctctgcccaaaacatgatcctgcctgcacgcttggcccaggccccacgcagggcacaggtacaagaagccagcaggtgctgataaggctagaggtggcaggattcgtctccttcttgaggagtttactagtgtggaaactagctgctccttagctggaccagctccaaggtgacatcgttagaagggcactttgtgactactttggctttacctgcataactcagtaaatcccccaaatctgtttggtatgagcatatgtgtgtctatacacacaccgctctaagatctgctgaagaatagggtggagctctggtcagatggaaactcagggataggctttaaagggagaacctgggatggagtcgggggtcaaaaggcttggagacacgctgggacccctcctctataaaaacagtgcttccaggacagtccctgt

SEQ ID NO: 41526 - DNA, 1525 bp, Bovine  19866880873576
  misc_feature (1)..(1): n is a, c, g, or t
ncattgaatatacatgtgttaaatatcaagtcacggttggctctgatatatcctgtaaacagagtactatttaaattgaccttctgtttcgtagattttatcattcagaaaactaactgcggagttcacagaaactgaattctttctgaagtgccctaaagcctgtctattttttcattgcttaagaacaattatattttaatgctgttactcaattgccttttcaattctttggatgatgtatctcctttttagccttcatggctctttcccttgtctttaagtgaacaatattatttaagcctattataagctgaagtatgaaaacattctttaaatcattaagcagttcagtcttttgctaaaagcatttggccactaggtcctgttttttttggcaggttttatagatatttgcttactgtcgataaaatactctagatgttttaagagcaaatgtagtaaaatatgacttcttcagatttttctgaaacttttaaagaatgtgctttatagctcagtataaataacagaattctaagtcatataaagtgagttaagttgatacagatgccttctcaagactattttggaaaaaaagaataaagcatgtattttctgtacttccttacatttagtccagttctgcttttgaattggagcattatcaatataattctcaagccaatattccagggcttgttaggttgagggggaaggaatggaatgagttttctgggggctttctcttggctatcatcagtttcttcagatattttggtaaaataattgaccatgatatttttaatagaatgaaaagtgctgaaatgtagaaggagggaatatttatgttttattgggattttgctgtaaacctaatttttctatttctgaatgagagaaaattcatgcaaacccctaagaaagaatttgccttttttttttaatgtccacttaaaaacactccacttgccttattttgaaagtataagctgttgagagtaagagctaactttatacattctttgttattctctcaattttatgctgatttaataaaatttaattttcaacgagacaggggaaagagcaagtacgtgtgaaggtgtctcgtactttacctgttgatcttttgtgtttgcctgtccaaggatttatttacatcttttagaagtgttggtatatatgatacattttagcttataaaaagaatgtgattataaacaaatgcccatgttgctttttaattgagctttaaactttcataatccaatcactattttccttctctactattcagctcttactacacacatgagaacaccacagcacttaagtttcatgattcactgtaactggtgatgctgcagaagtaagacctctggtaatttacaaaaggtatatggttcagtaaaattacatttctgtgtcttggaaaatgtccattaacacaactggcttggtatctatctggactattaaaggacaatagaggtttaaacctctattatgttagaatgttttt

SEQ ID NO: 41527 - DNA, 1638 bp, Bovine  19866880968497
  misc_feature (1)..(1): n is a, c, g, or t
ntgcccagaccctacccttcccccatataagcctgcagacctgtttgccttgcagtcttggagtaagggcaggaattggatggcgacaggatgtgagggaaaaacaacaagccctttatttggtctgggaacttcagggaagtcctggggcttcacagtgttcaccagtagggactgtacatcccattcaactgtttgtctctagacaagtccggtttaagtgtctcccttgcccctaccctcacatcaaggaagtccttcccttttcagaagaaatgcaggcctggtacttccttagcataaatcaaaacataccatttttttcagcctggcagggtggagacataagagcacaaagctagaaagtcgggaaccctttctagctggtctagaggtctgatgcaagcttgggcatttcccaggcgtgggtaactcatccttggtttccacatatgcaaaacagtgatgaatagcccctgtccccgccacagggctgtggccaacaattagatgagatggtgcgtgtggaaagcaccctataaattgtaagcgctctataaatataaagcaccatttttccttaaccttagttagtaacacaactccgtttttcatctacttgctaatcccagggagaccctagcagactagaaactaccaatccatggggttctttcccaaccctaagaccccagcccttcccatatcttctcattctaagcagaagacaaaggtgaactaagcaggagggtagagccctcatccaggaaggctcaccttaactgggggcatcaactataaagattctgctgttggagatggagaacagacttccggttgccaaggagtcagggtcagggaaggaaggattgggagtttgagattagcaaatacaagctactttatataaaattgataaacaacaagttcttactgtatagcacagagaattacattcagtatcttgtgatcaaccataatggaaaaaaaaagaaaaatgtatatatatatatatatatatatatatatatatgtacatacagagagagagagatagaactgaatcactttgctgtacagcagaaattaacacaacattataaatcaataattcaataaaatcttttttaaaaaagagagaaagggaaaggaggaaaaaaatgattctgctgttgggaagcacagggctgggagtcccagctgacccaaattgggatccagagactgggtgtatccgataagccggtgaatcagaggtcctccagacctctatttacaggagaggaagagttcctgtggtcaagtctccggggcagaggaggagaacccaggaaatgggcgtctacgttctctctcctgagccaagccgtggtgactacaagcaaaagctgaagggcagtgttttcatcatacttggggcccacgtgtgggttaaagaccaaactacaatgaatggagaggaccccacacagtggactgcagaataaagtcgctctttcttcctacagcagtctcaagactactggagccctcggcttcataaggtcattcatgagctcagagcctttccatctgttgtttcccgtttgccaggccactggtcgttgtgccccggttgatgctgggtcaccagcatgg

SEQ ID NO: 41528 - DNA, 1784 bp, Bovine  19866881319256
  misc_feature (1)..(1): n is a, c, g, or t
ngagggccgtggaccggaaggactctctcatcacaccagcactgtccacctgctcctacgcgccgtggaacattcagctgcagttgctgagtaggtgaaatcagacttgccacctgtaccatcaaggtgtggaccccactgagcaccaccggacccatctcttacacaggctgaccgatttctcctggtgttcagagtctgtttttgtctagcaccatttgaaatcggttatgatgtagggggaaaagcagcagcctcaaggtctcgtgccaagtctggtcagcagcagcctgtggcttcctggaagatggatgggcagagagagggggagggaggttacaccttttcctactgacttccttaactacatctacaatactttatgcacaggtaatagatcatttagtggatttttagaaacaaatcaccatagtgtacctaatgtcctcagtttgctaaaatgtgatagtgctgtaaactccaaattggtttctgttaaattatctttctgttcatgcatcctgaccttaataaatatttactgtattaaacttaccatgtgtttgtttttcatagattattttccattcataattttatgatgataagtggggccctgaaaaattaatttgctatatgcaaatgttacctatttcataaagagttcaaagtcggttaaagcaaacagatattaaaaatgtagcccgttaagaatgaaattctgtgagccaagaaataaaatgagaaaaacaatgatagagaagtgttgcagacctgagttgaaggggaaactgacctcagtcgcaaataggctgcagccctggagcctttgcagtcagcattcccgcagaaatgtttgcttaactgaggccggtactcaaccgtggcctctagagggaggtgcactgatgaattcagcgatgttaggagagatgcagacgttctctacttttgttcttcctttctatcaacccttgaggacagagtgaaccagttctgtaaaggttctcaagagatgagccagatttgacttcacagggggtttcacttgaggagtcttcaggttggagagctgtgtccccttgattgacctttttgagcagaaagtgcaaggccagccctaatctacctgcaggactttgatttcacatctattctccatacatggtggcacctcaaccacttgggaagctttttaaggtcaagttcctgccagtctccccccagctggctgccctgcccggtggggtggggtgaggtgggtgaagcctctgttgggagaacttccctgggaatggggggcacctcccactgtagctgtagggctgtttggggctgttgactggagaattcaggttctggttcccaggatgtggtgggaacagttaagaccctggattgttttcttcacttctctgctgaggtagctacaacagacctatgggcataaaagctttgggtcaactgtaagaaactgaacagcttctgattcacctactgtgtccctggctccaggctgctgctgccaagtcacttcagtcgtgtccgactgtgcgaccccatagactgcagctcaccaggctcccctgtccctgggattctccaggcaagaacactggagtgggctaggtattgccaataaagcaagtcacccgtggattctgccagcaggttgctatgattccagtccccaaatgagaaagtgccagaagatctgggtttaacacgaaagcataaaaacaatgacttgggacatcttttccataaaagtagtttctggagtt

SEQ ID NO: 41529 - DNA, 467 bp, Bovine  19866881346951
  misc_feature (1)..(1): n is a, c, g, or t
nttgaggaaggccgtgggggaggagagcgcagagacaggtggttgagggggcgaacgatggtgcgggaaggcttgtgatcttaatgcgtatttctttctcgccccttcttcgcggtgtgggcggggggcgcggaggtgcgtgtggaggaggaggtgggaaggctttaggctcgggagaggcaggcgcagccagagatgccactgggcaaatgtccctgttcggtgcccgccgccccccaaattaatgaagtgggtgtggcggtgcaggtagaggagttggatgaagacctggccccgaactgcccggaactggctgcggcagcggccgggctccccgctgcatgtctgggagccgcatgcactgagcgctctgcagcggctgggggtgggggtggcgggtggccatgccctctcatcctcctggaagcttcagccacggggacagctccggagatgggggctgggag

SEQ ID NO: 41530 - DNA, 738 bp, Bovine  19866881398140
  misc_feature (1)..(1): n is a, c, g, or t
ntgggcactgctcactgaaggtctcggtctcccatgccttcgtcagcctgaggcttagagcagtccagggggagggaaaaccaggtttttgagggggagggtaaaagccagagatatggcagctcatctccgacgagttggacctgtggtttgtgctccccaaataggttctgtctctggcagtctctccatggggacagggggtggggtccgtggcagctttgacgatctgtttggatggccctgccctttccccatttttttccctctgtgttcctccgtacgtcccctgccagggccgtggttccagctgtagttctccagtgaggctccctgcctcccgtccctctcctttccaggcccttctgcgtgcagcggccatcttgtctttcttggtcagaaatttaaaatggtttctcttcgtctccagagtgagatcccttcgctttagcaggatgctggaggttgtctatgactagtctcgtcttagctctcctagacagtctcacctttccgagtttgcctaagtggaccaagtattccgggaaaaccaggcaacttactttttcttgccttttctctctgttctcactgctgatatttcccatgcctcctccactgctcccacctgcggcagtcccaccatctcccaaggacctttcctgattactttcacgagaagcaatgctcccaccacccctgctcacgtcaaccaaactcccatatcttcatgcgtct

SEQ ID NO: 41531 - DNA, 757 bp, Bovine  19866881608284
  misc_feature (1)..(1): n is a, c, g, or t
ntttaattctttatttgtgtttaaggagatttacctgaactggcttagaagtccatttgaaatgaataaagaacaaatatataggataataaaaataaacctgaaatttaagacagatagcagatagaaggagaaaatattatagataatgagaattattatgatcaaatatcaaaacactggtttccttactatttgataatttttgaatgaccagtgcaggtattaaccaagatactgtcttaaatacagaatatgcatcagtgaacattagacacaaggttctcaccttcatggaatttatattaaaatagagggaggtagactataaataaatagatgatatataaaggaaataaacagaattatgtatcaaaatgtaatggactaggaaaagaggagacaggatggcatacaacttcagttatgatgattaaggaaaacctatgaagaatagacatttgagttatgactgaaggataagaaggtgtcagcaaggtaaggtgctgggtaaaagcaatggatttgctatgccttaggaatagactagggcttccctggtggctcagatggtaaagaatctgcctgcaatgtgggagacctgggttcaatcctagggttgataagatcccagggcatggctacccattccagtattcttgcctggagaattccaatggacagcggagactggtgggctatagtccatgggggtcacaaagacaaaaggcaagtgtggctggaattttggtgatca

SEQ ID NO: 41532 - DNA, 1524 bp, Bovine  19866880548059
  misc_feature (1)..(1): n is a, c, g, or t
natggacatgagtctgagtgaactctgggagttggtgttggacagggaggcctggagtgctgcaattcatggggtcgcaaagagtcggacatgactgagcgactgaactgaactgaactgaagtatagataatctcctcttatctttcaaacaagaagccagacagacacaaaaagaatcttttttttcagtttccccatcaccttccttgtgtttcatctcatcagtgcatcctctctcctctttcagggttgatttgaggggttgagttaaggaaaagttgcttctgtgtcatgatgtcatcttcagatctttccaaacttgatccaacattgaaggattatcctttccatctgaattgcagggacttttcacatatccttccatcttctatggcttttataggaaaaccctaagcttagactctcaagctttgttctgcctttacactgggaaagtttgggaactgacaaagtatttatttaaaaaaactttctttcaataaaacctagtattagaaaccctcatttctctatgaaagtatattagaaaagtgtaagacccaaaattgaggaataactaccttgttttaggctatgtttaccttccctctgtaaaacaaggaattaaagaatgaagtagctagaaaaacatggaaaattagaatcttaaagggaaaaacccacagatttaatatctcaaataaacttccgctgtttcatcattaagactagtaaaaattctcatgcttagtcactgtgttcctgatgttggtccataattctcagcagaaagcacagatgtggcacaaactttgtatttgactgccactgttttttgctgcccacccatctggcaggccaggagaagataaaagcctgtctcacgtaaaagctcattcacttattcattcatatgctcattcattcattcattgagtgccagatgaatatgaagaagaactacaacagaaataacagtaacaacacaatcccacttttagcccaaacatagtctgtctgtaccactgtagtgtttaaagaagtcttcaagacttctctcagggccaaagcagggcattagtttatgttttttttttttttcgtggtgcagttaacttgagaaaatgctctggggaagcactggttctgtcacatttgctattacttttataatcaggaaaaagagcatcataaaaagacatgattttgacctcacccctggccttgagtttggcagctctaattaaaaagtgaatgtacccaatgtcttacagaataaagcccttttataacaaataaccttttgatggagaaaccacactgtttgtacaccaaaaagtaattttaaggcttatcttgagctaatgccagggtaaatagaagctgaagcttcttgcccttcttctctctttaccaaggaatcaaagcagatctatttcagctttctgctttacaaatattctactgtaaattttatgcaatttgcaaggacaaaatcctttccagtgacatttggaacaaa

SEQ ID NO: 41533 - DNA, 1232 bp, Bovine  19866880577905
  misc_feature (1)..(1): n is a, c, g, or t
ntcatacatgtagaaacacgaattaaataccaatgagtaaagaaaacagtggaataggcagtgctgataacttagaggaatttttagaggaattacccactgataaattatgaagtgaataataccaaactggatttcaaactactctcccccatctttcccccccacacaaaatagtacattaaagtggctctcgtatagtagtaagccctgatattatatttgctaccactagccccatggctttcttcacaagtgaatattacaattaagcattcccttttatggaagtgtcataattaggttagacttgaaatgactttttgaaatgtaagtaagaatggtaattgtgttatttattgttacgctctcaatatctggagctttgctttgcatgaagaaggtgagaaatacagatttaagcaagtgagtaaatctatagctgacatttatatctgtttaccacaaagaaggactgtaaaatctatggaactgtcttgcaaagatacttcctttttgaaaatgccatgtaacaagtttttgttgttattcagtcactaagtcatgtctgattctttgccactccatggactgcagcatgccaggcttccctgtccttcactgtcccggagtttgctcaaattcatgtccattgagttggtgatgctgtctgatcatctcatactctgctgtccccttctccttttgccttcaatctggcccagcatcagggtctttttcagtgagttggctctttgcatcaggtggccaaactaaattggagcttcagcattagctctactaaggttcattaataattggtttgttttagaaagcaaaataaaaattaggtataatacacacgcagatctatgtcaaaatgggatcatatggcagcttttgttaattttctttttgaatagctagaagtaagtttgattacagtttttggcccaaaacactggcttttgatcttctatttgtataagagtgtatctgcatccatttctaccaactactttcttctgctaatgctatgttttctctggttctttgtacattttcattcaagtcctaaatgtggaccttttccaaggttctgtctggactctaacttagatcatttcacacatctttaaatataactcacatacaaattgtatcctaaaatgtcaccagtagtttttatttgtcactgcaatgtttttatgttacttgcccgaaaggtcaaa

SEQ ID NO: 41534 - DNA, 1601 bp, Bovine  19866880680207
  misc_feature (1)..(1): n is a, c, g, or t
nccccttctttgagaaacaattgttgctcagatactgaaaacttcactatttcccctaaagtcactgcaaattatttttcccctttaaggagtactttggtgacacttctttatatttttactttttactttatacatatattgctaatagtttctttttctaattatgttagcaacctccacagtaattgtttttgtaattactgacccttctcactttgccagagataataaaagtggtaagaattatacagctcaattcagtgctatgagataaacaggtgaacattgcttattagttataaatttattttatgtgaattagaagcaataaaactataatatcatactcaaagtttcaaagaaatccatcatataagaagaaactactatcataaaatctaattcaaattaaaattaatagaaataaaaatattgtaaagaaaatacttctggcatggccagttgtcctaccaagaattataaaggtggtgtttgactgaataaatgaaatttgaaaaatatttccctagagtaatgggtgatgtgtttagtaaacaaatggctgggagactgtttgttatgattcaggtcctgttttatttgtctcaaagttttatatatttttggaaaatatatgctactctcaactggactgttaaagttattttagcagatctgatacactgatttaaattcattgtgactttccactgtaccaagtgttccaagctgaatactgaccctattaagaaaagtgatattgcttatttaatacttcacacatttttgcacacacatacatagcagaagatagatacatacatagataatagaggtaaagttataagtataggtagtcgtattttcaaccatgatgctcttttgctgccttccctgtaatattcccctctcaacatgtagtcgtctatgttcttccagaagtgagtcagtttttctagactactgtgaatttgaaataaaaagaataaattccaggctaaaagaactttttatttattctatggttgttcaatccaaaattcttgttctttgttcctccccaaatttcaaaatgcatgactaaaactgatctccatgccactatactagaattgcattatttaacagttttggaaactttatcagttacatttagattggtccccaaaattgggggcaggagaaagtgaaagttatagcaactttccagaatgcctctggatatcagtggtctttctttcactaaatatagatctaacattatgcttagattaacataaatgaagacaaaatgagtcttgatgtacaaccaaattaaattatattttttacttgcccagcttcagagtgaatgcaataaagtgcccacatttatactaaatattaaaatatttatctaacactgactgaataggctacagcctaatttcaaactttgctatcagtgcaacttattgaaaaaaaagagactaaaaaaaaatgaacaaatttgtctccacctgtatttgttattaccttgtctttgaacaatattttatacttaaaaaatattgtccatatattcccaacaaatcaacgagtaggttatagcatcacac

SEQ ID NO: 41535 - DNA, 1288 bp, Bovine  19866880801758
  misc_feature (1)..(1): n is a, c, g, or t
ntgttcaagtttaacagtgtactcgacatagtagagctgctgctatttttattaaacattatacctctttagaacatatttgagataggtactggcccaaactgataactttctccagatcattttgcataatgcagcatctttggtatcggagtgccaccactatcttaaacattctgactgactttgctgagtttgcagtggcaacaatgataacgccgatcgtaaaaagcaagtgcagagcagtgactgtcaaataaatcctaacatgttccttatagccagactgattttttaaattttcctaactagcataatctatattccagttaataatttagtaataatcagctccttatcttctgaaaaggagagtctgttttgaatcacaaggcaactgaccttgaaggtaggtttaatatatgcagatttctcatatcacctctaagctttactcagagtattttcttggttaatttaggtctcagctatgcagccctccttttgtctatcctaacagtaactgatttaattacattatttttcactctcctttagtttggagttttacatttattgtgtaactagttttaaataaaaatatgatgttttaatgagcaaatagaaaaaaatgaatagctgacataagctgtaaatattataaaaataataatatatttttaatctaatttgcctattaacaaggtactatgtatctttctctaatttgcttatttatttaaccttttttttagtagtgatgtgagttatttgcattgatcacattgaaagtggatctaaaataagggtttaaaattgtttccttcaggaattgaaaaactatgacttaagcagtgagctatgggaataatttaattatttaaagggaattagaaaactttgtaagcaaaatttatgaaagttcagttaaattttaaatgttgtccagcaattctaagttaggagtatatatcaataataataatagatatttttaatgttggtaatgactttggtttaaaatacctaatgagttatatgattttcctggtcattgcatgaccatcagctggatcaaagtagtgggggggggggaggggaaagacaaggaaaaattgtttttggttatctaaaaattatgtatagtctgggctttaagaaaggacttacttattaagctctttgaaacctaaaatcccatcccatttcaaacttctttgcaggtcagtgagtagcaacttactttgaagattaaaatacatatttgcatttgttttaatttttaggt

SEQ ID NO: 41536 - DNA, 1139 bp, Bovine  19866880805836
  misc_feature (1)..(1): n is a, c, g, or t
ntgatggagtaatttgtgagaactgagttgtggaatctagggagttaagaaaaaccataaagagtaacctgggttctcttagtgggaaatgagaagctgaaggagaaatggaaactagcctttattcacagtatgctggatacaacatttcatttaatcatattattctccttttaaagataaggaaacgaaaacttaggtcctgtgtcctgcctaaaccatgagttttatagaagagtgccaggaatcagaaataggtttatgttttgatttgttttgctttactcgaaactgtaaattgtctccagttaataaatggagggggcttccccagtggctcacatggtacagtctgcctgcaatgcgggacacctgggtttgatccctgggttgggaagatcccctggaggagggcatggcaacccactccaggattcttgcctggagaatcccatggacagaggagcctggtaggatgcagttcatgggattgcaaagagtcagacatgactgaatgactcagcacacacacatacacacacacaccctaattaaaatttcagcacaattattcagacataaacaactaaattagaatctcatcctgaggaataaaaggagatacaaaataaaatattataaccatcctaacactgagttcctactgagttgcatccaataaaataatttcaatttaggaaaagagtgcagagtcttaaaaacaatataaccagtgtatgaaaaaaaatcacttcaataaaaaagaaagaaaaatccaaaggcccattgtactcttggcatattgttggcagatatttttaaatccaaactccagaacagagtgttcgagctacttaagggaaatgcccaggggcaattgacctgggcctggaccaccactcgggcctctacactggcacagagtactcagcactgaaattgtcagcacagttgaaggtatttacgggaaagccaagattgaaggtgaagggaaatgagatggaggaaatgaaacggctgtattattcaaatgtgctacagacaaattggaaaaatgcactctgtattccaggtaaatgtattaggttaactgattcccaggtgttcttgaggataactattcagcaaacactttttaa

SEQ ID NO: 41537 - DNA, 1016 bp, Bovine  19866880861867
  misc_feature (1)..(1): n is a, c, g, or t
natcagcactgtctctctatttttctttctctcttcactcaccacaactatcactagcctacacttctgtttttgtgtgtctgactcaggtacctctgtgtagtgaggaactcatctgtgtttatatctcaacagcttatgatttaagagcaaaaagctatttttacaccaatttagaaattcaaagaaggactctgattgtcccggtttggatcacatatccatcttttggatactatgaccaggaggatgtagaactgtcattagcacagcctgagatatttcttctctttggctacagaatgagataggctcaggcagagtactttgatatgtaacctgtcataacctatcagagccccaaggatctggaaacaacctcctggaaatcaggaattgtagtgtatcctttagtgtctttttccccctatattctcctctgaacggaaaaggtgatttcagagggcctctcttgagaggaaatgtctttgtgcttaaatttaatggttaaagctatagttttaaaatatattttgttttgttttgtagttatgtttgggctgaattaaaatgatattgttttcctttttttaaaacagtgatgaaatagatatggtattaaataatcagaaaaagataggatgtttgaagtatgatctaaagatattaaattgaactgattaaagatttatatcagttggtgacaaagaattagaaaatatatttatgttagtgatgaattgaaaagacctcttttatctgtctccccaaatcttttgcataaatccaggcctaacttatgctcctccctgtcagtcttggtaatctgtgaaatttcagtcctcatcaacctctcctttcactgaccctactctgcttacttgttttgaactgccacaaagtagaaatttgatcattcctttgaaatcacagaatattgggatgtttatttccctactcttttcttataaatatgtcttggctgtctcacatagcttatagatttttctacagaa

SEQ ID NO: 41538 - DNA, 2064 bp, Bovine  19866880873632
  misc_feature (1)..(1): n is a, c, g, or t
ntttaaatatttgttgatcagattcctcaacccataactcattcactcatgaagcacatacctctttgaatactatatctaatataaatcacaaataaatatttcatgttatttaatggtgtcttgaaatctgcatgaggcatgcagaaaagtttttgaaatggagagaagtcagaattaacagaagaaagaccaaatccactgttttgtatgcggcccacaatgattattaatgaacacatgcactgggacatagataattaaaggagactcagaaaatacaacctagaatattatcaaatgcaaatcctttcattctcagattcttttttttttttttttgagcaagttttgacacaaattataactaaatcttattacaaggcactcaacattaaatcatacaatttttaaactcagaagaaccttaaaaggttaatttaaaaatggaagaactgaagttaagtgatgtaaagtgacctatttatggtcacacaaccagttaatagcagacatagatttactgacctgttaggcctatgccctttataccacattatgctgctacactgttagtaatgtcattatttttgtcattaatgtcatatttagcaataattaccacattttataaagaatttggggagtttgcctcttgccttcctgacccattcattcttttccaccattaactgttaagtggtaatacaaagaacacaataatacctctttagtcctatatgataataagcacccaagaaaccctcatttactggcattgaaggcacccattaaactgattttcagttccctattatccatctctatttcctaccactccctaaaaatcttatatatgggcagagatttgacccttcaaatgaaagaaaaaaaaaaaaggtactatagccctttttaaaattttacatttttcaaaacaaacatataaaataacagtactggggattgccaaatctacagtgacaattcttctattcatttttttaatttacaaaatatcttgttatccagagttattttagccatttctacatctgttgtcagaaacactttgccttcttcctattcaactccaacatatgatcaagatgcatgtgcccccaaaatctgccttccctacactaggcttttcctattttcttaagtaacttacacttattaatgagtgtatgtcacaggttagctttaattactaaatttaatgttttcccttatttttatatagctgtatagcagcagcatcagcttaaacataacttcctcaaagagatcttatctgatctcatcaaacaatgtaaaataaaacctccagccaaaatttctatcaataccatgatacccttttattttaattacatttcaaactctgaaattgtattctttatttattcatttatttagtgccttccccttgcataatgtaaattttatttttaaaagtgatcttaccattttaaataatgttcccctggatctagaacagggtctgcctcaaatcttgactcaacagtaaaatctgtttttcctctaaaacaagaagaaaaagacatggatatctactttgattacttatattcaacatagtcacttatggcaatcctagacaaagcaattattcaagaaaaagaaataaaagccatctaagttggaaagaaagtaaaattgtctcagtttgcagatgatacaatcttatacatagaaatatcgactcagccaaaaactgttagaactaataaattcaccaaaattgcaggatgcaaaatcagtgtgtgaaaatcagttatttccacacaccaactatataaaaaggaaattaaaggaataatcctatttataacagtatcaaagaacaaaatacttaagaataaatttaaatgaggaagtgaaagacctgtgttttatagtgaaaactagtaaaacactggtgaaacaaattaaatagaaataaagtaaaatagaaagatatttagtatccatggatcataagattaatattgttaaaataacaatactacccaaagagatatatagatttaatgtaat

SEQ ID NO: 41539 - DNA, 2880 bp, Bovine  19866880925925
  misc_feature (1)..(1): n is a, c, g, or t
naaaaatgataaatagccacaattgtccttgggaaaactataaagtggttgccaatctaaacacagagattcatgtgagatgtgagtctgctccgcttactagtgtattctgaaatgtctttctcaggtttggacctaaaaggagcattttgaagagatgattgaactaaacttggcatcttatactagagaatgcctggcattctcaatacattattgactctagaccaggcaaccagtgccatttctctgctccagatgaatatgtgttctcctgttgaccgtttgtgcgaccatcaatagacagtatgtatccaatgttggctagtatcaacataccatacatatccatccataaaccagacctccaaatattatcttttgttacctggctgcaagaactagccaaacaccaaagaagaggtcaaagaagggtaacaaaccaacaaaggaaggtcctgtggatgtttgagccaactatttgtgcaatttgcatgtcttccaaatccattatagttggactgtgtctttcatatatgatcccagtgcatgtctaatttctttatttattggaacacaaaatgttgagttggtgaaggaaacttaggcctaatgtttgtttgatgtcttatagccagatgttcaatctttaacagtcattagctaggagctgcttctcaaatggagaatcgttactgacagaggatgacaagacactgctccaaattatggatctgcccaatgtttcccttactggagctcagcagagtctccataaaagcatccataagtgcaaaagacacttaaagtatcattggtcatgatactcaagtcttaggtagcttacacagcagcctagatttgaagaactctctctttttatgagtcctactccaaacaggaacccttgtagtttgctcagcaaaatgatcagaagattgtaactaaatgtggtacatgttgcctccaaaatcccaaaatcccaaaatcccactatgcctctttttttgtggtagacactacaaagtacagcaatttacctttacatgaaagtgaaagtgaagtcgtgtctggctctttgcgaccccatggtctgtagcctaccaggctcctctgtccatgggattttccaggcaatagtactgtagtggattgccatttccttctccaggggatctgaccaacccagggatcgaacccgggtctcccacatgtctgtagacagatgcttttactgtctgagccactagggaagtatgacaaatctattccaaacaagccccagaaaatggaacatcattgcactgatgtgacaggtgcctggaatttctttcaacttaccatataaccttctagcatatctgtacatttctaaaatatttaagatacttatgagttcttgtttctcaaggcaaattagcatattttcatagaaaggatgaatgagcttggagttttgtgacatatcaaaagtctcaagatcttaccaattatatgatgactgaatacatattggtataaatgtaatttaaaacagtgaagatgtactactctatccaggtgaaagtgatctacttctgattgtccttattaatatagatagagaaaatggcttctaagtcaaaaactgcatacagcatacaagaggctatggaatatctatgctgtcatagacccatatctgaaatgaaaatcacagttgaaatcactaccttcctaaagtttatagtaaccctgcagtcattcccaagacccacctagattttgcaccggcccaaaaggagagtgagcacttggtagatagcatcacctttagcatctttgttttgcggtggtggtactactccaataagttcctttgttttggtattgtgtagtgtaggaggaaaggaaacctagtggggatggggtggaagcggcattgcagggggtctccatgttggttgtcttccataaccacttttactccatgagtcaggcaaccattgttgagtttgtaccagttgccaattatggttacaccaattgtacattcaggaaatatggaaataatcaaaagatggcactgcagacctactgaaacacagtgagaaaaagattctgtcaaggctctacaaatcctcatgctgtccagtggatcatagatggtattttaagttcccaggtatctttgttaactcatacttatggtttaatattttaatccaatactcagagagaatgataaatgtgttttcatattatgccaaataattaatacttttatgggttgtttaggtttactttttaagttaatttttctatcttaactgtcttctaatacattattgtaaaaacataaattttagaaatgcatataattaacagttttcttttaattagcctattcacaaatatgctcacttttctttctttttcaagtttgaatccttttctggatcttggcaatagcctagtgttaggtaggtagaatagggaaaaggagtccaaaatggcggtggctaaaagacaaggaaggttcaaggaccagagtgaagacttcaggcagaacaaacagaacaaacagcactcctggctaagcccaatttgcatagggcaggcccaggtggagggaaaaacacagaaaaggaggagccaaagcgctttctcttggactctctctcccgcgtgcatgtgtgcactctctctctctctttctctctctgtcttttctccctccccacgcactcctccactctcttctcttcaagtcttggattctcctgctatcttctaaataaaatagacctgtaacactgatttgcctaagagctgtagcacggtttgtccaagacccaagagctgtgacacgctgagggctttaatgtccgtcgctccaaa

SEQ ID NO: 41540 - DNA, 1364 bp, Bovine  19866880977344
  misc_feature (1)..(1): n is a, c, g, or t
naaaagaggaactgaggtgaaatgtcactttgtagtaaaataggcatttgaacaattgcaattgatttgggaagtaaaagaaatgcagaaagatctaaatgcaggtttgtctaaaatcgagatttcagtaattctctattttaaaagactaaattagaagtactggttttctttcacatttttggttttaatagacattaaaagttaatagaaggcttggctgtagataataaagatttctgtcatttgttgaagtagtgcaaatcaatataaaagctagagacccgcagtcacaacaaagacctcagtatggggctaccaagaaagatgacatctcaaattttcacagagaaaaaaaaaattataaaagaagttgttctttgaactgctagatatccattctactttttaaaataatgtgtcttaattgagtttttattgaagccacctttggagaccttaagaattttttgcaactcacttaggttttaatattgaatgtatctttttacaaaatgtaatgtaccacattgacttgcattaaaaattaaaatattttgaaacctttttaaccatttcagtcaaagtgggttccaaacgaaaaaagaagggctacaatatattgctgtaggaaagtatgtatccatggtatcaataaagtgtcaattaatgttcaaatgaaattagatttgcaagatcaaaaatgatttttataattatagaagtaactaaagtttggatgtaatttttcatagttatttgcatcataaaatagttgcacctcaaactctgtgatggtttaacataatgatattgagataaaaaagtattagtatagaaaattcttaacacataatataacatctcaagctaactttctaataagtattgttgatttctgcatgggtcctccctaattaaggagctgcttttatttttttctatctcttaaatttttagccttgatgtttagagatcaatttgcttcagacgacaattctgaaaaatccacgccacaatgaatggggccaaagtacattctagactattgaaaacacatagctttaagaagaaaaaatggtgacagaggtaggaaatgctgaaagacagagatattaatgtactctatattactgttactaaatgcatctgttcagcatggttcatttggtttctgcttaaattatattgattgttataaatatgctattgtactattctttttcttcttaccatcactaaataatttagaaataataaagaaaaatgctgactcctcaaactaaagacagttttgcttttacaaaattaaaataaatgtcttatttaactatatattttaagtagaggaatatcattagcaa

SEQ ID NO: 41541 - DNA, 2866 bp, Bovine  19866880988579
  misc_feature (1)..(1): n is a, c, g, or t
ncccctgactcctatattcctatgtacagtgggctttagaatgcaatggcttttctcttaatctgaagggatcagtattacctggaatgtataatttagctgagcctctgcgaagccttataatgacctcagtcgttttgttcagccgttcttcaagagcaggcaagggactcactagtgagcatgcttgcaatactgatgtttgtactgtggaaaattttcagaagggaattctatttccctgagcaagtttccaagcactaaactctctttcaaataataaaagaggttagagactaacttagggaacagattcaatttttcaatgtggcgttaataggaacaaagcaaagagacagattgcattgacaaggaaacaaaaatggataatggatttaatggcttgagttctaatggaaaaactaacattctctatgagattgtcatatttctaaaaaatgtggctacccattaatagttcctacatggaccaaaaaaaaaaaaaaaacttatatggcattatataaatcattaaaatttttcagcaaaattaaggtgaaaaatatttatggttcctttttttattattttcattatttatattcttagggatttcttatatactcaatatcattgatagtaagatttgctgtattgaattttcacttgtgatttttaattttttaaaataaaaataccaataagaaggtaatttccatgtcagaaaaataatttgtggaataattttggtagatgcatatgatgaaaactggtagaatcagtggatgatcagatggctaatcaagggacattttcagttcaaaattttgttatttgtcccagaacaagtttccaagcattaaactctctttaaataataacagaggttagagactaacatagagaacagattcaatttttcattgtggcgttcatagaaacaaaacaaagagacagattgcagaccaccttccctgcctcctgagaaacctgtatgcaggtgaagaagcaacagttagaactggacatggaacaatggactggttccaaattgggaaaggagtgtgtgagtgtgtcaaggttgtatattgtcaccctgtttatttaacttatatgaagagtacatcttgtgaaatgccaggctggatgaagcttaaactgggatcaagattgcagggagaaatatcaataacctcaggtatccagatgacaccacccttaatggcagaaagcaaagaggaactaaagacgaaagtgaaagaggagagtgaaaaaattggcttaaatctcagcattcaagaaatgaagatcaatacatctcgtcccataacttcacggcaaatagatggggaatcaatggaaacagtgacagattttattttggggggctccaaatcactgcagatggtgactgcagctatgaaattaaaagatgcttgttccttggaagaaaagctatgaccaatctagacagtatattaaaaaattacagacattactttgccgacagaggtccatctagtcaaagctttggtttttcaaggctgagtgctgaaggattgatgcttttgaactgtggtgttggagaagactcttgagagtactttggaagctgcaaggagatcaaaccagtcaaccctaaaggaaatcaaccctgaacattcattggaaggactgatgctgaagctgaagctccaacactttggccacctgatgcgaaaaactgactcattggaaaagaccctgatgtgggaaagattgaaggcaggaggagaaggggacaacagaggatgagatggttggatggcatcaccaactcaatggacatgaatttgagcaagctctgggagatggtgtaggacagggaagcctggcatgctgcagttcacggggtctcaaagagtcagacatgactgagtgacctaacaagacaagtccctgttacataaaatattcatcgaagaccataaaatctttgaaaatcctatgattcatgaactcatattaatgtatatatcctcataagcccaaattttgtctataatttaggtgataaaaggaaatttgaaaatatttgataaaaacacttggtttaagctatcatgtcataaagtaaatagagggaatgataacaatgaaatgataggtagagttaatattttatttgatcaaatgaaaacagaaccacattttaagtgcggcaattgatcctagcagagaaaaaagcatgagaactcaaaaggctaggatataatattaatttgatattttgaaataagggcttcccaggtggctcagtgttaaagaatctgcttgccaatacaggataggcaggctccatccctggttcaggaagatcctcttgagaatgaaatggtaacccactctagtattcttgcctgggaaatcccatgaacaaaggatcctgttgggttacagtccatggggttgcaaaagaatcagacatgacttagcgactaagcaacaacagcaaatttgtaaataaattcagttttgtcaaggtataaatggaattttgattattttatgagagagaaagaaagagtgtttgctaatgggaagggaaacaaaaagtaatgttagaatgcctaataagaggagacagacaatggaaaattataaaatagaaaattattttcaatcctacttcatttcaattctatttcaatatatgttcaagtgcctgatgagctatgtatcagctctgtagagtggtctatcagctggtttcaatgagtttgccatagtgttattgtccttcaaaaacaattaggcaaattaaggagtatatcaatgaaaataattaaatgtacaagtcaaacataaggaaggagagaaaaaacat

SEQ ID NO: 41542 - DNA, 1424 bp, Bovine  19866880992568
  misc_feature (1)..(1): n is a, c, g, or t
nttccaggtccactaggtgaaaatgagatgatgaactaagacttctgagcttatctgtaatttaaaaattaaagaacagagagttgaacagatttttcagaactggcaatatttttacacgtgagagaggtagtctatacttttctgggtggaaggaaattctgtgaatcattaagttaaaatcaaattgggaaaaaggtcgattgagggattcatttttcattaaatatatacctctcacccctttccttacattttacattttaaagaggttgttttggttgctacatttttgttttctttctacctagttctgcttttctgtcatggcttacaatatcatctttcaaagacaatgctgaaagttctctggggacttgtgttgctttattgagtaatctttgatcagattgtaatggaaatccctgaaggtgatataaaatgtgtacatatatttgaatacataaaatatgtattttttttatttcatccatctttgacatgtctaaatatggacttatttagcatcttggcctcaaaacaacaggctcatcttgggggcatatttcaaaagagtgatgattttaaaaattgatgatgaaaataattggatttataaattctttgaaaatcagggatcctgtctcaacagcaatagtaaaaactgctactgaagtatacagaaactgagactaaagatgtataatgtccttgtcctattaaatatgttttaaattgtgttaaccatcatgatattcacaagcttggatggcttaaatgtttactactaatacagttgtttatttaaactgagagataatttgtatataaaagaaatatgtgattctacctctattgacatttataagtccaacgagcctagattttatgcatatattatgtgttcttatataggttcatattacgttttgacagagagcagggatacaaaaaattagggttatccatttgttcagatgtcactcattaaattatcatttttttcccctaaggctgtatttacacttggattgttagatggggtgtgctgaagaacaatctctaggatttgaaacaattgcaaatagccatattatgataagcagtcggagccaataagctgcttcaaagcaattcccttctgttttcttgtgaaaacaaaagcgatagtgagggttttaaaactccttttcagaaaaaaaaaaaaaaaaaaggcaaacaaataaattgccaccaacacaatgcaaataaaaatacttgagattacatttctgagctcctattttatgttatatcttcttttttgagaggtcagtcagttatgcccgtaagaaataacataggaagggaaccagaaaacacagtttactatagtcttagttcctagagaaacagagttaccacatgccacaagggaccacaca

SEQ ID NO: 41543 - DNA, 1152 bp, Bovine  19866881141138
  misc_feature (1)..(1): n is a, c, g, or t
nctcctgtctgactctttgtgaccccacagtactgtagcccaccaggacatctctgtctatgggattttccaggcaagaatactggagtgggttgccattctctgttccagcagatcttcccgacccagggattgaacccgtgccttctgtgtctcctgtattggcaggaaaattctatactacagaaatacctgggaagcccttttataagatacaagcatataaaagtagtgatgtttcctgatttagagatttgcttctgagaaacaaccataacaaaatccttaacttggcaatgatggtctattcccaattcctgtattttagaagatactgaaagagaaatacaatgtaatgagttccctttaaatcttcacttacacgcaaagtataatgccttcttaatcatgcctgaatattgaacaatttttccaatagttcctcctgatttgatttcagctgagtctgccacggagaacagaatctgcaacctaacaggaaaaattggggcagatgttacagctagactgaacagaactgacatttgaaggcttttcataattttccatccctaatattattgtcatggaaatgagagaagaaatggtgacaatgcctttcagtaagagacaatgcctttcagtaagagagcccagcagtcctctatctgatatgctaatcatgaagacatagaaatatcttaagcccaatgggtttgtgcttactttcccccactgtaatgcctactcaaatacccataactggctttttatgtgctgataaatgtcattttatttgaagcagataaaaaagctttgccatttaattgtaatataagttagttttggctatgaacaaaagacaatagagtgcaaaggcttcctatagggacacgtatttgaatggaaacttaatgcccctggtcttgcttttagctccatcttagagacaacataacaggcagtgtgtggactcccccatcccctgtgaaaaggatctattgatatattgtaaggaagatatatctgtagtagtagtggtggtggtagtcgctcagtcgtgtcccactctttgcaaccccatggactgtagcccaccaggctcctctgtccatgggattctcctggcaagaatactacagtgggttgcca

SEQ ID NO: 41544 - DNA, 1016 bp, Bovine  19866881224611
  misc_feature (1)..(1): n is a, c, g, or t
ncgcttctgatactatgaatggaaagctgtggcctctggcagagctgtggggagggcgcgcgctggcgcgcggaacctgcggggaaaaggtcttgcagatctcagctcctagaggccctgtttccgagggcagctccacgccctccgcctgcacagaaaccttccccagacgggaggtgtccacttcctgcccaggtgctccacctctgttgacccggtgtcacagccgtcgcacccacattggagccggccaccgcctgggagggcgcagttagcggcgacgaccgcccacccgcacgcacgcttccccgccgggggttaaaattaaaaaggaaaactaaaaaactcgcacagttctccacctgccgatcctttctagattgggcaaagctcacagaccccttctaagccactcagatgtaaaggaccgcgggcgggatatggccacgggggtttcaggggcaattcaaagcctggagctgagctcagcgcatcccccacctcaacctttggggcgaatcaacggataaagcagcctccgccagaatttcaaaaactccctggactccactgaatgttttttgcatcagaagtgaaggattccagtcactgggactggcgtgggggtcgggggttgggggagaagagggtgctgccggtggaggtggggtgtgtgtgtgtgagagaggaacattctaaagccatcctgtcttggagtgtagggcccggggctttttctcccgccgccgctcactgccctgtaacccagtctctctccggaaaagcacagccctttggtccctagcgcagtccaaagcgaggcactgccgaagctttaaagctgcgaggcccccgactgtgggaaaggggatgataagccatttcatagccgccgactctacatagtagcttcaatgaggtctgcccctccgggctggagcagtagcggagtttgtctccgaatcccgggactttggtaccctcgtctgtattggtttgtcggacttttcaccggg

SEQ ID NO: 41545 - DNA, 745 bp, Bovine  19866881314298
  misc_feature (1)..(1): n is a, c, g, or t
nctggatggcatcactgactcgatggacgtgagtctgagtgaactccaggagttggtgatggacagggaggcctggcgtgctgcaattcatggggttgcaaagagtcggacatgactgagcgactgaactgaactgaactgaattcaatctgccacaggcatcctctcaattttattggcaatttgattctcaattgttcttcagtaagagatagtgtgttggttacgactgaagaagagttctatatctttcgtttgttctactgttactgttcttctaaagtagatcattgttgtgcatgagaaataggagaatctaatactggaaattataataatcattaacatattggacagataagaatgatttctagtgttcccgaacgcataggcgaatggaaaactaaggtttggcttaacacagaaaagcaaattcaaagatctgcatttccctaggaaaactacagtccttataactcaacggttgaaagatttatttccccgtggaccaaggtttcagcagatcaattaatagagcatgttcttctcttctgctgccatgtgcagaaagaaaaatgtgttgattatgccatttcggagcactgtatacacaaagtcaactttacgggctgggctaacctacagtgcaggacttagaaactgggacccagaaaataatcagtctctgtccacctggcagcgtgaaccatcatgaagtccagtggttggcagacaggggctggag

SEQ ID NO: 41546 - DNA, 804 bp, Bovine  19866881364327
  misc_feature (1)..(1): n is a, c, g, or t
nctgtatctaaaaatttccgtttttctctcatgtttgtctgtacactttatcttctgctgtgtcatatcttttactttcattgaagctttatgagtgtatcccatggcattttttgagttctttcaattatctgatgctgtataatcatcagataattgcgccatctggtaatcatcagataattgctgcagctggtcttctgagcaggttacaagaagtggcccttggctgtgtcattaaatgatggataaggctttgtttggaagaaaggaagatgaagaaatggcatatgaaggaccttgatgccaggctagctcccctacgctagccaacatttgaccattgacagcagggtaaacatagacagcttggaagtggctaggcctggagctgagggaaatacctaaatggatgaaaaaagaaattgagacagaaggaaagccagtcaggaattctgtgccttggctgctttaggctgctttggcaaaagtgagactaagaaaaaacacaagacttctcatctgccaacttaccaccatcgattatgtctgtaatgagaaaggacatgatgaaagcagggagtctaatgttcaaatctttttttcatcagttgcataacagataatcattaaaaagactattcagactttgggtgtggtgaaggggaaggtggggattaagagatcccctaaacatggaaacattcaaaatgttcatgcagtgtatttttgtagaaatgtgggtctcctaatatgttgagttggtgaaatgcagagtcatgcaaaaataccttaagagaggga

SEQ ID NO: 41547 - DNA, 698 bp, Bovine  19866881423287
  misc_feature (1)..(1): n is a, c, g, or t
naaaaaaaaaaaaaattcaacactgtagcttccaactagtatttattttatttttcctcccattgcattttttaaagcttaactttccacaacctctctctagataaactttaaacaatacatattataaatacttgaatatctataaaggtttaaatctattaaatggtgaaaactcattcttcttcccagcttccactagcacccagctctctttcccagaggcaatcattttcatcaccatgtgttcttccgaaggtggcctaaacatgtttaagcatatgtttatgtcctgtttgttttttacacaactgattaattgcagtgcatcttgttccgtgtgttgcttttttttttttttaacctgatgttaatataccttggaggctgcagaatatctgtacatatgaaaacacccaggtttatttttttgtttatttgtttgtttgaagagctgctcagcagtcattgcatgtgactactatcattatttacctgtaaatgagcacataggtgtctcaaaatttgatatttcagtaataccaccatgaataccctctacataattcatttggcaagtttaagatgggctccccaggtggtgcagtggttgaagacgttgcctgtaatgcaggaggcacaagagatgagggctcaatccctaagtccagaagattccctatagtaggaaatcgcaa

SEQ ID NO: 41548 - DNA, 1516 bp, Bovine  19866880504400
  misc_feature (1)..(1): n is a, c, g, or t
ntggtttgatggatgtgtggaatcctatttgaatgtttaaatggcagtgttttgcaaatggaatgcattagtgcttaagcaccaatatcacctgaataaatccaagcttataagagtacaagcctggatactctctttgtatatgtataatccaggtgattttctacagataatgtgacacaatattcctttcttcctgaaacatgctgctggctaaataaagcaagaaagtatcacctgttcttgctaaattgaaacacatgaaataactgtgcaccttctaacaaaaaagacatcaaggaaactttgagttagtacttttaaattttgtttgaatcagatcagatcagatcagatcagtcgctccgtcgtgtccgactctgcgaccccatgaatctcagcacgccaggcctcccagtccatcaccagctcccggagttcacctagactcacgtccatcaagtcagtgatgccatccagccatctcatcctctgccatccccttctcctcctgcccccaatccctttcagcatcagagtcttttccaatgagtcaactcttcacatgaggtggccaaagtactggagtttcagctttagcatcattccttccaaagaaatcccagggctgatctccttcagaatggactggttggatctccttgcagtccaagggactctcaagagtcttctccaacaccacagttcaaaagtatcaattcttcggcgctcagccttcttcatagtccaactctcacatccatacatgaccacaggaaaaaccataagagtatagaaataaattattttctttcttcctttatctacttatattgaattgggaatgcttagtgttttgttgtctataaacatattaaaatattactatagccaaaacccatcactttttttttgccattaaaataatgagactttaattacaaaacttcataagatattacatgtagtagaaataagaagatgggaaatttgctgtaataaatgctttgtttaagtttacactttgtaaagaagtgtcacaaggcaagtttaatgaaagctgtatttttaagtaaagaataaaataaaaggcatttacaggcaggaataatttggatgacagtttggatgcaaaagctggcaagataatcataataatgttaataataataatgatagctgataatcatagaaacagcaaatccacatagaggaaatgcaaatacatgaggttctaataatccttgatttgagaaaaatctataaaatatatgtcctttagtaatgacagcaattcaacagttagtgttcctgagaactcttgatttttgtttgtttcatgtttgtaatttattttactgcgttccattagggaagaacgctgctgaacttcacagtgaggattttggtgggccagtgtaccaagactgagatttgaaaccaagagtgcattgatggatagtatgcatttttctttttaatggaaggattgaagtcgatatcacttaaaacatat

SEQ ID NO: 41549 - DNA, 1262 bp, Bovine  19866880581967
  misc_feature (1)..(1): n is a, c, g, or t
nagaaaacccctggggtcagagttcagatcattattcttcctctgacttcttttagtgccatgagtgaattacataatcacccacagaacaaagaaaaatggagaatatcactggagcttgacacataagcctaaaaccatacctgttgcccattccttgagtctagtaacatcatccacagtgttgactccaaaattcccaaaagtcacttgctcactcaaatctaaagctaggattatttcattagcatagtaagtaattcgggtccagcagacccgaatgaaaccattacagcttacatttcaaaagcttcttttataattaataagttttgttatgtattcaaacagagaaggattagtattagtagtagttaaactacaaaatattagtggttaaacatatcctaggatttttctaacatacaccaatcaaaatgatcataatattttctctacttcctttcagtttatgatacttaatattctattctaaatggtgataagacttaggccagttcaagaagatccatgtcgattttttgcagctgtaaacatcatctctatttttaattcctcaaaaatagatctgtgtaatcaatcctgacctttgcgtaaaatcactctatttccaactgtcaactgggcatcatcactgactggttcatcttctccaaactctagattctatttccaaacataattgtcttccctctttgaatcgactcaacttcttctaatttgaataatatatgaaaatgaatagaacaattcctggcatattaaccagtgcttcctaagagttagtttcttttatcaaattccctatttctataataccctacaatgctgttagttcccaaacttaatacctcagatcttaggctataccttctgctctattgtctttatcaagccactagcacttctctattcctgcttcttctattgtaagccagctttcttcatacctggattactgcattgttgctattgttgtttagttgttcagtcgtgtctgactgttttgtgaccccatgaactgtagcctgccaggctcctttgtccatgggattttccaggcaagaatcctggagtgggttgccatttcctcctccaagggattttcccaacccagggatagaacccatgtttcttgtatcagcaaggcaaattctttatcagtgagccactggggaagcccaaggattactgcattagcattctacaatttacctccatctaaattcactattcccatc

SEQ ID NO: 41550 - DNA, 837 bp, Bovine  19866880665698
  misc_feature (1)..(1): n is a, c, g, or t
naaaatagcatagaaaatgttaaatctctatctttgaagaaagttattgaaggattttaatggcacaaaacctaacattttggtctcaattaaataattggaaatacaaaaaccatagaaacaaaatactataaactatagggtaagaagagaacagaaagttcccagccagggattttgtggcagctgagagctgtgcgctgtgatgtgcagcagggccgtgggattagacacagctcctggagggctgctgtaaattatacaccagcatatgtgcaaggggaagaagcagcccattagtaaacctttcaaatatagacgggctcccaagaggtcagtttgtacattattcacagaaataactttgactgcacaaagatttgtggagcatttcaattgccctgagataattaagaatttgttcagtgaacaaaaatggaaaccttaaaatcacagtggctgaacaaattattccaaaatggcttcatttatttgatagtaaaataaatctgggcaaaaattaacaggaggttcaactgtggtcacttaaaaaactgtctgaaagaatacaaaacaaagaacagagagccattgagttgttgtgttcccccttcaaagaaggctagagagcctccattgataattacaacacaacatgtaccatatctgattgaatttcaatgtatttcttggcttgtaacttggaaacttctcaaaatagattccctataatcatagcattggtacaatctgctataatgctcaataaaagcagttgcgcttggacaataagcaacatacaatattcatttctgctctgtgactgagtggctgact

SEQ ID NO: 41551 - DNA, 1134 bp, Bovine  19866880732625
  misc_feature (1)..(1): n is a, c, g, or t
ntaaaaatacctcaaaggttaatcttaaatcatattttaaagatcatcaaaattatactgaccttagccattttatagcactctcatcttctgaccaaagaaaattctcctgatttgtcactttacatttacaattatatgtgattaagcaagatttgaccaagaagtgacaggtcagattttctcatggtatgttgaaaatgcggcactgctgcattgcatatgcaaactgtgacactgactcagacgtgtatcggggcagaactgatgtcatctgtctcaaacaatggagaaagattctcagcatgtggcctagaggctatatcatgctgacgacaaaatggccaacatttattgcttgaggtcaattcaataatataataggattagccatacatgcccccactttcattaagcattatttgcttattcacttctataacatcgctgctttgttgccgtttttagccttcttattgtatcctcccttcttactcctttcactggactggctacactttagatatttggcatgcatctgtgtgtgtggtgctccaaatataaatgttttctcttaattagactagccacattagtatgggtttccttttataggcgattttcatttattctgtagttaaaatatatttggaatatcatcaaacagaaaagagagaaatgagacatttctttgtgctgaaatgtagcattcttttgtttcttcttccataccatattttactgtttttctgtgtatactaaacttgtaccaatcatgttttaaacagtagttgccatgctaagcaatggagataaaaatataagggagaagacatgattgtgaaatagacaaagatcaacacaaatatagacaaaataggtataataaattgttacagttgatgaaatagattaatgagctataatcatggcaaatggatgaggatatcctcatatgaggataaaaagagatttcaaataaaggttgaaaagttaaagcaggataggtattcattagctgaaaggtgagatatgataatgtaggcatactgctgctgctgctgctaagtcgctttcagtcatgcccgactctgtgcaacccccacggactgcagcctaccaggcttctccgtc

SEQ ID NO: 41552 - DNA, 836 bp, Bovine  19866880757789
  misc_feature (1)..(1): n is a, c, g, or t
naatggcgatgaagaaaatgacttttaatttcatgacttagaataatgtttcagtagaatatagggggctacaagtgggttaaaaagtgctaacctgtaaatgggtactaaagaaatgaagtattaaattagcattttgactcattctatatcattttactccctttacagaaaaaaggaatacctaaaattgttccatgtaactgccttagggcttaaaggaaaaaagaaaaggggtggagaaggaaagtaaatagaaggactttctagataaaataaaactatgttgagaaagtcattttgtggatagccattttcacggaggacattatattattagatatgctttagttaaagtaaaatcaaatagcagcatatcacagataatagtgttatagtagcacagaaactatatatgtctccttccaaagacctttgctatacattgtcttatgtttgccacaggaccattaaaaagcatggctaaatgagaattgaaattcatggaagtgtgcctaaattatttctagaaaagttaaaaagtaccagagccattagggtttaaaattaatgtgtgcatttttcttattaataattatgcccatttaaaacaaccattactcctataatgtgaatttaatgagaaaaatatacgagaatattattaattttctttctgttaatttaagaagaccttttgctggcatctgatgtaggtatcattaataggaaaaaatcaaagtcaaaaaagttgataagaattcaaaagtaagtttaactcacatatagcgtaacagcatactgccattagaatattagaaaatagtatacatata

SEQ ID NO: 41553 - DNA, 1338 bp, Bovine  19866880797168
  misc_feature (1)..(1): n is a, c, g, or t
ntgtcactttaaaagctgaaaaatacagttttttgtttttagtcaatggaataatatgcatcacaaagtccattattatttccagaaaacctacatcatttatccctttcaattatcaagcatttcaatttcctctgataatttgatcccaaaattaaaatgcatgttgatgagatataatccttagcttttttttttttttctgttgggctgctcaaaactgagagaatttaaaaccttattcttcctagcttgattgaacccatgagaaaatgttcttccttcttaacagatcagtgtaaaatattatccacagggacaccaagcttacatgtgaatatactatccctccattgttaacaaagataaattactacctcattatttctccctgcatgacaaatcagctctactttttaggctgcttcaaatccacagatgttttaaaggattgctctttcatttgtgttttaggtactcaataattctgaatcttgatttatattggtggtcttctcagagaatagcatatgcgctaaatgaaatttcctgtgatctactgaggtgccaaatctctctatttgaagacagttccttctcttttttgaatgttataaaaagaaaggttgtaagttctttgaatttgacagtgaaatctgcagttgcttctgatggtgtgaggcactattagtcaagtttctctgattcatattgcttacttctttaataccagaaattagcatgatttagagttcattataaaaaagtaggtgggggagagtattctaggtttttggtaaataagtcgtcatctgaattttaatatcttcaaatactatttaaaaataaaatcacttgataaagagagcaaacagaaccatctgtaatccacgcctatagtatagatgatagaacatactagaaaacttaacttgcatgtatataggtgaaataaacatcccaaaccaggagatccacctctagaggccaagatggaccagaaagtcaggtaaacatcatgccaaaaatagagttctgtgcacctaggagtaaaaaatgagaaataaaatgatcatcatcctcaagaaagatggctgcccttttggggacaaaatactgagaagaatctgatacagaaatatggctctgattcagaaaaatggctacagaaaaactgaaggcagcggagttaaaagcatgtgaattgcagttttgggaaagcacaactttgtaagagggaagagacttttaaaagtgcttctttagtgaagcaaaagaaagaaacaggcagtagagtttaaaagatcctacaaaagcaaatcacaaagctagaagata

SEQ ID NO: 41554 - DNA, 1590 bp, Bovine  19866880873698
  misc_feature (1)..(1): n is a, c, g, or t
ntgttgcccccttctcctcctaccctcagtctttcccagcatcagggtcttttccatgggtcagctcttcccatcaggtggccaaatattggaaatttagcttcagcattagttcttccaatgaatattcagggttgatttccttaggactgactgttttgatcttcttgcagtccaatggactctcaagagtcttctccagcacctgagttcaaaagattcaattctttggcactcagccttctttatggtccaatactcaacatccatacatgactactagaaaaatcataacattgaatatatggacctttgtcagcaaagtgatatctctgctttttaatacactgtctaaatttgtcatagcttttcttccaagaagcaagtgtgttttaattttatagctgcagtttccataagcagtgattttggagtccaagaaaatagtctgtcactgtttccattgtttccccatctatttgctgtgaagtgatgggactggatgccatgatcttagcttttgaaagttgagttataagcgagctttttcactctactctttcactttcattaagaggctctttagttcttcttcattttctgccattagggtggtgtcatctgcatatctgaggttattgctcccagcaatcttgatttcagtttgtgcttcatccagcctggcattttgaatgatgtactctgcctgtaagttaaataagcaaggtgacaatatacagctttatgtattcttttcccaattttgaaccagtctgttttcccatgtccaattctaactgttgctgcttgatatgtactaaatcaaagtaatttcagatcaaatttgccaatagatacctcaaaaataagtacttaagacactcttatgttaaataagagaaaataagtattcatggcttaagtgattttcttgacaatcacttatgtacaagcatttcatggtttgtatcagagaaaacatactcagagccagtactatacctgactataataagtgaacctaagagttcagccagcctcaactacagcagtttcattcagcaggatcaaaaaagccatttgccagcatgatgaaaccttttctgtgaccatagtctgcaaggctcagaattacccagcaattcaatcttcattacctctctgtctttaaagtagaaacccacttggctcatattttaacagtacatccctataataggatggctatgctgagatcctgggtagtaaaaaagtatgccaaggtgatttggatccattttgatactttctgaacctgaactccatagctgcaaggtcaattttccttaccactgaatagtttgtacctagagtgggatataaaagcctattttctgatgtattggcacccttttacggaaatgaaaatccaaggttatatcactccatgtggaaaataaaaagcttatggtatctcttttagatgagggtttgtgttgctctccttgatcattttctgagcttttgttactgtgctgagtgccatcacccttcttagagatgactgcatatttgagtctgaagcacttgtgggccctttagataaaaaca

SEQ ID NO: 41555 - DNA, 1111 bp, Bovine  19866880902639
  misc_feature (1)..(1): n is a, c, g, or t
ntcccttgtaattcttattaggtgtctaggccttcctcccaagcccagctctgagtaaaagcctgttttgatgctcttggaagctatttatcactggcctatcatttttcttcacccaccaataaaagtcctcttattaccagaccatgacttcccagagaacagtttatatattctaacttatatatatataatctcactctccacttcaactgacttatcaatatattgactcaataataagaggtctcttcctaagaagggattagattactaagaaaaatatttattaattacatcaccaactcacattcatacacagaagcacttatgctcacatgcacataccacctgaaaatacatcaaagaatatatataccagacatgaagataatcatcttatatagaaaatgattttcctctctacagtaggattcaaatagggtgattttaaacagaaaacactcctgtatatattattaccagaatatacaatttataaacacaatttcagatatatttccattatataagaacaaatgttcaaatttttaaatgatttccatgcccaagttatatcaatcaattattatgttttcatatagtatgtaaacttttcttagagttctggtaaagccaaaatataaaaagattagatgagaactttctgaaatggaagttgcttattgaaagttttagttaatattccttaccaagcacaacatcatgtatgttaactctgacaagtagaaataatggcttgtctattcatcagcccagtgactgattctggcttctgagaaaaaatcagaacaacctgttaaccttagaaagatgtttcatttccttacactcccatatttgcatcacgtaagcaaagacagaaagatcagtctcgaaacagaagagaaataaactgaaaataaaatggaagcatgaatgactctaagagctatttcatattcatctaatggtttgtcacactgaacacctggaattgtatgtgaaaagtacagaaattttactgttacacatgcgtctatcaagtttatatgtttctggtcacctagcagtatggagacaaaatgaaaaaagtaaataagacttccaa

SEQ ID NO: 41556 - DNA, 1300 bp, Bovine  19866881002108
  misc_feature (1)..(1): n is a, c, g, or t
ntctcatgccactcatctgaatttatgtgactttctgtctttaaaaaatcctcagaaatcatgcaaattaagttttaaacattaaattgaccctttgtgctaacatgcttatgatttactaacttcactcaaatgtatagagcttccagctggcatgtcaatagactcacatctggttgtttcataaaatatgagacaggtttcctttcagttcctaaagtactggcattccagtgtgaaaatatgaactgtaagtagactatgtatcaagtgtgcatcatggcaatgctataggaatgtgattgtgccacctaaaatctgttattacagataaacactagtgtttaaaatattccatgtaaaccattttaacatcagttgcaaaccagtaatagggttagtcgctcagtcatgtctgactctttgcaactcccatggactgtagcccgccaggctcctctgtccatgggattttccaggcaagaataccggagtgggttgctacttccttctcctgaaatgtgaaagagtccatggtaggaatagtaggagacactgttcaaactgatgtggtcatttctttcacttcctattgagatgccatctgtcttagtccattcaggctactataataccatgactgaatagtttataaacaacataaatttctcacagttcaggaggctggaaattccaagatcaaggcaccagcatggttgtattctgttgaacagttctgggttgcagcttctcacagtgtccttacatagtgaatggggtaagggatctttatgggatctctctttcaataacactaaatactcttgcctggaaaatcccatggacggaggagcctggtaggctgcagtccatgaggtcgctaagagtcggacacgactgagcgactttcactttcacttttcactttcatgcattggagaaggaagtggcaacccactccagtattcttgcctggagaatcccagggataggggagcctggtgggctgctgtctatggggccacacagagtcagacacaactgaagtgacttagcagcagcaaatattcattaaaaggactgatactgaaggttaacctccaatactttggccaactgatgcaaagagctgactcagaaaagaccttgatgctgggaaggattgaaggcaggaggtgaaaggggtgacagaagataagaaagttggatggcatcaccaactcaatggacatgagtttaagcaagctccaagagatggtgaaggacaaggaagccggcatgctgcagtccatggggcagc

SEQ ID NO: 41557 - DNA, 910 bp, Bovine  19866881267522
  misc_feature (1)..(1): n is a, c, g, or t
ncttgattaatctaaaaaaattgaataattccagggccactaaaatccctaattcatacatatatgttttgaaacaggacagacaaactaagttatggcagtatttctattttaattcaaataagtagttgtttaagtcttaattttattttcttgtatctgaaatggacttttattttttataggatcttactatttgaatcactctctgctccccatcagaatctctagtctaatgatgagtacaagataataagtgcaagtttcatttcaacccttgtctgtatttcctgttgtataaacaaaaagaaaaaaatgtgagcaaagagaacatattatgatcagtatgttctaacttaaaaataagatatatctttacagttagctacctaattattttcttagaaaactaaaatctatttattgaaacatatatcagtctacatctaccaaaattacctctgcatgctctttatcaggaacttccctggtggctcagatggtaaagaatctgcctgcaatgcatttcttttttcaggtgcataaacacttattttaaaagaaagaaaaacttagacctcaaaaactttcatattaaaatgataatagaatccttcatgcaagtcagacaaatgtgttttaaaagagttcttcattatacaagagccatgaaacacaatcaatttccaaactgtgattcacatccaatttaaaacatttttctattatatgcatacttggtgacactctctttttcaactttgagaataaaaattacagagagaaaagagtagaaagcaagcaaagattaataggatccaacttcagtggtttgatattttctcagttgctaaaataaatcaacaaataggtcaggaaagccaccatctcatcttaaaagcatcaacca

SEQ ID NO: 41558 - DNA, 1679 bp, Bovine  19866881319484
  misc_feature (1)..(1): n is a, c, g, or t
ntatctatatatagaaattttaaggaatatcattaaaaatgagtaagggtcaaattcataattaataacatgactcatcaagtgataaaaaaattttatgcatgcagtcaagagtgagagtgataggctgttaaaaggctattatacttactatcttatcagtttgagtgtagcatcctataaaatttttttaaaactatagaattatagaggaatttataatttctttcttcaaccctgactatgataatcataatcctaacagtctccttaagttatcttgatccacgtttctgctgtagaccaatgctgttgtttcttgcaaatgggtactagttagtacaggtttttaaacgtggtcactttttaaatcttggaaactatatacctgaggttcttttttcccacattaaatataacagagtgttagtggattaatgctgaaatccaggttgtttgatgacttttctgagtcacgcataaaatttttaagaatcttctactttaacactaagacaaaggcttgaacaattcttataaaatgattttcctggcaagagttaaaaacagacattcaaatacaccaagaatgtgtctatttgtaaaagaagaagagtctgtgagaagagtctgtttcttagaattttatctccaaggagtatcttcaagttttttttttctttattgcgtctgtctaggtttcagctgaagaatatattgacctttctaaccacaataccatccatgaacagttgatgtaggttcctttatgattcatgagctcagagtcaataaaacaatgcagtgagtcaagagtgagtaagaagacaaaagttacaaaaaaaggaaaatagaataggggatttaaaaatagactttgcttgtggcaaggctaaatatagtattaatattctccatcctgcatgcataaaatgttttttatcacttgatgagtcatgttataaattatgaatttgacccttactcatttataatgatattccttaaaatttttctatatatatacctaaggaaaagatgaggttgggtataaaaagcaacatctcatttattattttttgattttattacaaatcatgctcttcttgcatatattggaaggagatagataagacagtgagcatatagaccaatacaagattttaacaaacaaggagccaaggagtcaagaaatcgcccaacttctgatgtggatttggctccacacataccaagaacacctggctttaaacttctcactggcctattaggtttgctgtagtccttcggggatggctgaaactgaaagccataagatatgcctgatatctctatcccagtaaagcctgctggactcttaagactcaactctagagaccaagctttcatatctatctagaaacacatatctactgtgtttctcttgtaccttaaatgctgaaaaactcatattatcttaattcattcattggatattaatgtctttgaaattgtgagttgtgaatatattaaagttgtgtccctactgaacttgaatcaacactattctgttaaatctgtattctttccatagtataattctgagaaatattcagacttcagattatacataatattatatatgacagtttaggtaacatattttggaatattagtaagaaaagtaaacaatccatctc

SEQ ID NO: 41559 - DNA, 1729 bp, Bovine  19866881457934
  misc_feature (1)..(1): n is a, c, g, or t
naaaaattgagatcatttttgtgaaaatgtaatctaatctcaaatgaaagaaaggttgaggcttctcatactgtggatgtagcacaacctgtgactagtggacacaaaataaagggggaagggtgaaagtatgaaatgcttcaggacacagtctgccaataaaatgtttgcattttgggagcataaaggaatcagaagataatgaaaatatgcacatcattctttggaagcacagagaacatagtttctaactccctctaatggaatcatagagttttcgtagactaggtagcatttgttaataggaattttcaatgtgaacaaaggaagaagaattttttaaatgagaaaatatttttgatataaattattttaggaaatatatacaaaagtattttttccccataaatccatgagatgaaatatctgaagagagagagaatatgtggaacaaattccaccgaaaggaaaagtgatggcagaggcgagggtgaggtggaagacgaaagggaaggagagaactactgcaacagagggttgactttggacaaaatttgtcacccaacactcacagagagcataggaaaagaggatgattagaaattgacctatgaagactagaatttaagaatagtcatgtttcattgtgaagaatatgatattattgagagaagaaataaatgtgtggaattgtttggggaatctaagtagaatactgatatgtgtaccatgaaagtgaaagtattagttgctcagtcgtgtcccaccctttgagaccccatggactgtactcctccaggctcctctgtccatgggattctccaggcaagaatactggagtgggttgccattcccttctccagaggatcatcgcaaaccagggatctgcctgcattgcaggcagattctttaccatctgagccacaagggaagccctttgtttaccatggatgtttctaaacagcaaaagtgcctattaaattctgtgtgctgtgtgtagcctttgatctatatataaatgtgttttatatatggtgttgcagcaatatacacaatacatattgtatattgagttggccagaaagatttgttgaactttcttggctaacccaataacttgtgtgtgtgtgtgtgtatgtatgtatctatctatctatctctatatataataacgtgaagtaccttgtgtcttataaaggtagctaaggaatggctgatatctatcagcataagcacttgagtgggttgttcagtgactcagtcatgtccaactttttgcagctccttgaattgcagcaaaccaggcttccctgtcctacaacatctcttggagccagctcaaactcatgtccattgagtcggtgatcccatccatacatctcctgctcttttgtccacttcacctgccttcaatctttcccagcatcagggtctttcctatgtctcagcttttcacatcatgtggccaagatactggagcttcagttttatcagtccttccaatgaatattcaggagtgatttactttaggattgactggtttgatctccttgcagtccaagggactctcaacagtcttttccaacaccacagtgcaaaagaatcaattcttcagtgctcaaccttctttatggtccaactctcacatccatacgtgatgactggaaaaaccatagtttccaccatacatactttagcctgtaaagtaatgtctctgctttttaatatg

SEQ ID NO: 41560 - DNA, 946 bp, Bovine  19866881576502
  misc_feature (1)..(1): n is a, c, g, or t
naaaaaatgtattttagctggttatttatcacaatcctattcaacaacttcttttgcaaaagaagaggccttactttaaaataacttgatactgtgaaacttttattttgaaatgattcactaatgtatgagtcattatggatgattaaatataaattagaattagtgagtatttgttctgtggagtatgaattctaaagtggcctatcaaaaaggaaactaaaatttcaaacaaaatacatccttcaatactactgatgactttatcactttagcaaagaagaaataaaaagtatagcattcatattccgttatgttgtttttcaagtacttaaaattaatgactctaaagagtttttttttaataagtttttttttatgagaaatgaaatctattgaaacctaatttagacagccatatgcaatcatctaggtagcttcctcataatacttttatctaggtgatattaattctttgaaattttcataaaatatattcccagaaataataaagcatgaaataaaagtagtatactgatattttgtacaaatatggtagaatattatatgtaataacagagaacatttgttattagtggtgcttacacacttgtatggaaaattctcacaatagttctagttactatttaacaacttaatataatataaaatttgaagcatgcagactaaaacgcaaagtaataaagtataaaataatattattttctttatttacattttccttcagagaatgccttttgcatcactcattatcacgctctatgtgtggagagtgatgatcttttctgtcaatcagtctactccaagagtcaaagataaagttacagtcacaaggactgaaatgtggaaagatagatcacaatcctgctgggacactcctacatgagctttgattggccataaaaagggattatatcaatcagaa

SEQ ID NO: 41561 - DNA, 2046 bp, Bovine  19866881690626
  misc_feature (1)..(1): n is a, c, g, or t
nttctatccctgtgttgggaattcccctggaggagggcatggcaatccactccattattgttgcctggagaatcccatggacagaggagcctggcaggctacagtccatgggatcgcaaagagtcgtacatgactaaagcaacttaccacacacggcagcccacactgctgtgggctgaattgaagagccagtgactcttcaattcaggaatgtaaaggcctgttcccactgatcatcttctccttgtcccttctacttttttccctttccatagctgttgattccaagagtagtctcttattactccccacaaccccacatgcttatttcagtctttgtctcctttctcaggaaacccagcaataacacagagcaattaatgaattatttaaaaaaaaaaaaaaaatatatatatatatatacctgagtgatgtgttactttgagggataaatgctgaaagggtcagtttatagaagttaaaaaagaaatgtttttagatttaaggggaaaatatacaacctgctggccaatggaccagaacaggtatgtacccgatacagtaccttccctccagaaggaatgaaaattcattagagtacaggacttttgcttgtcacatgtgtacaataatagtagcagtggctttaccctggagtttgttaggctatcaggttccaccacagagctactgaatccaattttgcatttataagaccccaaggtaattcttatctggtgatttaaatcaatgattctcaaccctgcctgcaaaatagaatcaccagtgagcttaaaaaaaaaaaaatgctatgcctgagcctcattccaaatacagtccattagaatatctgggacatggtggctaagcattagcatattataaaatttcctaaggccatttataatgaataggcagatttagtactcattgatacaaagggtcttcaagatttcttttcccctttaatgtgttaggttagtcacaaatgcctatgaaatcccttaggattcccatcactaagtcttcatttttctcttagaatttttaagctgtttatctgattttccttcttccagcctcaggaaatcaaaatctgaaactgtatgctgatcaatttgtttattgtctgattctagcctctagaaatggcagctttctatttctttcttctcaagggactatggataaggtgaaactaataaatgggcagaggttagcttccaggtataaaatcaatgctcatattcactcctttcaaaatgctgtttcagtttggttagaaggatttttaatttcaacgtattttttgggtcagtcaatgaagtttggccccaagacaaatcaggcaatcctttgttctttcccaatgctttgagacccaggaccaaaataagagatgaaagtacataaatagttacaatggtatccaattcccagaccactgattcttgctaaagcaaacaggcacaagatgacaactggggaggaaagctcatcgtttctttctacataaaataggagataatacaaataggttgaataatgtagacctgaataaaatagcattattttagtaataaaaacacatgtattacatagcagttttaaatatgcctgaagtgggggtctactgacatgtactataaaaagaaacctttcattgactaaaataaaccagtaatatttatgaaaaggacataaaagtttaatatttaaagttatctaatgataaatgaagaaagtctaccagcatgtctaaatagaagcttttatttacatgaatattccttgtatgctaaagcccatgggaaaacaaatatgtatttaaaacatacattaggaatattttatcactgtcaagatggaagaaaagaaaagaaacatttgctcgtgtaagtggaaaattttccacagtttattgtgatccacagagtcgaaggctttggcatagtcaataaaccagaaatagatgtttttctggactctcttgctttttctatgatccagcggatgtggcaattgatctcggttcctcagcctttt

SEQ ID NO: 41562 - DNA, 1768 bp, Bovine  19866880342062
  misc_feature (1)..(1): n is a, c, g, or t
ngattccctatctcattcatggatcttctttccagttctagggtaccaaagtaggtacaataagtagcgtttgacaggaaaattaggttccagacctactgtagtgggataatgttctcatcggacatgttcctgaaatcatcatcagattcagtttaatggattcaaagactcatttgttgtgaacaaaaaggcatattacttttagttgaattagcattatgttggcagagcttaagacaacttttggcctagttgatgtttggattcagttctctgaatatttatttcaagccaaatgtctaactagacagaaatctgcacatgtagtcatttattgtgacaacaactacatcattagacaaaccagtctggtcacagactatgagttagcctctatgtctttagccagcttccttctgtgggttccaatttaaatcagttcaatatgctttccagttcaaatttatatgaaacagaaagaaagctaggggaaaaatgctgtactcatttctattttttgcatattgtaagactagaaaggaattgttaagcttcatatttttattatgatcagaaattttaaaattaagtatccaacttaccaatttcatttaaatagtaaaattggagccttggaatttctttaaactggtcttattagaaggccctgaatttttggaatgaagcaattaagtgccatataaagtttttatagcatttcagaattctaagagaaagatcaccttccaaattgtagatgaacttctggtatgccagacccctctacctactaaaggcatattcagtctgctaaattgcaaatattaaatctttttgattttttaaagttctttattaaaagaatatagaatgaaaatatgatttttatagtctttagctaatagggcaatgaatctgccaaatgagaagttttacaaaacattcctttacataaagtactttaagtggtgatatttagtggtaaagcatgttactattgaaatttaatgcatctttaatagcagtcaagagatttcagagatgaagtcccatgaaataactacgtttgtttttaaattttggggtttgtgtgtctaaatgtatatgtttagaagtgtgacaaaataatcttatctgtttataccactttatggagcattttcacataaattatttcatcagatcctaacaactctggaaagaagaaaactggcattttatccctatgtcacagatgaaaataactaagaatctaaagattaaataaacttacctgatttctgaggctatgagttatcttggagaatactgttgttttattattttaaatattttttttaaacaatcactattgataatgtattatcaacagaagataagtgaagttttgtgtgttgtctatgaatgcacatatgtgtgcatacttatataagtaagttcttattaaaataatttggtaatatctattagacagtctaaataatatgaaaaataggaatagaggcctggactagatagtcatttcaaacacaggactctttctgttacactgtgtagcctccatattgtttgtgttactggattttaaaattaagtagatcctttccattagcaagcctaagatcaaacaaggtgtacaaaccatatgcctgctttacagctgtatttcttccaatcactgttaactatgatattcagtaattaaattgaacttaagtaaaaatggcttatccagttatttaaggggatataacagtggagactg

SEQ ID NO: 41563 - DNA, 1703 bp, Bovine  19866880380747
  misc_feature (1)..(1): n is a, c, g, or t
ntaccaattcagcatctcccttctttttccccataagaccattagcttttacacccattctcagaaagctcccaaagaattactgtcaaagacgatcagctcatgacacaaatcttttgaggtatctaccttagtataagggctatctcctctattatttattaggttttttaataattgataatttggccatatgagtcctaagtaatattgcttcagtcacagagtgcacacacatatgatatatactcattcattcttagataagaaactcttttaccacgttagaaatatttcctacattaataaaataacaaggcacataaacacacaaacacattatcttgttcccgaaatagggaacccattgttgtataaacagagtgacaataggtgctgtgaggacaagctgacttcgcagcccacttgttgcttcatgaggctctgccacttgttctgacatcatctcttaaatcctgaaaataaatcttgatatcaacattgtatccattgtcaatcctctctagtaactggggagtacaggaaaacaaatcatacatcaaggccttttgctctgctatttggaagagaacagaaaaggaacatctagactcgtaattttaagcacccccagctctttcgcaaaagagacagcagaatttgtttctgtatttcttgtgttttgaaaatatttattgaggattttttgcatcctagtttttattccaagaatgctgaatcatgatcactgtaataggccagagcaagctgtcagcccccacacaagctgttatcaagacactcttgaaaatatgttctatttctaaacagttgagaaacaatttttaaaaattatttatcataaagcgctttccaattgaattgccctattcaatatagtgcatacttaataactgccactttcgcttcaagagagactacaagggaaatgcctgtttagttagccaattacttaattctttgttgcctagcatagggttccattgtacgtgaaagacacagaagcagcactcccatcctgaatgatgtgtgcagtgtttttatttttctattttaaattttattatttatttatttatggtatcaaaacgttttattgaggggctttagaggaggatctatgagcttgggagaacaacgagatcacacatcctcgcccagcctgtatattccaagctccagggtgcaaaaagtgtgcagttgtttttaaaaatcctagtggctatgaagtggtttttgcttttagttaaaaaaaaaaaagtggaatgtgttttttgcttttagcctgttacatgccttaaactcatactatttcctgaaactaaagtatagaagtattcctgaaaagaagtatagagaagataaatgagaatatagagaagtatgcatttaaaggttttctttattgctattctttttaaatgtaaaaaaaaaaaagtagccactattggtggctgttttacctacaggggacatagacaaattgaatagaactcttcaattgtaagctgtatgataccaagcacagttttgtcactgtgctttctcattctgctctttagtggtggcattagcagtgtagaatcagcacttaataagtgcttgactaattctgtgcttttaagagagcttctgtaagtaaaactgagtgtagactcaggaaaaaaaaaatgaccaagaat

SEQ ID NO: 41564 - DNA, 2096 bp, Bovine  19866880431983
  misc_feature (1)..(1): n is a, c, g, or t
ntggtgaaggacagggaagcttggtgtgctgcagtccatggggtcacaaagagtcagacaacttagcaactgaacaacaacatagctgaaaaagggggcatacaaatgtcaacctgatttcacattttacatattaaaacagccctacttttctgagtgacctcataaaatgtaaattatatgaatttgaaattatgaagttgaactatactaatgaaatagatgtctagggattttattttacactttaggaaagaaaagttccaacaaatattttagtattcctggatgaaaagatcattttaaagtttggggaatatcatctttagctttttgttagtttgtttcaccctcattatgtaagagatgaatcttgtttagtctgtgtctactgagtattttaaatgttttgaaatctgtttccttgagaagaacaagtcacttggagcaacccagtaggagttctgtgttcgaaacttctataaagctttaactatccccacaaaagtgtgatccctgagtttctgcctttcctggtcagatgtgttagctctatctgtacctgtctatatcttggaaagccacgtcagatgaaggacatcattagaacacatggctggtcaaaacatgctcacagaagtggtggcaccttaatttactcttctgaaaataaaccatgacatcttctctaagagtattaaagacactaccctttaagaaacttacacaaaatatgatgtagtttaaaaggagaatcataaaatattaaacccattattttaaattcctgttattacatcagttatttatttacttatactatatttctggaaatctctttcacttgcaacaattttaatattatgtttgttacttactcctaagttagaaacttccactactctaatgtttcctaggtttccaatgtcaaaatgtcaaacagcctctgtagttaacctggagctttcttggcagtgagttcagttaggctagtatatagaagtacccagtcttgaaagctggccccattcccttggactcccgaaggactaagaagttaacctgagtgctcatctagacacgtttggtccacagtttccaatcttgaatgtacattgtaatcatatttggagcttagccacaaaataaaatattgatgcacaggccattctgccccagagattctgattgaaatcttttggtatctgtccaccccacatgttttgcagagatgttcccatgaaggcacaatgcctttgccagtatctcaaatgactgaaaataaaacaacggtttattaaaggtaacactgcctcttgagattttgtttttttcctctgttccttttccccacagtatttgatgagtctcgccagctgctaatgtaaactaatatgattgtatatgcaatgcttctttcctttgaccacaccccccaatcaattatattctatctgatacagtcttggtcacacctaccctttttgatatgattatttaagcctactttaaaagcagttactcagctgccctgcagatgtcagactttctggcaccagaggtgtggcagacctgctgcccccaggatgttggggcagagaggaacccagcactatgctcagtgctcagaatagtgggcaccaagaatggtttgtagctggacatcaccaggaaaaaagaaaagctgcctcagttcccagtatgtgttcataactaacacttaccccaaaattaacaaagacacatgtgtccaaaatagtgtctgaaagaaggaaaaacaaaatgcaaaatataattgcatttctttttagggtgagagagagggaggagcaagcagaagagctggaaagagggaacaatgtagagagagagattaaggttgattgatgtgacaggtacaaatctcttcccaaaactcacatatggaagacatataatttcttttttttttttttttgcaacaaactgaagctatcttaacctaaagttaagtttcattttgagcccttattctacaagaaagatcactaaaatctcagatgattagaccattactcacatccccacttcactatttttttcttagagattcatat

SEQ ID NO: 41565 - DNA, 1569 bp, Bovine  19866880441266
  misc_feature (1)..(1): n is a, c, g, or t
nttggattctattttatacgaaacttttctgctgcataatcaagactgtgtaatatatgaggacagtgctgtatggttagactttacagatggtttcaggagtttgtgcctgccattgcctttctcactgaccatctgaataactgagaaaagagatgagaaaagttaattatatgactgactcttcagtgaacagacaaactaaacctaggtctcttagaggtcattcttttaaaaaaaggcattgtcctctgcaacgtttttgggtcactaatgatgtaaaagatgtttcttgaaaacagagcttaataatttgcaatggtgatttaaaaatctaattggactcttatcaactaattctcaataagctaatgtaatggctaattactgttattggtgacatttagacatgttgaagtctaattgtgcctttaaattagacaatgtaaggctatatttacagaagctgagttatttaacacttagcacggtacatctctgataggattacatagacagcacccattaaattattagagttagcctgtgatttgcagttggatacaaaatttgtacagaagcataatcatgatacttttaatcataatagtaatatgattacttttaatcatattaaaagtagctgaaaagcaaattgcaaccagtaagtaactgaaaagcaaactgcaaccactaatgcattgcacagaaacataaaattgttagttctttttttaagattacacgttgagagaaagggcattttaaattatagtctgaagtggctgttaattataaaattctatttatctttcttaataagcataaacattcatattctattatgaccactgagtctttgatcttacctcctttcaacgcagccatccctcagggtgatattacctggattacagagaggtcctatttttccttgatcttttttttttcttttttttttttttaattttatttaatttttaaactttacataattgtattagttttgccaaatatcaaattgaatccaccacagggtatacatgtgttccccatcctgaaccctcctccctcctccctccccataccatccctctgggtcgtcccagtgcactagccccaagcatccagtatcgtgcatcgaacctggactggcatctcgtttcatacatgatattttacatgtttcaatgccattctctcaaatcttcccaccctctccctctcccacagagtccataagactgttctgtacatcactgtctcttttgctgtctcgtacacagggttattgttaccatctttctaaactccatatatatgcgttagtatactgtattggtgtttttccttatactcaagtcaacaaatattttagtcagtagaaaagagtcatgggcaaagcagttaaggaaaagtccatacagaaacagacccagcacagtcaaaaataaaataaatcaataaaattaaaaataaataaataaaaatcctttaaaaatccttcacaaaattcttgacctgacagagtttatattgatatagaggagactcaagaaataaattaaa

SEQ ID NO: 41566 - DNA, 868 bp, Bovine  19866880493757
  misc_feature (1)..(1): n is a, c, g, or t
naagtatacagaagctgcagagaaggcagtggcaccccactccagtcctcttgcctggaaaatcccatgagcggaggagcctggaaggcttcagtccatggggtcgctaagagttggatatgactgagcgacttcactttcaattttcactttcatgcattggagaaggaaatggcaacccactccagtgttcttgcctggagaatcccagggacgggggagcctggtgggctgccatctatggggtcgcacagagtcggacacgactgaagtgacttaacagcaacagcatacagaagttgacatgtttatataaactacagaagcaataaactggtttggcaaggtacagaagaaaggaaaaagtctttaaaggtaggtcaagcattttacagattaagatcttaatgaccttgtcacttcacatctcaaggatcttaagttgtaaatagaatttagttaaagagttcatcataatcagtgacattatttgttaagacatttaaaagttacagaagaaacaaactgtaatgcaacattatggcatggtaggaatgaagtgagttaccaggttatgaaatgccttaactagtaggagatcacataattaccagaaggtaaaatagcagggtaatccatattttgaatgttatacttctctgattgagaagcctaaaatcatgtgcctttcttcaaattttaagtgagacatttgttaacatggcatacaacctcatttcatattccaccagtaaaatgtttatacaaaaaaaaaatatctagaagtcaatagtcactaatcacagtcattaaaatgttcattaagtagagaattgaaggaaaattatttccaagtatatgtgaaatt

SEQ ID NO: 41567 - DNA, 1082 bp, Bovine  19866880507049
  misc_feature (1)..(1): n is a, c, g, or t
natagaaaagtgttaaatatggtctgttccagagtgattttataaacttagcccaaggaatcaatcagtcaagagggtagtatctgtttttagttggaaagtagcacttgtcaatgtttccaggaagaatttgcaaaaatgtcaactcctttgaaatcaggccagaaggaaaactaacaatagttcagatgcaaacacatttcatttctcttttctcagaattcatcaattggatattgaggaagttcatttaaaatttaattatccaagttttccttcttttataacttcccctgatgtttaattaccccatatttgttgattattttccttctttcctatgaacatattagcatgcaaccataactatgttaaattacctttaaaaacacataaaaatcagtggagcatgctgttttcctcttcacatgaagtctgctctaaatatattagaatattttaacatatttgggaagtgtttattttagccccaattctaacacagcttgggctgaattaacctgttaagtggagcctgtgcttctctacatagcattctggattgtaataaggtgtatccaggtttgattttgttgaccattgatttacttgataaatattttcagaaatgatgagaaacatataggacttttaattgcctaaaattagattttttatttctaatctttttacagcaatattgcttcattcagaagataaccatgccaaagtatttccttcataaaaaatgtaaatcagagttttcaaagcacattctattattttaaaattcatctaaagggaattcatctaaattccctttagatgaattcatttaaattcatctaaagggaatagtttttattacacattaatcattttatctctaacactatgccagaccagcctacattatctcctgatattttgacttgctgtccagaaaggaatggtctgagggtttgactcttttgtgaaactgtcgtatgtaccatatgctaaagatcatacatccttattatctttctgttttgttggcatttatatgtagatatgtttgcatatgtgtccttccgtgtgtg

SEQ ID NO: 41568 - DNA, 907 bp, Bovine  19866880543681
  misc_feature (1)..(1): n is a, c, g, or t
ntgaaagttttaaaaagaatgaagataactgaacctaattaaaaatcctaagaaacctagaaggaatgcttattaaacattaaaggaggaataaaataactctaagaccatgatcaagaagaacagagaatagtgaagaaaggaagaacaaatagagatttaaagagtgaaatgccttcagttcagttcagtacagtcgctcagtcgtgtccgactctttgcaacctcatgaattgcagcacgccaggcctccctgtccatcacaaactcacagagtttacccaaactcatgtccatcaggtcagtgatgccatccagccatctcattctctgtcgtccccttctcctcctgaccccaatccctcccagcaacagggtcttttccaatgagtcaactcttcgcatgaggtagccaaagtactggagtttcagctttagcatcattccttccaaagaacacccaggactgatctcctttagaatggactggttggatctctttgcagtccaagggactctcaagaatcttctccaacaccacagttcaaaagcatcaattcttcagcactcagctttcttcacagtccaactctcacatccatacctgactactgaaaaaaccatagccttgactagacggacttttgttggcaaagtaatgtctctgcttttgaatatgctatctaggttggtcataactttccttccaaggagcaagcatcttttaatttcatggctgcaatcaccatctgcggtgaaatgccttaagatcaatcaaatagcaataccggatgtgaaaagtcatcaagctcaaacaaatgtggaagcacagagctcaggaagtgtgttaaagtgcaagatagggtataggggacagagttagcatcaaataaaggcaatcagattt

SEQ ID NO: 41569 - DNA, 1137 bp, Bovine  19866880595882
  misc_feature (1)..(1): n is a, c, g, or t
nctaaatatgccttgaataaactttttttgttataaaactattaaaataactttttaagtaactgattctatacacaatactcatatcacaactgtcttacgtataatttaagaactgcagaccaaaaaaagcaattaatgtactctttctcttgagcctgagccttccttgtatccaaaagtattaagtttaatgacaaaggagaaaaagaagggagacttgtggaaaatatctagtaccagtaaagatattaaggaaatgtaatgtcttttgagtagtgtcctagagaaagtgctcataaatccatttgaagaaaaatgcatatgtattagatattataatctcccatttcagtgaattacattctgtaatccttcataatatattgaaggacatagcatagcttttttttctggcattaggtgagcagtggtatttgagcaatataaatgaagctaaagaaaaaagagtaaatttcctagacatattattttagcagagttctcagtttagaaatactttatacattgatttatttttttttctctttctgtgtgcaaattctctgagatatgacaggtggggaattatttttattttttaaacaacaataaaaacaaaattaaataaaagttgatatttagaacacttcttaaagtgcttaaattgatttatacagtcttgcataatacttaaaatattaataaatgaactctttaccctgaacgactataatgtaagaatcattaagaaactcagtgagaatttcttttgcaatgtgactacattttaaatgttttaaatgaaaattcttgaggtgttacgttataatttacagatggattagaaatttaagattcctcattaacagcttttcctcatttaaagtaacacatttctttttccagattcttctacttggacatttcattactaaggaggaaaatcacttaatctctctgtacctttttactctaattgatgtattgaattatttcttttcctctagagatagacagcacagcagagtcaagagcatggtttttagagtaagatagcaccagggtttgactcatggctctgtgcatgagttattggatcattttaaccacattttccaaatatcagggtttttt

SEQ ID NO: 41570 - DNA, 1115 bp, Bovine  19866880624703
  misc_feature (1)..(1): n is a, c, g, or t
naattagaaatactttgaaagcatcaactaaagccgtatttatttaccagaaacaaaaaatcagaggacaacaatggaagtctttgaagacactgaccctcctagaataattatcatcacttacgtaggtcatactatatatattagtttttttttttttttataaattcagtgcaaagcactaagtacattttttcctttggtatctgtatatcacttacatatcagacttataaaaaatgaaatttgttatatttccatgaagagaggcaggattttggagagcttgccaaagcgtgtttcccagtgttgtgacttacagtgttagcactcagacttatctgatatgactcttttagataagcttgtgccagacaagttcatgttctgtcaactccaaagccaagctaattcatgtatcagaaaccacttgattatattttcattaaagagaagtacatatcaaaatgaagaattgagttgtcacaaaggtgcctgggaaaagatttgctttaatgtaaagaaaaaatgagtttggtatacctaaaactaataattattttgtggtccattatttctttccttcttcacttgactcttcattctttcctaaatttcttggtcttgagaatttcaattgatagtgtccttcctatgctttgaagtttaacatacactctgtgatagatccagaaaccaatggttaagatagagtagtggcactggaacagaggtgcatacacagtgataaaaagtgaccttctacagaacataacttgacgagttgttttccatttgatgtttattggtgttttgtactattttttttttcaggaggcatatatgtaaatgttcatttcagtatatgttttagtgcttgttgtgaagcaagatagcaaaatttattgtacattgattgggaagtttaattatttagattttattttaaaaacacataatctggaaattatgtatttggtttaaaaatatttttactccacattctatgtcagtttgtgactttttatagggagagtcattgaggaaatataaaaatagatatcagatgattaggaaacgttgatgcagtagatctgttaaatgttctgctggta

SEQ ID NO: 41571 - DNA, 1376 bp, Bovine  19866880628052
  misc_feature (1)..(1): n is a, c, g, or t
ntatatatacatatgtatgtgtgtgtgtgtatgaatatataaaactatatcaggagtatttaaaatattattttgataactgttttaatataactggtttgctttgtaaccctacatattttctttgatgtatttagaattaatattctgaacagagatccaaggcttcatgagactagctcaagtgtctacaatacacacagagttaagaatccaggtcctagctttcctgggccttgtatttatgcagagggacaaggaaagtgtggcaagagctaaatgtaagctgtttctctggctcaaacaaactctccctggcatttcctctgaacggacacagatgtgggagcataaaggaaggtggctcataaaattccaatgcgtttaagagtaagggtggggggagcaaaggaaagggaaagcaagaacacttgtcagtcatgaatggcttattggctgacttcgtcagcaggggagctgaatttgatcagttctgccatgattagtgtcactacagtcaagtgtaatttctgtataaatagaagtggtggataggaaaataattcagtccatccctctaaattgtctcagtcagcacagacatcaaaaactgtcagcccgaggagggggaatgcacacatatccaaccaagcctgtaattgtattcagtattcaaatatttcaaagtacagaatattattttcaacataagaccaaagaaaaaccaacgttgattgtgcagctcatctaactgtgaaaacagcatttgtttatttttcattgtctcattggtagagtaagcaagtaagtattttgtattttatcacttttcagtagaaggatattttcatctgaaaatatgtctctcttctaattccttagtttaatgaataatacctcctttcaatcaattgtccaagataggaacctgaagaaatcctttccctctttaactaaatggatcactaagtcctgttccctactgtctctaaaataatccacttctgttagacccattgctagttaggttagttcagaaatagtatcattattttaattacaacacaggaacagactcgtaactggtctccttggctcaaaacccttattgttgccaaagtttacttcaaatgctcatcaaaataataattttaaaatacactcttgatgtcacttccctgcaaaaacacacagccatgaaattctactaaccccagggaacatgtcataattctcatggtttatcaggtcccagactacattttttgccttcatactcctcacactcttgaaacatcaacaaaggagaaaacaacacaccaggcctatatcattgtttactcatatgatataaacaatgtttctaatgatgttaa

SEQ ID NO: 41572 - DNA, 1834 bp, Bovine  19866880643172
  misc_feature (1)..(1): n is a, c, g, or t
ntctatactaagtgttttcaaataatggtattcagtcttaagtgttacatacattatgaatgtgtttctaatgaaggtcataatttttatgttaaatattttgcctcttaaaaagcaccactgcttcagagttcacccactgaagatcttctaggaacgctcccacatgtcaaaacttagcaaatgagtcctcagtagagtttcacctcatcttatgatatacggtaaatagtaaaaagtcattcttgacattcaaaagttatctgaaggtttacattgcaagttctcaggattttttaacatttctatttaatttgtgcaattatgcatagcctttccactggtttcctcacattacctctaaaatgacaaaatgatgaaatacactttttgggaaacatctcatccaacaagttttgaagcatcttcttaaattggttattatttctaaatgttctgttatcatttgataggtcacttaaaggtgttcctaaaaatagtccttgaaatatgatttgtagtctatctttcttagtttagagcaaatatattaaccagcagtcctgtatttgtgcattatatgtatactctgacttcattttctctgtgactagaacagaagccctcatacaaaactgtcaaatgtttctgacattcatggctcatagagcaagggtttcacagaactgcagaaggttatgttgattaagcagagacgtcttctataaattgactgctgaagcaaataaaaaagggggggttgtgaggaaggcagagtctgtttatccaaatgatcaaccaaattgcattcaacatgctgatatgggagatggaatactactgagcatcctgaaatgtaatgcttttctagaatattctagaaacattctgcatgctatacaaaaaggagagagtataaagtgctgtatattaattaaaaatgaaacaaaaacaataaaaaatttttaaagattttcctggatgacaattatgggactgatcatataacagcatcacattatctcaagggtatgaatcatagtatgtccaacaaaatcactgtactcctttcaccttggactggtgtcagggtaagcatgtcaatgagagctcttcctgtgaatgcctgaacaagtttcctgattaaaataatgcaattccgtatggagaagctcttccaaaagccacacgcttctcctacttacgcttctaaggtgcaacaggatgtgcatttttgatcaatcttttcaaatgatcattgactgcagctgaaatctatacacatttacgttccttgtatacctgacactgaatgcaacattaccagtgaaaaattaagaatatttatatgtatttaaggggctgtcagttctgagtttccatatgtgacattaatttctacaggcagcaaccatcagagaatcaagaagcagttcacctggcaaacttcagccctcattaggcgtaaaaagatattttgtcatttacatatgagacaaactatagccaagaactgactgtataactgtattgcaaaagatccaaaggacaattataatattaaagaaggtaaaaagaaaagtgattttcctatttatgaaataatttttcagtaagtgacattctactgatgaacctccataaatccagcgatctcctgaaagggagaattctatcatgcaataagaccatattcacatttatatagaaaacagatgtttacaactttgggctttacacttagtttatatatgtagcagttaattcacttaattataaattgctaaatatttacattctcacatttgtataaaatatctacttcttttaaaat

SEQ ID NO: 41573 - DNA, 2432 bp, Bovine  19866880644322
  misc_feature (1)..(1): n is a, c, g, or t
ntatttcctatatgctctcttccagtctcagcaggatgaaataatataacaaacctgatttttaaaacttaatagatttgaaatttcatactagcactacaactaacaaaggaaatgtcaagaacatctaagtcctgtgcatcagtttcctcatctgaaaatgagaactgaatgacaaaatgaattcaaactacttagcatagtgattagcacaaaatatatgggagttctcttcctgtctcttccttctttatatgatcctcagtggtgtggaagtatttaagagtattaatttcttatccttaccacatctatgtgctgtgttctgttgtggttgtgttagtcgctcagtcatgcctgattctttgcgaccccatggactgcaggcccaccaggcttctttgtccatgggattttctaggcaaggatactggagtgggttgccacttcctactccagggatcttcccaacccagggattgaacctgggtctcctgcactgagggcagattctttactgactgagctaccagggaagcccatggtctttattgacagatatatttaattttagtaaaccctaatctcactagcaaataaacaattcatattttcttcccacttgtacgttggccatatcacttaatatctcttgtactgaatttttaattctacaatgaaagttttttttttcattttttggtctgtttttatgtttgtttttaattttattttcttgatgatatctacctgctatctatcatcctggaaaggttctgaggcaaagtgtgagtcatattttcttagtgctcagtttcctttcttagaacaaatgagagcatggcattaacccttccaaatcagcagagaatattatatttttgttttctaaacacttaggaactgatgttcaagcttgctattaaaaatgaaactccatgtgggtatctagggactttatttgggtttgattgttcattgtctatttatttcctagcataattataacaatgtgtcatggcaatattatccacatgcatttacatctagctatgtgttattaaagctagacccaccatttttattttgggaggggtgaaatagaaaaggatagatttattactttgccaagtaaatggggccacagtgcactaatgctctcaaagccatgtgtcctaacttggagaagacagtgagaagttttatagtaatcattctaagaggggatgatatgctcatggacatgcttctgatgggttgatggtgaagttagtaggagtcaaccttcagatccaataagtctggggtccacatgcttatgggcagcataccatccttaattattaacttctttcacctggagggagtttcagtctctgagacaactgggctgtggctggagtcaggagcgaatacttagtctcatgggatggggtcacgtgctctgtccctgtgcagtcctctctgtcccctttgtagatgaactcataggaaacgtactcagcagccttaagaaagagcacagggccggccaggttcttagtgttcatggtgatcacttgatgtggccctcctcacatccacctttgagctgatggggttcaggacacgacaccctcaactgtggcaccttgaatattgtaaactgaaggagctggagaaaacagcagaaatagaaaggtcacttttactgccaaactctgggctctctgtgcactgatgccaaacagaaatacagagaaagagttatggaggagagggaaagagtgctttatttatttgccagttaaagagggaacacagtaggctagagcctcaagaactgtgcccctgacccactgttactttaataaattattttactgtcctctgctaagtctgtgaaacctcaggaaaacaatgatgacaacaacaacaacaaaaatatgaatgactttttgagaggaaaagaacagctgagcaataaaaccaatttagttagtttttgaatgttgaatttaagccaaggtttcccggtggtgccaagcaaatcctattcatttttgttcatttcttaatttcttatttcctctcaaattattcaaatgcctctgctgggtagagctcccaattcagccaagaatttgtctccccatagattacttttatactgtatctgaaactcattaatcattgtatcctttcaaatccccattacacaagcaagaatgggatttaaatgcctaggtatctcatgcttagttctaaataaggcaggaacaatacaaggtgcatttttcacctctcacttactgaacttgccataagaatattttgatgacttattttaaatagctaagactaatttttaaatatattttctggattaaaaaaaaataattaaaacatctacttgtttgtttgagaacttgaacgtctaaagaaacagaagg

SEQ ID NO: 41574 - DNA, 2044 bp, Bovine  19866880652026
  misc_feature (1)..(1): n is a, c, g, or t
nacttgggtctttactttaatttacctcattttaactctgacttggtaaattttatttaaggcactttgggcacaaatggcagttgtgttggtaatgctggtggtggttgttctcagggaacacttagtctcattgtttgaaagggtcaaaattatatttaggaacggatggggaagtgactgtgatggagtcctgtaaggcctcagcactatttatagtggatgcaaaactaaagggaaagttacctgatacttgatatgtcaaaaatggcaaaggaagaaagaaatcaggggaagaggtactgttattttattttttaatttattatcatcattattattatttttagccaagccatgcagcatacagatcttagttcccccactacggattgaacctttgcttcctgcagtagaagggcagagtcttaaccactaggaccaccagggaagtcagctactgttctcttagattttctgttgtattcttcccactatgttcaggaaaggagcttggtaatgtatctgtgatgtgtttatttgcagtagacttttggtgtctcttttgaaaatttactcttatatctaagtttcaattcctgatattgtatggaatgggagactgtcctggtttgaagaacaaacttctaactagatttgctcttgacattcccctttaacagtttttcccagttgccatgattccccttgtttgtttcctttctggaaaaacataacaaaaaatgtttgattctgtatctaccaactcctccctctccaactaattccaactgtatatatgcatagaaactgactggctgataaagtgtcttgatgccttataagaaaagatttttttaagtttctaaaagttcttctgggatgtattaactgttctagatctctgtgcttctggttggtttctagacagttcaattattaatgaaagtcaacttctagcaattccctggtagcccaatggttgggactatttgcttccattgcagggggaagggtttaatccctggtcagggaactaagatcctacatgctgctcagccaaaaattaaataaataaataaagtccgtagctaaacatctgcaaatgattttgcatttctcctctaggaatatcatcccattcttggtatccctcaaccacattcatggtaattcctttccccttcattctgtatcatttctcatgtggcccttttcagaagcaatcctttctttctgcttctcatcacagcaattgcctgagatcttgttatgcatcactgtcagctcagtgttcccaaggcattcagtgtatgggagacagaagacaaaacggtctggagacagcactcattgaagtaggcacaagctttattgatgactttagtttaagagtctcttccaagcaaagctgtctcctgatacacttttcggagaagagaagcgagctcacattcagctctgctgttcatgtcactgtcatcatgtgtacccatctgtgcctatcgatgcccatcaacacacccatgccagggtcctttcgctgttgcctctggtgtctgtctgtctgtctctcccctcttccttccattcttgacccattcttggtttttatgccttcttgatactagaggccctttctgatgctctgttcaggaagctggcatccacattacccttgtgggttaacaatatatttatataaaggagataaggtaataacttaaatgggattcttaccccaggcccgtgacatctctgcataattatgaaactaaatcagtataataaaattcaattctcagtgtccccatatataacatcacagtgattgatagatactcaataaacatgtgatgattgagtgaatgaatggatgatggatgagtttgctgggaatacatcccaccattcttcctcccacataccattttaaaaattccactggaggaaattccctggtggtctgtggttaggatttggtgcttttactgccaaaacttgggttcagtccggtcagggaactaagatcctgcaagccata

SEQ ID NO: 41575 - DNA, 4280 bp, Bovine  19866880697634
  misc_feature (1)..(1): n is a, c, g, or t
nactttggtgtgtgtgtgtgtgcatgccaagcagtgtgctaagtcctgggaatataaagaaggatgaaatgtagtccttgattttacaggattacgattctgggaatgtctatgacatttactacctgaagtactcttttagcattaataagtttggggttagggactgttaacttatagctctatacgttctttataaaacacagtacaacaacttacaaagaattagcagtccataaagatcttgggatttctttggaaggaatgatgctgaagctgaaactccagtactttgggcacctcatgcgaagggttgactcactggaaaagactctgatgctgggagggattgggggcaggaggaggagcggacgacagaggatgagatgcctggatggcatcactgactcgatggacgtgagtttgagtgaactctgggagttggtgatggacagggaggcctggtgtgctgcaattcatggggtcgcaaagagtcagacacgactgagcgactgaactgactgactgactgaaagatctgctggggcttccctggtggctctggggcttccctatcagcttcccagatggtaaagaatctgcctgcaatgcaggagacccaggtttgatccctgggtcaggaagattccctagagaagggaatggctacccactccagtattcttgcctgcagagttccatggacagaggagcctggcaggctatagtccatgaggtcacatagagtcagacaccgaatgactaacacttccttttcatttttcaaagacatgctgaatgaatgcttattttttttaattacaacatctaaatcatgaagtagataaatttttctttgacagttttttgcagggctttcctcatttcatcagctaccttcactgactgagcctgggtcgttcatggtcaaaactacagtggctcttccaaggcacatcttctgccacaatcaatctagctctgaattttaaaatatgctttacttttttttctataaaaatctattccctttgtttcaatttttctaaaaacctgttttctccaagaaacagctttggtaaatagtagacaagaagctagacaagtgtctgaagtctgaattgaaagacctgggtgaaaatgctggttgagcctgtatgtttctgaaaaagtcactacattctaccattttaaaatgagaatagggacttctctggtggtccagtggctaagattccatgctcccaatccaggggtttgatcccaggtcagggaactaggttctctcatgccatgtggccaaaaaaaataaataaataaattcttagaagatgtgtgattttcccaaagggaagggtggaaaggcattctagaaaggaaggaaactgcatacaaaagcatagagactttacttatacagagtatatgcatataagggatcatgtcaatgaagactgtctcaggtactcaaggaaggcaataaagaagatacttaaaagctgtgatggccatggctttgttctttacacagcagaggcagcaaactggactgcttacccatcccttaggtatctgtgtatgagcgtgcatatgtaaattaaatttctcatgtttctactttaggaagtatacttattattagccaaatcatttcctggaacataacatgaaagacactataaattctacaaagaaactagggaaagggacttcaattagaaaagtaaataatgtaaaaaaaactgtgatttattttgctaattaaagacgttatcaagaacaaaataattcactttcattgttcttcaatttacttatgtactcattccacaaatatttgctaagcagccactctaggacagacactgggtaatgtttaaaattcttcagcaaactagacatggcccttgtcctcaagctatttattatatgggagaacagatggaaattaaatacttaaataactgccatagtgaaagtgctacaaaatagcatgggtgctatgaatgtaataatgggagaaattcagtaagacatgggagttagtaaatcttcctgcagaaaccatttttaaaaggagatctggaataaagacatgtttctatgtgtactggtggggagagtcagagcatgaaagggcaatagtgttagatttgaatacaaaaagggagttgggtataattgaaagatgaacatgggttttaacgccatcagtgatagcaaaagacaagatttataggcagggaccagaaaatataggaattaaataattttgaccactgtcttcagaggatgggaagctttaagaaagaaagtaaagccactcagcatatagtccatatttgtttgtacttcacactgtatttctttcatgaactcttcccagtgcttcattgatacctcattaattttttttttaatgaatgcttaccaatgcttccatgagataccatcttgattgttgaaacaactgtcactcattatgtacagactttttacatttttagctattgacttcctcttaaaaaaacaacaaagtgtttgacttgtaatttcacctttctgaaaatacaaaatcactaccacccaaaagctgaacctttaaaaaagctttgtaaaaatatattgtcaaatcttcagagcactgctcaattgtcactgcctagagattcaaagaaggaaggaagaaatccaacagttacaaaaaaccacctcttactaaggagttacaggtgctaagcaccctgattgacacttttatttttggaaacaaatgtggcaccaaattgtttaagaatatttacttcaacatttgattacatattttgattttcaggtagaaatttaacagtagtgatttcaaagaggcttaaatttactacaacaaaagctcaattgttatcactttcattatatattttaacatagtattttatatagtcataagggttcaaattaaggatcagaagaaataactacagtgtttaaaatggaaacattttcacattttatttttacacttttgaactttagattatgttctatgtgactgaagagagagatctttagaattgatttggacttgtacaaatttgttcaagtttaagcctgtcttttttgaaagaaaacaaagtgctccattttaaggatcagaaaaaaataaagctaatgaaatgttcataattatgattttcttaaaaaatgttttatttgattagattctactgtttggaatttagaattgaaaggtagctcattcccaaatgtccctgaagtgaaatgaagtgttgtgtccgactcttccatgcaaccccatggactgtagcctgccaggctcctctgtccatgaaattctccaggcaagaatactagagtgggttgccattcccttctccagggaatcttcccaatccagggatcaaacccaggtctcctatgactcttgcattgcaggtgaattcttcaccgtctgagccaccagaggagccctagttagtttttaaaacttattataaataccatttgctctgtctctttgaaccaaggtctttgcttaaaaggttaagaaataacctttatatacccagtttttctgagcaaagagtatctaagtatcatagagcaagatgggtttgttacttgcatttacttctaattaaggttaaaagcttataaattcattatactcaccatttaagccaaatttaaataccttaacccccagaaatgtaaagaaatgctttgcatctgcttaggatcttaataaattcatttttaatttaagtatatttgcaccaagggcatttttttcctcaaaaatgtattacaatttagggacttaaaaattttctattaaacagttttatttttaataatattatctgagagacattacatacggatagtatgttatactaatctgactcaattctagaaaatcctagctcatttatatttatgttagcatatatgtataaatcggagaaggcaatggcaccccactccagtactcctgcctggaaagtcctatggacgtaggagcctggtaggctgcagtccatggggtagctagagtcggacacgaccgagcgacttcacgttctcttttcactttcatgcattggagaaggaaatggcaacccactccagtgttcttgcctggagaatctcagggacggggaagcctggtgggctgccgtctatggggtcgcacagagtcggacacgaatgaaggaacttagcagcagcagcatatgtataaatagtcactaatttatatt

SEQ ID NO: 41576 - DNA, 1653 bp, Bovine  19866880713852
  misc_feature (1)..(1): n is a, c, g, or t
nttggtgcttcataaatatatgtcaaatgaatgaaatggttttttattaaataaatagtagaattttaaaatggaaaaataatgattattattctttaaaatgtgctttggtaggtatatacttttattttaaatcattgtgttatcagtagtaacacattgacgatacctgataatggctacccttcactaaaaacttcattgtgataaatgaaaaacttcaaagtgataaatttcattatcaaattaatctactctgatttattttttaaaatctcagaccttttcaacagtggacactactgctgtcaaaatacgacaagccttcttaagccacaatcagatatatacttcaaatatttcaacaagaaatacggaaggacccaaagtgcttttgttgctgttgggactttgtttattctatgccatatgaaatgtatcacataaaatcatggtagctgtaatctgtagaaactaccataatgtatgtgacattttatttctgttcgtgggccaattagtcagcacaagggtccctcattttgtgtaatgggcaatttgaagatttctttttagctgtgtcaaatataattgaatttatactctaataaaacagagatggatggataaaattctgtatttatacaatgaaagccttacggtctttccaacgatgggtacaacagcacagcttcagtgttttacataagaaaaccacactgggtcaagcagatctgattgattttgggcaactccagtaccaatacggctttctttgcacacttaagttctgcttctctgtcatttcttattcgataattcttctatgcaaaagcacagactagctaaaatcagcaaatcacacaaaacaacctttctagacttttactataccttaaaactacagttgtaaaatctaggtacatttggcagctgttattttatgatgaagattagaaaagcaatctttaaaaaaatccccagattatttaagcaaatataacaatacttgaaagaaaacttgacttgcctcagttcctagtacagtcactttaaaaagccaattaacatgcatacacatacagaaaattaatcacttatagtgtttgtttggactctggagctccattctggatctactgtcagtggtacaggctataatgatacctcaaggaccataaaaggtttggactatcttctttgcatgtacatatgcagattattaaatttgcacttgtaagaaattatttcaaaattcattatatcaaagtcattaaacattgtccatttaatgtgaatttgtgcattttaatgcaaaatatcaattattaaataaccataaagaataataagttgtgagaatagaagagagtaagtgaattacctactgaatgtctccatttgaaataagtttcttttgctctctaggatttttgcagacaataatataatgatctatctataaaatatcatatttaatgtttgttgctaaacttatctaagtacgtcgactctttattaaatctacttcttagcattactaaaattccataaggaaaatatttaaacatcttgcaaattgtagaatgctgcggatttctatttgcaagggaatgttgaaagaaggtgaaaggggtgatatggtctatattt

SEQ ID NO: 41577 - DNA, 1700 bp, Bovine  19866880732353
  misc_feature (1)..(1): n is a, c, g, or t
ntgaactgaaaatatacactaaatctctctctgatttaaatttaaatcagacatcagaactgaaatgtatggttcaacaaattctattcagttttaaagagtttttaatatttcatatttaataataaccaaatgtaatataagaagtcactgtcacagtaatacgtattaaatacataaaatacttggatagctacttaaattatgcagataatctttaatgaatgggagttgataacttattttgcaacctctgatgtatttattttgcacaagtgatagttagattttcttaatttttaagaggcacttgagccaagacactagttcttgatccacccctttccctaagcaccacagggctgcatttgaagcatgatacaattttaattgcaaagatttatcattatgacatgtaatttctaactacacgaaatgacaatgtaatgcataggtgtgaaattgagccacacattgactatgcgaaaagtgatagcaatgacataggctgctgctttgctccatttcatttttctaaaagacattatctataagtagaccatgtactaactactttattatctctaccatcttttccttgcaaaactactaaataatattgtttgaatgaccctataaagcacatatcaaatttcatagtatttggtagatagtggatgaatttggattactactgagtcagacatgaactctagaactgcttttgtttcattttcttcccttttgtaaataagaattcaaacccaagcatatatagattaatatatattttaaaaaaatctttataacaacctagaggggtgggaaggggtaagaagtgggagggaggttaaaaagagaggggacacatgaacattctacactgactcatggtgatgtatagcagatgccaacacaatagtgtaaagcaattttcctttaattaaaaataaatgtttgaagaaaaaacagaataacaaaatatctttaaaatgtttcctccctctctctagaaccttgaataaaatcatttttgaaataatacagtaaaaagaacactagactaaggcaaggatcaaaaaacttatcttgaccaaatgtacaacttttggagctaaatcaaaacaaaacacgcaccaaatatatttatttaatctgtgttttaatttttttaaattctagtgttaatttttaaaaggtcatgaggtaagttcccaattagagcactttttaattctgttaatatactctatcagtttagttcctaatatctgtaggaataaacctaaatggcctgtaaaattatttttcaatatcataagaaataattcaattcacttatgcaatcttcatgttttttagaataatttaacttccttagtaaactatctacattaactaaagcttcattaggaaataaaaaagaaagactgaattgaggaatatgacctcctcatatgagtaatttcacagattctcaattcattcacacatagcagaagatgataaaagttcagtgtcatgtgacctccttccttctcagaagctctgtagcatgatgataaaggaaaatctggaattatagtaactggcttcaaatctgaacctcatagattaagcaacaggcctttatgtctcattgcttaatttgaaaactgcagtttcttcatcttcaaaatggaaataatcacagtaaccta

SEQ ID NO: 41578 - DNA, 3421 bp, Bovine  19866880761032
  misc_feature (1)..(1): n is a, c, g, or t
ncattaaataatatcacatttgttccacttctgaattatatattttttaaaatataagacccatatttattactgttcttatatgcatttgggacttcccttgtggctcagtgggtaaagaatctgcctgcaatgtgtgagacctgggtttgacccctgggttgggaagatctcctggagaagggaacagctacctactccagtattctggcctggagaattccatggactgtatagtccatgaggttgcaaagagttggacatgacttttatttatatgtattttatcaaaaactatagctttagatgaagcctaaagtctttttgtgagttttttttttttgctttaaaatatctcacaaaccttcaaataattaacttatagacaactacatttaaacagcatacagttaaaataaaaattgttttaataattaaattagaaaccataatcagtatctaatgcaaattgtgtgtatctaatgcatatatgtacaatatgaattatatatgtatatagtcagaaatatattgatataagcacaattgttctttgatttctataaaattaaacaataatatagcagcttgaaatctgtccacagtctacaaattaatgcaactttattttgtgataagtttaccagtttatttttaaaatataaggattgatagttatgtgttcttatctaattttggtctgtcagagaatgagatctttattcttttaattatattcagatctcagacatgaagagtacttcatacaataaaattcagtaaattatttttactgtaaacacattcttgacttaaaaataaaatggcaaccctctcttcaaatgaaattctaacccttgtgatcttgtgtgtcaaggcaattatttataatatggtatggaaattagtatattcaattaaaagctgaaagttagaattaaataactcaattttatctacttgactatgtaaacatactgacagttttaaattgtttgacacaggccatcgtttgtgtcttttcagtctatacgagaagtcacaggctacgtgttggtggctcttaatcagtttcgctatctgcctctggagaacttacgcattatccgtgggacaaagctttatgaggatcgatatgccttggcaatatttttaaactacagaaaagatggaaactttggacttcaagaacttggactgaagaacttgactggtaaggaaaacatacaaaacagcaaatatacatgtattatcaatatagtgtgatagacacacacaaatgtgtacatggtttctgcagcatgtattacattgaggaactttataaagcattgaaatacatattaatactacttattcattttgtgagaaatgatgctctacattgccccagttttatgtacagatattgtaaatgcaatctgaaggatagcgtatgactgtatctcatctgagcagaagtacacgctaaggaaatgctcagtgactgaaaacagatatgaagcgggtttaagaatgctctgctcagtagtctcaggtgaatagtggaccatatcatcaaatctctgcaataacatcctaactctcactttcgttaaagctcagtaaatacacagactgttatatcttgttccactaatctagcttttcgtacaatctcttatttttggaaaacatatctaatgttatgtttttaacattaatcaaaacattaatacagttttgatttctcttactgagcaactcactaagtgccataagtagttcttcctcagaaagctttaatcatcagtgatttttttccccctaagattggaattaggtatcatcttgctacaaataattctgtgcaggactctgtgttataagctggcttttgcaattccattgatgtcttttcagttcatgtagttcagagttcataaagcctatggtggaagctattggtacaagaattttaatcatgaattttattacatgttcctggaaccaaaaatgtgctaattagtaattacatcagagtgggagaaaggcgtttgaactattaatttaacctgaattaataaaatgcaaaattaatatattttttgtgtgtctttgagtccacaaagtggccatgtttcttgatactggaatttgaaatattttagaagtattgccttaaaatattaagaaacaaataagattaatattgtcaggttattaaaattatgtatttatatatttgcagaagacataaaatatataattttaagttagaagtagcttgatagttatacagatgtgaactaaaattggagtatcttagatgaaggaaggagtgatgattatgttatttattttggacatgattgctatagacttcatgacataatggtaaatgcaaattgtccagaatttatatccttcatcaacatttttaccttttttttagttcaaaatactttctttactgaagagcagggtatttgactaaattgctacttgcatggaaataatgataggaggaagaaatttggaaatagagaaaaattgaatgattgaaattaggaatccaaaaataacatgatccaattaaaacttgccaaaagcacattgtgttttcttcttgcttttcctctgattatattaaagaaaaattgaataaatttattttcaaaatcttataacatatgattatgttattattccacaatatatgctatttgaagaatcttctcacaaagaaaattagtctttaaagagttattcatttccacatttacttaacctcaatactattaaaatataaaaaaggaattatttagtcacagttatgcaacatttgagtatatcttttctgttagcttccaccatgtcttgttattgtgactgttgtcttacttatgattgactagtttcatatcaaaatatagcattattatcttaaaaatattattccctaaattgccagaaaaccttataatattttcctgtgtagcagtaaagatggaaaattaataaatgagtaacaataattatttgaaatgtttagaaaaggtaagtatttattcaacagttattattaatttcttatttgaatatgaattaatgaaaagtacagtaaaataaatggtggaaattttagatattttggaaattttatatatatatatatatatatataaataatatgaatgatgactacatgccaacactattccatgagacagtctagaattattgatcatattttaggtaataagatcaatagtgttactcttattttgaaaatcagaagttttacagtaagtaccaccatgtttgggtataagaatatacgaggaaggacaggagacttgtaactacttaactctttatcagaaaggaattgggataaaatttgctcctacagtaatatcttagagaatttagtctccta

SEQ ID NO: 41579 - DNA, 1328 bp, Bovine  19866880766974
  misc_feature (1)..(1): n is a, c, g, or t
ntgcattggccaacaggttttttttttttttttttaaatccctggcaccacctgggaaacacaggatattcagtatagacagtttaaattagatatacccaatgttctgtattgaaatataattttgtttgtaaggaaaatggagtattttccctggcttgttgtaatgaattttttaagtttatctcttattatatatatccatccatttcaacgttttgggaaaaaatgctatgattcaagggaaaaaatgaaagatatttagggagttgaggactatagtttttcagttatcaaataattacagacatgtataatatgaagatctttagaaattatatctcagatgataaattaagatttattttttacccattttaaattttagctgtttataacttgccattccattctttctgaaatggtggacattacttttcttattgctgttgttaaacctatatgatacggctttatttaagtaaacaacttttgaatttttaacagatatttatagattcaaatgcaggcttccctctgtgactctgtggaaaattaactacctgcaatgcaggaatcgcaggaaacttgggtctgatacctgggttgggaagattccccagaaggaaggcatggcaacccactccagtatcttgcctggagaatcccgtgtatccataggagcctggcgggccatgatccatcgggtcgtaaaatgccagatatgactgaagcaactgagcatgcagcacatagattcaaattcttttccttgacttttgctaatatatctgaggaggagtctttaataacaaggtttagaaagaaaggagtgaaatagaaaaatattattttgcaaatagtctcttaagttatccaagacttatgatattcaaaacctttaaagtttaaaagaaatctgttgatttttttgctaggaatggggggaagaatcataattgtatacataattttaattgtgttgatactaacatccctatgaacaattttgtatgcaaccaataattcatacactagagatttggaatattttcaaaacatccaaaataccagaattctttgttaaatatcttaataaggtgaattgagggattgtgaaatagtgaggatattttcccacggacaaattcttgagttaatgacacatcaaagaccatttttattgcctgagaatcttagtcccttaaccaacagaccatgctttcttcacatttcttccacacattcatgcatttaaagagattctgtatatttcttcttagattaccagagtgggtaatatatacattttacaaagtgcaaaaaat

SEQ ID NO: 41580 - DNA, 934 bp, Bovine  19866880802396
  misc_feature (1)..(1): n is a, c, g, or t
ntattagaaatatgataattgtagtgagacttgaagagacctgaaatacctctggttcatcctataaatttgattctggtgcatacaatttaatctatctcagacttcaaacttgcatttagacataacttaatgtttcttttcattttttaaaataaaatttgaaacgttgtacttatttatgagtctatagatatttgttaccaatatcaagatttgttactttaccatgcaaatcctgtttggcagcatattttcttgaaaataatttcctagttataaagtgtaactgtggtcgatttagttcctttcatacatcttttttttatattgacgttgatgccactaaaactaatataaaactatttatatgatgtttttttcttccttgcaggccattaaaatagacaagagtttgctatgacaagaaataaatacattttgtcttttctcatagaattatccacacttttctgctagaaatcataatatccatacatagttattaatcaaaatcttttttttttttttgaaataaacactttcacctttacatcagttgaatgcctcctaagtgaccacagtctgccagatgtatgacttgccaatctggtcactgctctttaaaatttctttttgaatattaaaaaaaataaataaataaaagaaactacattagcttctaaggaagagcccgttctgtgccattgattaattggcattgataaataagccgcattagtgttacaagaaaatggcataacagattgatgtcaactggagctctctaggaataaagctgaagacaactcagcacaccatctggaagagacaatgagaggtggcaaatttcatgcaacaggggaaaggggagggtgcttttcagatgctacatatctgaactgacactttgatgtgttcaagtgcaatctcc

SEQ ID NO: 41581 - DNA, 3220 bp, Bovine  19866880805805
  misc_feature (1)..(1): n is a, c, g, or t
nattctgcaacctggagtttgggaatgcctggtctagatggtgtaattttaaacgatgttcctgtgtttcccttgtaaacatttgggtcaagtgcactccaagtattttatggtcttaagggttcaggctctgagtaatatctaaaatctgatcttagaaagaataattcaagtcttaaaattacatgtttaaatttttaagggagaaatgttattttaaaaaagatagacaaatctaaaactctttttcattgttttcacaagatatgaaaaggaacaaaggcaaagacaagtctgggaaattcttatttcttaaaagaaccactaacatgtaaagaagtaacaaacattttgacatgtgttctttagttgcatatctctatcattcagtattgttcttttgaatatgtgttgatttagaaaaaaatgcaccaaatagctccttggatttactcctacatttttgttggcttattattctttgaattttcagtttactttgcttaaagaaagagcagagggaaaggagacttactgaagaccattaggaaaaggaatatagttagtctcttgctccagggtgagaaggttgagtaaaatttgattaaaatcaggtcaggaactatttagtgagcttaaggaagaacctgatttataaggttgtctcttcatacctgcacttgtttgttttaactgtctttaccagtgaaataaataaaaataaatgagctaagtcagataaatacatatgcagtttgactgaaggattagatggagtagctaacactattgactaactaaatcaggcagaatggttaaaccagtttgtaggcatacacatcattaatgagagcagccaagaactacgattgcttaacaaagatggcacaaggtagttagccatatgtttgaaatgatttaagtgaagattgccagaagcagaaatggactaaatgacctctggaggcacttttccagtcctatttttctcatttaatctaattttaatttttaaatctatatgaaggatacgaacacattttatttcaaaatgccttgggttttgtttaggtgacagacaattaaaaggagagaatttcttgcaagcaaacacttgaattcagtgctaacatagctgttttgatcaacaccaattactttaagttgtagggtaattgaatttactgtttaaaatattcattagacaactgcctaagaaagttttatgtatttatttgcacttttagaacaatgaaacatatttataaaatattgaaatatgtactttatatgcacaaagagaaataaaactctcccaaaatatgcctataatttgtaagctaaacttctttcttcccctctctgtcctcagtacctagtctaaggctgagaaaaaaagtttacctgattttcatttcacttatatccccttctagccaaatttctcttcggttctgttactgcttgtttttcctccatccactcagaagtaagattagtcctattttcccagcaatttaaactgaatcctatttaaggtctcccaaaatattccacctttatgacagtgaccactgtgagttattctgagctggttgttgctctgggagagatctgaagtacttatgttttaaaagattaaaaaaaaatatctttagaaggtatttatattttaaagaaacatgatttccaaatagccaaaaaagtgaaaacctcagttaaaattgtagccttcaagtgacttcaagtgggtaaggctctcttttgtctgagtcctatggaacactttctcagagaacaagtaactgagatctgatgcatgtgggcattcatatatgtacatgtatgtgtgtgaacagactgtaccatgggtgaaggttgtactggattggtccttgtaaatcctcacgtgtgaatccaggagactaaatggtaaaaactttgctgtgaaattaatcttaagaaaggcaaatgaaattgattagtgagcctgataatgaataaagcagaattaatttggagacatttatgaaaatattatggattttcaatatcacttttaaaattacaatgctagtttcaaaactatctgaaattataaggtaaaattcattgcatgggaaattccctgaaggcccagtggttaggactcatgagtttcactgtgggggccttggttcattccctggttgggaactaagatcccacaagccacatgggatggccaagaaaagaaaaaaaaaaagctgcaatgggattggatgattgctaaaacagataaaaacaaacaaacaaaagcacctgattcatttgtcctcaatctcttaaactgttagtgagcatttgccaggtgctccaaactgtgataggatagacattgtttgtgcttgacagtgacagggaggtgtcaggaataatgaatttaggaagatatataaggcataacacttgcctactggaattcacactttgttagtgaagtgacactaatataactaaacaaaatctaatgaattcaaaaccttatatacataactattataatgtgtgatacagttctcagtgtctggagttagaggtgcaaaagtggtaattaatgatggttgaaatagtcaagaaaataagatcttcaactgggcctttgaaagtggtgaagttaaaatatgatagggaaaagaggaccaggtcattgcaggaaaggatcagaggttaaacaaagttctggaaatgagaattagccccaggcaatagcagagtacaccaagaaccatgctccttgattcagtccatttcttactccatgacgcataaaatgttttatttaattttaaaatgttcggtccactaatgacctaaggcaggagaaaagcagttatcaaaattgctagtgatgtgtatggtcacttcataaatatgatttaatgattttgaaaacagacagaatagaaacagcatgctgaaagcaataataaggcacttttcaaacgtgtcaggttcttaaatcataaatccaaatgaaatagagtggacttttctctgatggttaatctgtaaaaatatctttggaaaaatacaggagtagcttattttctgatcgttcttgactagtaatagtaaaattatgcataagtgaattttatggtcatttggctttggagattctcctgttgaaataatttcaatttctttgtcctgaaagaatgctcttttattcttatat

SEQ ID NO: 41582 - DNA, 1787 bp, Bovine  19866880850381
  misc_feature (1)..(1): n is a, c, g, or t
ngcctcctgcattgcagacagtttactgtctgagccaccatggaagctcagattgtcctaaagggactgacaatttgtgaagcccttgtagggtcaagttcagttcagttcagtcactcagtcgtgtctgactctttgtgaccccatggactgcagcatgccaggcctccctgtccatcaccaactccaggagtttacccaaactcatgtccattgagttggtgatgccatccaaccatctcatcctccatcgtccccttcacctcctgccctcaatctttcccagcatcagggtcttttcaaatgagtcagttcttcctatcaggtgcccaaggtattggagtttcagctccagaatcagtccttccaatgaacacccaggactgatctcctttaggatgaactggttggatctccatgcagtccaaggggctctcaagagtcttctccaacaccacagttcaaaagcatcaattctttggtgctcagctttcttcacagtccaactctcacatccatacatgaccaatggaaagaccataaccttgactagatggacatttgttggcaaagtaatgtctctgctttctattatgctgtctatgctatgctatgctaagtcacttcagccgtgtccgactctgtgtgaccccatagacggcagcccaacaggctctgccatccctgggattctccaggcaagaacactggagtgggttgccatttcccttctccaatgcatgaaattgaaaagtgaaagtgtattatgtaaagtttaaaaataaaataaaataaataaaataagaaaaaaaaaagaaagaaaagtgaaagtgaagtcgctcagtcgtgtccgactctcagggaccccatggactgcagccctccaggctcctccaaatatgctgtctaggttggtcataactctccttccaaggagtaagcgtcttttaatttcatggctgcaatcaccaccttcagtgattttggagctcccccactccaaaaaaagtttgtcattgtttccactgtttccccatctatttgctgtgaagtgatgggactggatgccatgatcttaattttctgaatgttgagctttaaaggaaaattaaaactttgtcaccatttctattttctgatatatctgaatttataaaggtattataagtgagcttcataattttattttaattcacacaccttcaggacagctaatttttctttttgccaattattcttgagttgttttaagagtctatgagtcaaagctaactactacttaatttttttcccctcaaacctcaggcttctggagagctagctcttctaacacatggaattgaaactcagtctcagccgtcttctttttcgtccctgagcttcttaaacatgatggacaaaatcatcttttatgtattttgcattgagcatgtgcttagttgctcagctgtgttcaactctttgagattccatgggctgtaacccaccaggcttctctgtccatgggattttccaggcaagtatactggagtgggttgctatttcctccttcaagggattcttcccaacccagggatcaaactcggctctcctgagactcctgcattggcaggtggattccttaccactgtgccacctggtaagcccatattttgcattattgtatatttatgtagctttttactagaaagatcatgctttaattttagagaagaaaagaaagtgctgatggcccttcaaagccctagaaaaatcgaaagtatttctagaggtacatatgtgtgtgt

SEQ ID NO: 41583 - DNA, 2944 bp, Bovine  19866880874010
  misc_feature (1)..(1): n is a, c, g, or t
naccaaaaatgctgtcttttgcatgtttaacatggcctaaacagtacaatctaggagctcagttaagttctctgcagttcagttccaaatctttgtcaagaaactatagagttttttaaactggaatagcttactctttctaccagacacatagagttgataattaaagggtttaaactccattaatctttattagggaatgttcataacatggcacaaaggaaattcttgacttcattatgctcaacttgtacttttgtgcctgtgacaggtaacaccccttaccacgttcatattccaaaattatacttcctttggttagctggcaagtgaacatttgggaactctcacatgaagttgctgcctgcctgtcaaccattctgtctgcggagttaagaaatatttttctacacgtcaatagtaatgattcagttatttgaagattatcatttcctattccgggcttccaagatagcactagtggtaaagaatctgcctgccaatgcgggagacacaagagacgcatgttcgagccctgggttgggaagatcccctgaagtaggaaatggcatcccactccagtattcttgcctggaaaatatccgtgggcagagaagcctggcgggctacacagcccatggggctgcaaggagctggagatgactgagcacagtagcacatttcctattttgtcaaaatagaaaacctgatacaagtgataagactgataaatctaaagtttacacagtgaaaaaagatggaaattattagagtggctaaaagcagcacttacagcctcagtcaaataatcactatacttaagctccagacagaagggtcaaaaggaaattgaaagaaaatgaataaattcttgaaaacatcaaagtattatctaaaactaagtgtaatcaggaattttaaagtattcattagatttcgaggagtcaagtaaaattcttatgcaactactaagttcaggttttgtaagctggtacaagaaacagcattgctgtgcagtaaagacagtaatgagactgacttgtgttgctctgtcatttactgttgctatagaattagtcaaagtgacttaatttctctgaaactgtttcttcttattttatttcccttttttgctgactgattagtcatgtgacgatgaaacttttaaaaagtatatacattattaagcattctgtatatgcatagctgtgtgtggtattattaaaggcattataatggcttttaatgctcattgaatgctcatttcagtgctcattgagcactgccacataacatatgtaaaacatctgaaatctatgttatttcagtaaaagtgtgattttaaaaagagttaccataccatcttttagaagaacattttcttattattaaacagatatgtacttattgcagaaaatttgaaaaactctgcaaaaagattttaaaagtaaatgtaatttataaatccttacactagtactatgccagtatattactttttgggtgtgtttctgtgtgaatacgtatatgccaaaaactttaaaatgttgattgcattgacaatataaatcggtatcttgtattttctcttatcataacattaatatttcctttatgcttttcagtagttttgaaaaatatcttaatagtcaatttaataataaaacatttaattagttaatactatttaatatttattaaaatattttatattttgtaacatttaataattttagtgatagtttaaaatattaattttaataattaaaatattgtaataatctaatcataataagcaaacaatcaaatcatgtcttttttctcaacagtttaatccaagtattactgaaataagctttggaatagttcactgacattataaataataataaatccatatctggaataatttcttataatttactatatatgattacagcaacaattaaaaaaaaaatcatgcctgagccttaaaaatctcttgcaggtaaccatacctggtagtattatttctggttcttcacttctgatttttacattagatttaattccactgaaaaaggaaaaattacattgtaaagacacaagaaaggtcgttattatgcagaaacatccttaggatggcatgaagcctgacagcgattgctgctttcaagaacttaaggaaacaaccgctactctggaaagataaacccatatgggcgatgtgaatcttacagtcaggcccttacctcttatcctcatctcaaccttataataccagctgatcaagaaaaaagaaacagctcagaaagccttctcttcttgtactctctgaaatacttttgctccctcctgactatttacaaaagggaagtatgagaaaaattcaaaggcaaataatatagtaaatgttttccatgactgaacaaacattgtttggctgtgactttcatagtctataggaatcctgagtcaacagttttgcatctgtcagtgttcctttgcaaatctcaagagagcctttaaaatgagatagaagaccatccattgagctggcttgaatatacactgtctctgagagctctataaatgcagattacctgacctctctgggtcgttctcggaatcccatgctttgaatacggaaatgacagttgacatgtatctgtaatacagcactcaaagaagtttaacataagaggactaatttatgctaataagatcatttcagcaaagaagagaagtgcaaattgctttgttttaaaacgcacgaattaattggattaatatttcattttaacgcacgcttgaatgtacgctagatgactaataaatgtgtatgaggtgaagtaatattcattgaatgtactcttcctgcttaggaaagaaatagtgaggatgttatctatattttaataacaggaatcaacattgcattccattcactgattcaacaaatatg

SEQ ID NO: 41584 - DNA, 956 bp, Bovine  19866880935057
  misc_feature (1)..(1): n is a, c, g, or t
naagcagcactcagccatattgtgagatctacaggaacaaaatgatccaaagaatatttctagcttaaggtaaattacttggaaaatgatctgatcaaaactaacctacagtgaaaatcctgtgagtcagatggaatcagtgaagagtggcacattcttatgaaggtgtcaatttttagatcaggtccacaatttctaaaattgatactctagccaatgttttctaaagaagattgtttgcttgtcatgtcaaacagtgtgcattaactagaaaaatgaaaacgacagcaatacatttatgtatataagtaagacagaaacatagttgaaaggaaatgttataattatgggatcagagagagtgaccagttcagcagatttctaggactcagctttagagaactaataagtgaatttatggaaccgtatgaaggtaaaaagggaatttcttctgctgtatcactgatcagaagagagagcattactggaaaagtgaaacacgggaagggggaatctccagggaataagaccattttcttttttttttcttcactagccatcatgttttctgtcacaggtactaagataatctactcaggccataagaagccacacccttggtttatctcccattcagggttcctgaaaattcccattctctgaactgcattcttttccatctctatagcatacttaggaaaagctgaggaaatttagcttaatgggactctttcaggaaaattccctacttgagactttaaacctgtcattattctttcttgtcactaacatataccaagatctgtatgttcccttccctaagagaaagtatatatatatatattctaagaaaatatgtaaggtcaacaaactcccatattaaagcccatttattaagaaagcatgcttgtttgcttatgacatttagaaaaggaggaaattcttgctcctcaggg

SEQ ID NO: 41585 - DNA, 756 bp, Bovine  19866880944464
  misc_feature (1)..(1): n is a, c, g, or t
ntttttttttttcaaaccatttttaaataacaaaataatttctagttgttaaaagattcattttgacctcacatttgctaatcacacaagatgtgatgatgttattcatcacacaagatgaataccaccatttgctatctacaaagcaaaagaaccattgaataaattggacccagccatgtgcataatcctccctcagctgattctctctgcattgtaccagagtgggagtgtggctttttctgcctcttctctgtaacatataaaaggttttaactttcacttaaaaaagaaataatgaaagaaagaaaaagcagcttctgtttgtacataaacaccaggcatggagattctatactgcatcctaggagaaaccagggagccaaaataatgagcttaaaacctcagaaatctgtgtctatgattcaattatttgaaagcagctactaaataatatcttacatgataccagcacattttcctttgtaacatgtgcttctttgtttatccaccccagaattttgtctttattttaattgctactaagctctttgcttaaggttttatggcttcatcctcttatactaccagatttatagcatgtggccactgaagttacattcacttttcctctttcatgtttaacatcattgcctcaaacttttctgaatgcatatgaggtcatttatctctccatgtttctattcagcctaagtgctgaatttatgtgtgtgtgttttcttttaaaaagaaagt

SEQ ID NO: 41586 - DNA, 950 bp, Bovine  19866880979012
  misc_feature (1)..(1): n is a, c, g, or t
natagtttcagagatgggaatggtggcatatcaaggagaaaattaaatttcatcattttggctttaacacgtaggctataaaagtgacagcttggtgcactgtagctgacagttcccattaactagaagctaatgttgcagagtcagtccaaacactgagtcacggcctctggctacaggaaggtccccttcatactaggattctcacaccccaccatgggaaagaaaagctataaatattttccactagtttcctcctcaaaatgatataatgaatatttacacattgggacccttttcctatcctgaatcttcttggaaaaacacctccactgacacattttattggtctgagcaggtggctcaagctagccctccttcccttcagagtaaagaataagcatatatcgggtttaggtttcggtttttgaatcagtggtaaaacaataaataaaaggttaggaaacatgttttgaacctttacacagttttgttttgttttttaattgcaagttggtgagaaaacaagtaccaggaaaaattggctaaaatattttttaaactttagaaaatgtacgtgtttaaggaataatttgaatgagacttaaaaaacaaaataaatgctaaattgattggcttaatggaaattgaagtacaggagactatcaaaagaaaaataagtcctttttaaagtaagtttatattcatttaacaaggtcttttttagtattagctgttggccataggttctgtgagttagtatgtgtatatggtgggaggggagggaggtgaagatggtacaaatacccagtcagtatttacaaagtgctcacgttataattaaggaagctcacaaatcacaagtgttcctgaaaagagcatagatattaacagcagaaatgagagtgtgactgcttagggccagttctagacatttccaagtaggcaac

SEQ ID NO: 41587 - DNA, 1187 bp, Bovine  19866881003714
  misc_feature (1)..(1): n is a, c, g, or t
natcattaaaggatagtgtactatgctattttgaggtaaccctaccctttgaagttagtataatgaagatcattacacatctctctgaaaatttcattgacatgcctataagaattgaatactgtaatgaactgaactaaatagactttgggcacagttataataaaatcttaaggcatgtacagtagaatatgtaaaatatggaacatttagctcttaaaaaataaatgccattataattgattttgttttctagttaaaaggaaaagtagagtttacaggtactttctgataacattgtagagtacactaccaatgattatcttttaattttgtgattatgtatattttttcaatgctttgacataaagtgaaaaatacatttttgtcctaaaaatcctgtaaaaattgtattctttaagtataaatagctatacttttaatgtattttagttttgagttagttctgcattttaaaactcctaaaagaatatttgtttcttaaccttcacaattaatcacctcagtattgttttttatttttttttaatagaagaagataactaatgaaagaagcactgtggtatttactaaacagcggatgcagtctttttgtacttaagaacaatcagttgagaatataattctgtaatgattaatcagctcttacagatttctgtttcttctacctgtcacttaatcttataccctatttatcccatcagtatttgtacttcaaaaatactttacacttatttaaggcatgccatattttctaacagctgtgatacagttttttttttgtagttatttaaaaactaaatatatagaggttattgtgaatgtatatttcattatttttctttataccaatttcatcttatgttagcagaaatattttgaaactgtttcttggaattacattttatttcatttcaaaaggttgctagaaaagaaaatgaatcagatttaataaggacaaaacactaaagattagtgtttgctctaaaaaagagtgtatgctctaaagaaagtgtatactacagtttacttaaaaaagcactgttttctcaagagaaaaatatttgtacttatttttccctgattctattttcccagttctccttcaagggtaaaataagcttgaatttttacccaaaaagaaaaacaacttggggaaaaagcca

SEQ ID NO: 41588 - DNA, 2872 bp, Bovine  19866881038713
  misc_feature (1)..(1): n is a, c, g, or t
ngccttctaatttttgaggttttaagaaaagtatattttgagcaaatttaatatcctgatgtgaagtcactttaaatatctattctgaaaccttgtctaattttggattacatgtatacatgcatatacgtacattatgtgtgctatatcataacttctatattgatattatattacatacaaattagacctataaattatatataagataacgtataggttatgagttgtaagttacttatatctcaaattacagatatcacacaagcacttgtatgtatacaaacaaatgtataaattatttctgaaagcacattttgataattaacataaaacatcatccaaagttacaaactgttcattatttgacaataaaaactattttaaaaaataataaaaacaaattttataccatacaaattatgaactctaacacagaaaacacaagggaagaaggataccatttaatccaagtatagaggttctagatagaaaaattttgtcctaaaaaggacaaaacagaaactctaacaggttgcactggcctttgaatcaaattctagttcctccatcaagcatgtgatcaatgggaaacttatccttttgagccccaatgttttcagttctaaaatggcaatatactgtacaaagctgtagcaagatcaaaagagataatatgtgatatctagaagaaattcaatacccattttctccccatgtcttttggaaaattactctagcagtatgccatgaaagaaagtattcacaacaatgttttccaaacatgaggctcccacacaatcactgtcccctgctgcagagctatgaagtatgtaaggaaagctagaaaaataacattttcatcaaacattttccagacccagatatgcttaaaagcgctaagcactggcaaattacatttagatatttagttattggcttgtaagtcttctctacacaagtctgggcatggtaaacatcaattaagccttgtgtacccaaaatgcaaacttaataaggaaatagtgcacatcatacttctcaataaaccatctggagatttactctctttaagtttaggcacagttctctgaacattcagagttcattttaaactctgttgacactgactactgcaggatttcaattcataaacatgttggtgaatacgatgtgttttgcttggaaatggttgtatgttgcctgagcaaagtttaaacataaaaaccaaaaacaagcaaactgaaaatcccaccaagccttctgactgaatgtgttaaggtctgcagaaataaatcaatagctggatcttcttaggaaaaggaatacttcttcagtgagtgagagaatatgaggaagggtttagagtaaggtggaatgtagtgtaactgtcaatgataacttccattaatttgggtagcatttaagaattcgattacttaaaaatccttaatctctttgaattcttaccaacatcctgagataaattttattaaagatgaaaaaatgcaaaagatttataatgctttagggaatcacacaaggcaaataaaccttagaggttcagcaatatatctgtagctagagggaagtaaagcttttaactcaacttccttgatgttttttgagaacttaaaaacttgattaagatcagatagttagaatcagacaggcactgaaatgaacatttactactattccctcgtctaatattcatgccactataccattctgccttacaatgagagaagtaggacaggggtgagtggccagggactaatcatcccattgctctctgtgagtttaaaacaaaaagacaggaacccacagagtgactacttaacccacactactctcagagcaaaggttgcaccatctgctgagtttctatccccatcttcctgtgaaattaactggaacagatgactgacatgatgttctcagtgctcataatttttacaggaagaaaattaaaaaggtaattaagaaattaacattcaggatttgtaaagactcttgattatattttagaggtaaacctacatccatcagattaacctcacaaattttttgtattagaaattttgttttatcttgagaaagattcttctgagtgtgttttcctaatgctaggacttgtttcttaccctaagttttttaaaaagttaggagtactaaagacacgatatcataaatttatgaacttgcatctagaagagcaagctattaaccaaaatggtttcaggtccaatagccaattttcacatttctccatagaaaattatctatagttcagggactaaatgtgggcttcccaggtagtggtaaagaatctggctgccaatgaaggagacatgagagacatgggttcaatccctgatccaggaagattccctgcagaaaaaaatggcaacccacacccatattcttgcctggagaatcccatggacagaggggtctgcaggctacagtccacagagtcacaaagagttggatacgactgacgctacttagcatgcacacatgcacacacagagaataaatgcttcccctcctctttgtctaaagatactgttctaatttgaagctgaagctccaaaactttggtcacctgatgtgaagagccaaatcactagaaaatatccttatgttgggaaagattgaaggcaaaaggagatgggggcagcaaaggatgtgatggttggatggcatcaccaactcaatggacatgagtatgagcaaactcaggaagacagtgaaggataggatgcccggagtgctgcagtacatggagtgacaaagagtcggacacaatttagtgactgaacaacaacaactctcctaatttagactctagtttagaaagaccttc

SEQ ID NO: 41589 - DNA, 1213 bp, Bovine  19866881044303
  misc_feature (1)..(1): n is a, c, g, or t
nacttatgaagggtactgtgggcctgcattgtacgtacagctgtgactcaaaagttgaaagtgcttttaagctcagttaaatcgtggccgcattgctccacagcacagcttaagtaaattgattcagtggattaatgtactcatgtcaggggagacaaacttatctgctgtgtgaagtctgaagcttatagtagtattatttagtaggcttactggtaagaatgacaactctctctgttcataagaactgagtcctacggtttgcgatggaaggtttaggtgtgaaagagactaagctttaagtaataaataatcatgattaaaggaacaaagttatctctgtccctgcaagatatatgaatcacacttatctcatttaaaatagatactgcatgtctttttttatctttaagcacagtatcaggccagctttctccagccttctatatcagcctgggtggttatttcattttatgcatttcttttgtcatctcagttaggagctgtgctggggacgatgagccaggcatggatcaaaatattacagtttgattctcccaaccttacacattttgcattaaagcagttataattgtctttaactgcaggttgtataagtcaaattttctaagctgattaccactcaatatattcttcagtttctagttgctttataagggacacttcttgcttagaaactaattgaaaaatataagtgcacttgacaatatgttaaaacattgttgcctcttaaaccaaaatgtcactccaaaaaaaaaaaaaaaagaggaaatgaatgcttcaacttgttccctaaattgattaatgaaaaacattattttaaccaaaggaaaacttctaggggaattccccttttacttctacagtattcatcctagctatgctacgctaagtcacttcagttgtgtccaactctgtgcgaccccatagacggcagcccaccaggctcccccatccctgggattctccaggcaagaactctggagtgggttgccattttcttctccaatgcctgaaagtgaaaagtgaaagtgaagttgctcagtcgtgtccgactcttagcgaccccatggactgcagcctaacagactcctccatccatgggatttttccactagctaggttatctcaaaatctttttttttaattaaaataaaatagcattgaaattaatacaaacagtatctttgtt

SEQ ID NO: 41590 - DNA, 739 bp, Bovine  19866881063313
  misc_feature (1)..(1): n is a, c, g, or t
nttcataactgactaaagccatggctaccacattaaatagcaaaatatttagtagacatgaaaatccaaaaatataaaattttaaagtagtcaaatcatagaactcctcttcctcctttcctctgaaaaatttcccaagaatgtccttaacatacatgtctccctcaaatttttatctgtacctgcagttttctgttcgttaagctacagcaggaatctgtgaatggtagacctttaactgagacagacagttaatgggaacagtagcagccctgaggtgtgtttatacagtcagactcactgcctctactcctgtgatatatgaactacttcaggaagtttcccagctgtttcagtggataaatcatggcagtaggagctcatatttaaccttcactgtactggcttgatactttgtagtccttttttttttttaaatctctttggctatctggaagagatttcatataggcattattttctccctcagcctcctcccacttcctttctgccagatcagagaaactctgagacccttcttatgatttgccttcatgtctgtcaggaaaaaaaaaaaaaaaaagattcaacactactagagttcaagtggtttataggttcattccatgactttaaagcaagatagttttgtgtaggtgcattcaatggaagtctctgttacatagtagccattattacatagctgatattttctacagttttaggcaatggcaaccca

SEQ ID NO: 41591 - DNA, 1363 bp, Bovine  19866881064916
  misc_feature (1)..(1): n is a, c, g, or t
nttaacaaactttggtgctgactgggggaggaagatgatttcagattctctcttaggttggcttaaatttcatgaatgataattgcagaagaagcaagcaaatgtataaaactaaagttttctttagcatttaaacaagtttaccttttagaatcttgaaaatattttcttgaaacaaatgaattataactcctatagttgaagcagaaaatattatgacaacaattattgaaagaaaaagttgaatttagggatataaaccaatgctgagagacaatgtttgtatatctcctatcttctaatgagaattggaaactttacaagtaacatctccttgattttggcagtaagtaccaaatacccttgataagacaaaaagaatatttctgaaagtacaatgtaaaaggagtaaatcttaaaataaaccccacgtgtctgggtagagcatctaaaagcttatattttcaacgagtaggctaaaacctcttcattcagcaactatctccattccatgacaaaatcgattttggattgttctgttaataaggatgttgagtcgtccttatttactcttaatgtatgttaaaaagtgttacaaaattttgtcctaaataaaaacattggccatgtgaacatatcaaacatcaaaaaagtaacagaaataaccagatgattaacaagcaaaagcagataaaggaaaatatgagctctctaaaaggtcaaagaaaattttctagcagctagaattctgtgcatttgccctctgaggctttctgaaaacttctttggggcaaaataaccttccaagagcagtcgttttgaaagtggtttcaactcttcagatgtgctactgtctaaatcaagaaaacacttcctttgtctgcttattagtaggtgcttgagtatgcagaaaggatgaggttccaagtggaaggtacttccccaatgcctcataacctgtagttctaaatgctgggctgtttgcacattgaaaaggtagcttttaaaataagcatagacattttgtgtaaaaagatatcctgtgtggtttttctttagaataaggggggaacaattgtaaaatatacttcattataagctgggatcttgggtatagattagttttttctgtttttgttattctcttggaggatttaaagttaaactgaggtaacatcgaagcaaaataaggaaaatatggaaggggatggaattcgtgctagacttttttctgcttttactgctaaatttcactcattcttacaggcactataatactcgtagtttgttgttaacttttacagacgcatttacattttagaagagcatgtgtatgtgtgctcagttgcttagtcttgtcaga

SEQ ID NO: 41592 - DNA, 1320 bp, Bovine  19866881081439
  misc_feature (1)..(1): n is a, c, g, or t
natagtcaaagctatggtttttccagtaggcgtgtataaattgatgcttttgagctgtggtgttggagaagactcttgaaagtcccttgagctgcaagaacaaaccggtcaatcctaaaggaaatcaaccctgcatcttcattggaaggactgatgctgaagctgaagctctaatactttagccacatgatgagaagagctgactcttcttccagaagagctgggaaagatagaaagcaggaggaaaggggaatgacaaaggatgagctgattggatggcatcacagagtcaatggacatgaatttgagcaagctccaagagatggtgaaggacagggaagcctggcgtgctgtagtccatggggtcagaaagagtcagacatgactgagcaactgaacaacaacaacaatattattattatatttaaatatagtgtttttatttccttcacataatattcttgcccaatttatgtcattcttgaagtcatagcttaataaaaattaacaataaaaaagatttcataggtgatttatatctataaaattatatttgttatatttataaagttgttaagatggagctaatttacctaagtgagtttgaaatctttttatttcatatatttccaaaataaacacattatcatcctcagttctatatttatgtaagtcttccaaaaattatcagatatatataagtgaagctttcagaatattcagttgccccccatcccatttcttcttctagcttttcatgcatcctacctttgttcccaatgcactaggcaagcactggcctatagctaatgcactcaaagtgcagacattccccagaaaattaaacaaaagggaccaaataagaaaggcagaacagtttctttaagtatgctgaatactttgcaataaggcccaccaataattttttagtcctagaatcattgctagtttgcctgcctgcctccttacaagaaaataaaagtatgtttgtaggaaagtaaagtgaattatatgaccaataatgatagtttatttcataataggaagtctttatggtgttttttccctgctgacataaaatatatctcatacatggcagaacaattagaggcactctcacaatcattcctaactcctgttgtgcaaattagaaggaactaaaaatacatttgaaggtgctattagaatagactcaggaaggaatatacagtagaaaaaaggaccaactttgaaaactagtgcaactatttgtgtgttttgattttcttaagtctagaacgagactgatgtataagctgtcatctctaccttaaaccctag

SEQ ID NO: 41593 - DNA, 1815 bp, Bovine  19866881126476
  misc_feature (1)..(1): n is a, c, g, or t
ngaaatatatatctggtattagagttgataaattaaaactggtgctgcacagtacataaagttgtagacttctgtcagattgcctgttatggtctgaatgatagctcctttagcctgtatgttgaaatcttaactctcagtatattagaatgtgcctgtatttgaagtctggtctttaataaaaaaaataataataaaaagttaatcaaattaaaatgaggtaattagggaggccataataaaattactgatagctccctggtgactcaaattgcaaagaatttgcctgcaatgtgagagactcaggtttgatccctgggttgggaagattccctggagaatggaggaatttctctatttctaaaggaataacatgtattaccaaagtttagatgagagaattacttgataccatttcaatctacaattgagttacaatatagttgcacgtttgaggtcttttataaatatgaattttccactctcaaaatgtaaaggaggaatatgtgccctcgtgaaatcactatgataacagctgcccttcctacaaagcatctgagaaatggcctttgaggattcagaagttagaggtgactgctttcgtgactggtctgttattatttttaaatgaaagggtgagcggttgcagaaatggtacagccaaagtaccatgcttgaatttgacaagcctgccaagatacactttaatatccatgtaaatatttgcctgtaaaaacggaaaacaaaaggattaattaatttataaagaataaatactttcttgagtcatctttgctggtgacaacaaggtcttatgttagttacaatgttcttaatgttcacttcaaacaaacacagcagactatgtacctatagccatctgtaggtacagttaggactacagacatgatatgaattgagatcagggtcttgaaaataggcactaaaatgcttttcatatttagcatccttatccaagtcaaaactttctaagtggatgttaactatttctaataactatattaactcatatttatttagggttttctatgtgtgaaatttttataggtcttatatcatgtcctagtcacatcaactcattaagtgctattatctccattttatagatgaagaaactaaagttaactaatatacccaaagtagcatagacaaaaaaagtgaatgaagaaataaaaaaacaaacatttgtcttatttcagagctctaaaattccaatcatttcagatatagctttggaaaattggtgtcaattactccttgaaaagtcacaaccattgcaatatgagctaaattttgacttagaaataccatactctaagttttctttatgaaaaaagtaagccagaacacatttcaaaagaaactacaggatcctggtatttctagattcaaagtatattaagatgtacaaaaataaacttaaaatttttaaagagtatcttcaaaggtgccaagaaactagaggtcttttcaaatggatatgcacaaacgagactctatacatgaatatacaatataaatataacaaaagagtgctaattttacattagcactgaatgccattaccaggtaagggctgaatgccattaccagatggaaaaagcaagttatttggagagttacttcttagctatattgcccacatcataatatgtgattaaatatgtgttcttaatcaacttttcgagaaaaaaaacattaaatccattatttttacttaatttcaaaactaaacaaatttatacctaaagatttgacacatagaaggcatttaataaatatgcacttgacttt

SEQ ID NO: 41594 - DNA, 728 bp, Bovine  19866881192173
  misc_feature (1)..(1): n is a, c, g, or t
naaaattgttatttttttgaaagtggcacttcaagaatttgtttgaaaatgtctttgtatgcaacatttatgtgcaacaaagactatttgttcttatgacagtgagagtattcaggaatgctgtgaaatgaagaccagggtcaggaaatttatacaatccagatttaatgtgttctctggaatgtcaatagttttgaatgttcatattgctagggtaacaaaagaaataaaatgttgcatctaagtttgtaaacttagaaggtactcactagaaactgaaggatgagttttccaaaaatgatagatcctaaatactaggaatcaaaatagttttctaaactataatttcaaaagaaaattctagatggttaatcaacgaaaggcagtaatctgcttttccatatatttaaaatttctttagagaaatttaaaaattccaatgaaattaggtattatcttctaagatagtcctcttccagacctaatgttttccaaattcaccccttttaaaggcttaagttccatcttgaacctctgtgaaataagttgctgttttttgatgtcaaagagaaaaatacaaattaaacaacatgttactatacctgtcagaaggagaacctatttcttttaaaataatgtggatcttgagttataaaggcctgacctctgtgctgtcccaactttgattctgtaaagttaatattagtaaaatacaatgaatctaggaa

SEQ ID NO: 41595 - DNA, 626 bp, Bovine  19866881300406
  misc_feature (1)..(1): n is a, c, g, or t
ntgtctgatatttattagtcccagaaaaatatctgacaagtgaatgaatgaatggattccttcaataaaggcaaatctaacaggggtattatcttctgtaataacactgacttaaaaggaaataacttcaaaatagaatgggaggaaacttatttgcaaggcttaaaggattttgctttaagtgaaccacaatctttgacaatgccagccctttttgaatgtatgtggaagtcattgatttcttatacaaattaaagcagctgtaaatttaacttacaagtattgattgtgtatgtgtgttcagaggttgggttggtgggtggattgttggagagatatctcttaaaataaaatgttttcaaatataaaaatgtgcatgcatagacttttgtatatattactaaggtaagcctgtgcattaataatctataagttaaaaagcctacaagttaaaaatagcaaaagggtactagttacagttgagtggcacttattgcggatttactcactgcaaactatccttgatatgctgcctgtctcgtcgtggtaaatggcagtgaaggtcagtgaatctaatttgacaataatgagtctgttctgcaatgtgttataatattgtgccccta

SEQ ID NO: 41596 - DNA, 1098 bp, Bovine  19866881372393
  misc_feature (1)..(1): n is a, c, g, or t
naagaacatgggttgtaaattcgtgttgccttccgtcgatatcaagatccagttataaatacctctttttctttctgacgtcacgatctcctcttgcatgaccatcagtttgaggggcaaaagtttaaggttgtcacttccattgtgtgagaatatccatccctgtaacgctctcattcatagagcagtgtgcagttcaagttgttactgaattatgtgagtctgcttctctgatctacattttgatgcgtagcaacatggttatttctagttcagacagttatgtttaaaataaatgtaatgagtaaagacttttgtgggaaggagtgatatatgattttaattctgtgctttagagctcaagcactggcacttacgctcccatctttcttttaaatctcacactaaacatttcagattcttactgccagggttgtagagattagttcctggaagagtacatatgtgggaagggtggaagaacaagcctatgccaggaaaaagcaggaaagagaatatttttgttaatggaatggctgatgaactcataatgatactacctaaagagtgtgcagaatagagaaaaaaatgctaatgtcaattgaaacatataaaaggtaggtgttgccaaatgaatttctttgggtgcataactggatgttttactacttactctcagcctttttaaaaaacttttttgatttgcaagatgcctgcctaactttttacacagatactgacaggttaatcctgacatagacctcttctgcagttttatatagccagcttcctacctagacctatgcatgcaccttacataaaaaccaaatgaggtatgggtacacagatcagcatgacaattcaataattgtcatgacactgattttaaccaatatgaatgccaaatagtgttttacaaaacaatggggaatagttatcagatagaaaaaaaggcaaatgttattttgcttttattatcaaatcttactagttcattacattcgtttactttttcaactggagaaggaaatggcaccctactccaatattctgtcggagaatcccaggacagaggagccggcaggctacagtccatgg

SEQ ID NO: 41597 - DNA, 757 bp, Bovine  19866881386404
  misc_feature (1)..(1): n is a, c, g, or t
ngttattagcttaatttcctttctttctgtgagatttgtgataaggaatttgccatttcttcatataacaaacttggtatgatttcaatatttccatatgattactgttatcagggtcttttgttgtttttgttatttaaaaatttttaaaacgcctttatctatcagataaatggattcaaatattacagaaagagatcaggaatgagaatgaggactaatagactttattcatgtttaggatatgtaaacctaatttttcaatattcagacatgtctgaaacagagacagagtatttgacaaaatattttgtcttctttccaaaatcatgaattgcaaagattctatatgtcacagatataactctatttcttaatttctataacttactacagtaaggcactagaaagttgacaatttcttttcttttccactgagaagacagattaagatgatttctctttcacacaacccaaaacatgctgtcagactgaaagactcactgactgcttagcatgaaaatgccaatttgaaaagctagctattatccaagagggctgcccatactgataccttgtagaaaagactatttatgcataaactatacacattgttagaatttgtataatagaaaaacttttaatgtgtgagctcctttaggaaggtgaaaattgttttcacaataaataatattttatctttttaaacagcttaatgattcccatgaatctattttaagaacattcctactcacaa

SEQ ID NO: 41598 - DNA, 1937 bp, Bovine  19866881419989
  misc_feature (1)..(1): n is a, c, g, or t
ngttgagacccattaggttggctgaaaggtgaaatgggcaaggagttcagaaaaatattgcaccaaaaattgtttaaaattgaaaaatactatcatgtctatttgtatatacatagaaaaatgtaaaaaagttaacattagctaattttatattgggaaattatataatttttaaatgatttttatctttttgttcatttttttaaataaatgatttagtttataataagaaaaaaaaattaaagcatcttttaagagtcaatgaagtgaagtaaaacttactaactgattaactcagcactcaggacaatggtctcactctttttaataaaaagcattggcaggtaaaggctcattcttcccagtgaactctatgaaggtctcacatttgattttcttttcagtttcctttcatttaaggaacctctgtaaccttggaaaaattattacaagtctagatcacaagcagagagctattagtgatatctaaggggaaacaaattgcttttcctaaacatgtctgattatgatcattgtatgtacataatatttacacattttgtgaaacacatgttaaatttaaatgttaaacactgttcaagaattctacatagttatttgagttgtcgaacagggacagagagacatttcacatgaaattaaagtcttatttatgttagctattgcattgataaatttaatactgcttttgctcagtactcagaaattaaaatttaaagacttaaaaaggtaagactttgtcccctgaagatgggaattatatgagtgtttataactgctgtgttaacaatcaagttcacattagcaaaaacaggtgaggcaagggattgaagaggtaagatccattccaatttttctcatctatgtgcctcttaatagatcaggaagtaatgattcatgaggcagtgaggctaagaaaaactattttttacaggaagataattttaaaatacatttaaattatagagttttaactaataccaatctgatttgcttactattgtatccctccatgagtagcactataagttacacatgttgactgaataattgactaggttatatatgttgaatgaagttttcttttcagtggatattatttttaggatattatgtacaataaaattagtcatctgagaaacaaaggtaaactctattaagacaaattcaagcttaattaacatgcttgttcagttcagtttgaggaaatacagagttaagtagtttttctcttaacttcccccatatgaaaaatccctccatacttcatttcattccagaaaggaggcaccataacttttagaacagacactctcaaaagagggtacaacccaatggaaaactatattcaagaaaggtctcaagtaataacaaaataaagacataacattttggctttcacttattaagtacttgagaaacctgtgtgcaggtcaggaagaaacagttagaacttgacatggaatagcagactgcttccaaataggaaaaggagtatgtcaaggctttatattgtcaccctgcttatttaacttatacgcagagtacattatgagaaatgctgggctggaggaagaacaagctggaatcaagactgctgggagaaatatcaataacctcagacatgcagatgacaccaccattatggcaggaaagtgaagaagaactaaagagcctcttgatgaaagtgaaagaggagactgaaaaagttggcttaaagctcaacattcagaaaactaagatcatggcatctggccccatcacttcagggcaaatagatgtggaaacagtagctgactttattttttgtgtgttccaaaatcactgcagatggtgactgcagccaaaaaactttccttggaaggaaagttatgaccaacctagatagcatattaaaaagcagagatattactttt

SEQ ID NO: 41599 - DNA, 1328 bp, Bovine  19866881435791
  misc_feature (1)..(1): n is a, c, g, or t
ntaaaaattgtgtgtgtttgaaaagatcagacaaggtttggaagtaaacagctgaagtaataaataaacatgaggtcagtttaggaacaaccataattgctttgtatgacaagatttgcatagcaaacacttctgattaatgtacagtgaaggccacatgagtgggaaccagccttggtatctttttgggatctgtgccttccaatcttgaaagtgtagttttagccagtacaattagtcattgttcactaaaaggctgatagagccacagttcctatttaaatatttgaaatcattatttttatcttccagctatggtgattttatttctgtggttaaaaaaaaagtgccacattttacattaatagtgaatttccattcgcttcaaacatatttagaaaacaggcaagagtttcatcaggatgacccttttccagtcataaatttgaaaatataattgcgtatatgcatcaaatatttcaattacataaaaccatatattattttctagaatacctttgtgtcttcttattgtctgcctttttaattaacactctgctatcactgattatttgctgtccttacctagggtcaaatgcagtgctcaatacagtgaaacctcatttttattttttccctttttcattataaataaaattatcattatattctttcaaaaacacaatctctagagaaaggaaaatgtgggaaagtataagggaggagatcatacttctagaaatatttagtttggtgtctttaaacatcagtgtcctactgaaatgggaaaaagtaatagaatataaattataccagatagtagaaaggaaattttttcatttattgcaaaaatttgggtgaaataatggatatatgtgtatacatatatgtaaatatatgtaagtgactaacatgtattcatttcacagcaaatactagaaaataaggttatatatacttaaatgtaatcatgttaagacaaaatgaaaattaattttcgattttgtggtaaatactaccactgattcatgctgtttaagtaatattttgtgaggattatgattcaaagaacatgatgacagcatgcagaacagtattctgaagagaaatattagcgaggcagacaacatctacaataagctttgtatctttagtataatgcataacatctccagagagttgtgtgtgagtgtgctcagtcgctcagtcatgtccgactctttgtgaccccatgaactgtagcctaccaggttcctctgtccttgggattcttcaggcaagaataatggagtgagttgccatgccctcctccaggggatcttcccaac

SEQ ID NO: 41600 - DNA, 832 bp, Bovine  19866881550670
  misc_feature (1)..(1): n is a, c, g, or t
nctggagtcagagaacctcagaataccactgaatccacaattattcattgtgtactgatgaatagaatagaagagcttggtatctctgtttttgtggttagtaatgtagccataaaccctcctctcttccagagatacagtgatcctcatttgtaaatgacatcagggaacgtgaagctccttttcgaagctaagaactgattgtcactcttggttattgcagcagacaactttgattgtaaaagctttccttggacacagtagtggctcatctctaagaactagtgaaagaagcctttttgtgtttttctgtcagcactaattcttactgacctttcatgttgacactgttaagtcacatttccagatactagccattcttacttaaatctgaggacgatacttcagtcatagcttggatcttctgaagatgttttatggggaatgggatttgaaactagatgagtgtcatattagcacattatattaaaataaagtatcaatttcattggtatatatagtatatttaaccaccaaatgggcagccaagtctcgggattaaactgagaaaacataattaattataaataattttatgtgaggttcatataacaattaattaaagaaacagattatagtaagaataaagcactttaagcttttaatgactattgcatgtttagtcactttggtcatgtgtgaatctttgtaaccctatggactgtagactgccaggcttctctgtctgtgggattctccaggcaagaatactggtgtgggttgccatgccgtcctccatgggatcttcccgacccagggatcaaacccacat

SEQ ID NO: 41601 - DNA, 858 bp, Bovine  19866881556100
  misc_feature (1)..(1): n is a, c, g, or t
ntgccatgagtgcatcatttgacactgtaatacaatctgagtataatttacttgttcctttgggttagtgattgttgtcccatctggacacataaatgtcaaaagaagcagatgaggcttattaaatagctctatgttataatagagttgtaagctaaaaggtcattaaatcactcattcaaatagtaagatacatatttaataagtaagttcaaggtattaaaagacatctaacaaagtcttaggttataactagaatggaaagctccaggttggtttcttaaaacaggtaaagtctaaatagacaaccgaacagcaaataaagttgcactaaataaagagacaagtggtaaaatgtcccaagaaaaattagagcatatataataaaagtccaaaggaaaataaaaagtatggtatattgaagaaactctaagaaattcagtttacctggagcttaaactctgagaagaagagtggcagtagatgagactgaataggaatgtggggccagaatatgatataccctgcacatcattctgtatttggttttatgctgtgactttgaagtgttttaggtacggaagtgacacaatcagactattctctattaagagctctcaggatagaagcaaaaagatcgattagaaggtagtttgcattgattcagggaaaacccaatagtggcttcaaataaaacagggacagtggaaatgcagagaaatggctggacaaatttcaatgatgttaagggggaactatcaatgagatttgttgtagatttattgactgtgggactgaggaagagattaggtactgagattgtattacagtttctggcttgaactcctgagaagattg

SEQ ID NO: 41602 - DNA, 670 bp, Bovine  19866881590402
  misc_feature (1)..(1): n is a, c, g, or t
ngtttctgacacttgtttcctggggatgaaagtgggacaggaaagggccaggaaaaccggggagtgacgcggccaagggggcccttttggggagccggggagatttccggaactatacggggctggtcgcgagggcgtgggaggcaccttgagaagataaagcccccggggagtggcgagagggagagtttcaggccctcggagggtgtccttctgacctcaccaagaaaacagcgcgctggagttttcccgctccgcccccgccgccgccgcctccccccgctcccccctcgcctagtaaataacaagttacaatcctcaagcctttcaaaatgaccttcgaatggcacaatgtgcgccgtttgttctggccgtttgcaccctcccaattactccgaaattcttcatgcataccaggtcccaggctccagccacctccggaattacaccaacaccgacttgagattccaagcggcctcttagatacatccctttttatctccctccccattccgcgtcccttcatatttcccctcaatgggttgattatgcacattgacccattcagaagcagttgcgactgacacgcaggcttagccgagaggaatttccaccgggcgacctactggggggctgtctggtgcaacctctgccgctgggggaccggctg

SEQ ID NO: 41603 - DNA, 797 bp, Bovine  19866881613270
  misc_feature (1)..(1): n is a, c, g, or t
nattctaactggatgaagaaatattccttgttcctggctcagagaagagagagcagatatgtagcaaaacaagaacaaatataaagaatattagtaagaacaggaatcccaaataataatcccaaataatttttgagctcttagtgccaagcattgtacccagcgctttacatacattatttcatctgaccctcatagcagttctgtgaagcaagtgttgtttactcttcctacttaacagaagaagaaactgaattttagaggggttaaataaattgcccaaggtcacgagcaaacggtacaactagggttctaactcttttctgctttaaaatgcatctatagcgtcttcctttaaaaatgtagactcttattagaaatttgctcttagaaatattgaatgcacctagcgtgttttatagatgaggaaagtaaatgcaagtgtctagacagatctaagactaggaaccttacctcctggcctcccgtttagaactgttttcagtagagtgcaaattttcaccttttaagctgtttggactttgtagagtgctgagctgctggaagcatcatagagaaacccagcagggtgaggattgttaatagattttattaatttacgaaacatttgttaagcacttactacatgccaggaaccatgacagtgtggtatggaaacaaagactgatgacaaaattatagctataaaatgtagttaagaaattgatggctttagaaatgtgattataaattgcatttgttagcttgcataaatttatatatacagtctactcatg

SEQ ID NO: 41604 - DNA, 1382 bp, Bovine  19866881637242
  misc_feature (1)..(1): n is a, c, g, or t
nactgactctctaattgctagctgataaggacttctcaatgaaatcaatagctatatatgcaatagtttacagatcattaattttttctataaataataactcagttttcagatctatctattagttcatcagcaagaaactccattgaaatatctcattgatggagtcctatttaaaaagtatattataaaaaaaaagtatattataaatccattaatcttgagaggtagtttgtgtgtgtgaacttcaaaggcaaattaatgagaacattttacaccaagacattttaggcttattacttactataaagcttttggggtcactttcttataacaatcatcaattttaaaatcacattttcattccttaggcttacagtggcattttagaaatgtgcctatttgttaacgtggttgttttgattttaagtacgagggcttgggggagaaaaaaaatatatatgtataaaaacagctaagtccctttggcaggtgaaaaaatggtagaaacataagatgatacttctggctattatgcctaaaagagtctatttaatgtagtgccatggatctacctaatcttttccaatatgttacccatttttcttcgttatctgtctctgtgatgtctcatctctccaactgactgctacaggctagcaatctgtaacaaacactcattctcaatctttagatataataaaaaagggagactacaagattaatggccccagccataattataaagtctcaaaccacagatattataagacctttcaaattttactcagggtggaagaagctgggttatcactatagtgtgaagataatggtctcttagtgaagaaaatgttgagttatttgatctgggaatctgactgtgttttgagtactgttaggaactgtggagaggaaattctttgttcccttaaggagcttgtaataatttcatccatttcagttgtctcatgataatacctatttcttattaattcatgggggagatagctctatattggagttgtcaagtagaaggcagatgagaacaggatgctcatggagactatgccatacacagatattgggaattttatactgttcatcgtgaaatagaacctgtatatcacttcttaagtaatgagtactctgacaggatataaacaacaaatatgggaatatttgaggtcttcttttcccacctgctcaaacattctgtgtctcccagcctgatctttccagtgcattggaccaaactgtccctcatacctacacatacacacacacacacacacacaaacatacacggacacacacacacacacacacacacacacacagtctccctcgaatgttgtattgtacacttaggatataagtgcatt

SEQ ID NO: 41605 - DNA, 1460 bp, Bovine  19866881681738
  misc_feature (1)..(1): n is a, c, g, or t
ntggagtggtttttattttaattactgggtgattaggatagccaggtaaccaggcccagaggaaggagaactgaacctgatgtgaatccttattttgcaaacccataaaataaataaaggctatgcaaagaaactttcaatgaaatggtagataatttatttgagactgtccatattcttttacccatttgatcactaaaaagtgagtataaaatgctaaattagctgtctgtgaactagacattgcttttctctaaggaaaaataaattcacaggaaaggtattatttgttagcaatcagtgttcaatgttttatgtttaacatgttttgatatggtatttatctctttcagagaagtcacttatagaatgatctttgacccctgaagtatggctgaggcttgagacagcatgaacaaattcctgattttctggtcttgtctataacttcagatttttcactcaagttctttttctaaatctccagctatcctctgaatatttccagttaagtgttccccattcatggtaacttcaacaaatattcaaaccaatcctattttcttcccaaacaaggtttgttctcaggcttctgtgttcttgtctctgtcaaagaaaccactactttcacaatccttcagacaagaatggttatagtaattgattctatgctatcatcttccttttttgtccaccatcctttgaaaagtttcttaggccagtatctttatctctttttggaccatcattcctatccagactttcataggctcacagctaaagaataactgatggaaaaggaaggaccagtttggtgataccaaattactgaaagggactgatttaagttaatgaatggattaaaatttgagttggagtccaagaattctccatttagatttattcttattttattttttgaaaaaaatatttaaaataaaaggcagtattcaaacagatgttcccaatatatttaattttaaaaagaaaagaaagtattaattgtgatctgaaaaaaagtgaaaatgctgagtatagaatttaagcaaattaggaaaaccatcttagtaggtggtttaagccatattattttttcaaattaaatataaagtcagcatggagatgctgatcacttgagataggtaaattgtgtaaggattgggaaaatgaaacctatatattaaaatataaaatacttctttacctgcattttaaaatatatgtatattatcaaggttacatgagaacaaaattttatctagtagtctcctattatagtatatgcattggaaagacttgaaaaaataattattgtaagctattaaaaatgagaattgctcagtcgtgtctgactctgcaatcccatggactattgcccaccaggctcctctgtccatggggatactccaggcaagaatactggagtgggttggcatgccatcttccaggggatcttccca

SEQ ID NO: 41606 - DNA, 1278 bp, Bovine  19866881750989
  misc_feature (1)..(1): n is a, c, g, or t
ntagagaaagcatcaactgacataatggccttagaggagagaaagcttgaaacttttaattaaccacttcacttagatagagattgagaacacatattctttacattttttaatgtgattttgcctcatcaatgaaaaaagaaacttaccctaatacatatataacttatatataatatatatacatgtatatataaaaaaatactatagtgtatgtatatatgtgcattatatgattatatactatatatttatgtatgtgtgtgtgtgtgtatatatatatatattttatagatacatacctgatgtatgtatatatactttgctaaaagaaaatcttccccagtggttatgactgataagcacttttatttgcctgaatatatctagatccaaagagaggggattaaatggttaaagttcagtgttttgggttaaataattagggatataatgatgttctaaatcataagatcctgaaggtacatcttaccaagagcctccaatcaagagaagaaagcagttacttattggtccaatgcttaattgcttcggttgtgtccgactctgtgtgaccctatggactgtaggccagaaggctcctctctccacaggattctccaggcaagaatactagagtgggctgccaggtcctcctccaggggatcttcctgacccagggatcaaacccatgtttcattatgtctcctgcactacaggtgggttccttgccattagtcccacctgggaagccctattggtccagaggacaatttaattcacatgatcaggtcacttaatgagttactttccacactgtttataaaaagcccagagtagattcaagtaattccattaatgtgctgggacattttatggccaaaatcaagacatacaatatttcccattgcattaaaaaaaatagtaagttttttcatggctaagggcagcttaaaggtctgaaagtttccagccaattctttgtgcctttcaccctaatccatcactagtttgccaaccactattaaaacactttcatgtctaaatgtaaaggcccatatcctgacattgatccaaatgcggaactcccattgaagtcgatgagagtgttgcatagaaatcaatgacaggatatggacctcaaggctggaccatctctcccctggaacctttttttcattgacactcagaaatttgagagtattacaagaagtgagatacataaagcagagcatttgcacatgggctccatggttctctgttccttccctggcaaag

SEQ ID NO: 41607 - DNA, 2266 bp, Bovine  19866880434213
  misc_feature (1)..(1): n is a, c, g, or t
nctagcagtctgttaatgaaagaaaggaatgtcttaaaactcagaatggcaccaggcccctcacccataagatgcattttgggataatcttggcaccaaatgattcatcctgggccataaaatgattaacttgaatcttgaagaagggcaaatcaccatataaatagttttatttacatagattagggtaacaatatctgagtataacatactggtttgtcaagtaggttctgagccaagaggtggaaccgacttgaagacagagtttggggataaatgcatagtacattagcatagcttaagacaaacatttccttaagagaaatgcattggttatctctaggtttgagaatagttaacttcaggtgaaaccatgtgtcattatggcaacacagtattttaagagaaacctccttttaaatttgtatagagaaggaaacaatatcgctagtttgtttcttcttgtcgcttaagagagacaaaaaatgtctgacacttgcaggctatttcctccgtttggagacctctgaccttcctgcctgttaccctctcagtatctctttggtaggtaccattttgcctgaaggtttcccaaggggctcattgttaaagaatccatttgccaatgcaggagcctctggagacataggtttgatccctgggtggggaagatcccctggaggaggaaatggcagcccactccagtattcttgcctggagaatcccatggacagagaagcctggtgggcgacagtccatggaatcccagagtgggacactactgaagtgaccgagcacacacgcactcatcttgcctgaagacagtgggtgtatatggagttccttgccctaccccacacattctatttacctccaatcccagtttctctaccatattgtgtgtaaatcttgcataaacattgctgcatctcagtgactttcttggatagagatcattaaaatttcctgcagctaatgaatggtcaagatacataaatcccaaatcacctcttttttttttctcctcaacactttatatgcattctgtcatttaactctcacaactctgaggtataattatgctattataggaattgagaatttccatagttcaaatcatttgaccaacttgatccattaataaatggccaagctcgtctcaaagcaggcttgtttgacacaaaagcctgaatttgaagctctcactatattgactcctttgataatttaccatttaattatttccatgaaagaataatctatattctcaggataccttaataacaccagagggaaaggtgggaggataaatagggagattggtcttgacatatgcacactgctacatgtgaaatagttaactaaggacccactgtatagaatggggaactccagcagtactctgtactgacctatatgggaaaggaatctaaaaaaagagtggacgtaggtatctgtataactgattcattttgctgtacacctgaaaataacacataaatcaactatactcccataaatatttcaaaaactaacattcattcagagcacaatatttttaagcttgggtattactgggtaagtagattcgatccctaggtcaggaagatctcccagagaaggaagtgaaaccattccagtgttcttgcctgaaaaatcccatgaacagaggagcttggtgggctatagaccatggggtcacaaagagtctgacatgtcacatgacatgaatatttttggatattctcttgcctggtctcaatttcagaagctaggttctgggaaagctatatttctggtatttttataaaccaacagaaagattttcctattcctaaactttggaaactaaaatctacaagtcagactttccaagaacggcgacttttcactacaaaatcattcaggtccctttaaattccatcagaaaataattataatcattatgttcttagcattatagcacactagctaaaataatactctcagtgtttctaaaataatgtgataatatgccatacatgtgacataaaagataattaattttcaaaatgacagctgcaaaaatctcgtccttttaattttggagagtagaaacatatttctcaattgtgaaacatacagtttctacttataaatttcttgagaggttgtagaaagaacaacatcaagatttcagaaaaagcacacagaaagaaacaatgtatttagcaaagctgctcttcaactaagaagaaaggataaaagtcagcaaaaaagtttacga

SEQ ID NO: 41608 - DNA, 1834 bp, Bovine  19866880458467
  misc_feature (1)..(1): n is a, c, g, or t
nggagagggaagcagggagggtcaaaataggggtggggaagtgggattgagtgtaagacaggctcaaggatgcattaaacaacacgggaaatacagccaatattttgtagtaactgcaaatgaaaagtaagcttttaaattgcctattttaaaaaaggaaatgaagcaactgaggctagaaatattaagtgacttaccccaaatcagacaaatgtttgggcaaaactaggaagagagagcagtccttgcaatctgtccctccccagatcctgcctttacccatctaccagagagaaagcaagcttctatacagagaaagtgcctctgatattctcaagaaaggcaatacccaacagactgagatgatgaagctattgtgctttcatgaatgactgttagcacaccgcccctaggggcctttgctagagaacacaggaaggaaagagccattgaatgtggacttcagagtccactagctgggttcaaacccctcttctgccatttcctagctttgtgagcttgggcaagtgctttagtttcctgatctgtaaaaatgggaacagtaataatctgatcccagagtgttgaggtgaggattaaatgagacaactcaaggaagaagtgtttaacatgatactgacacgtaacttaaaagaagtccttctgccttctgctaataacctcccaatcgcaaagtgtattatagcatatttattttatgcacatgcaagccaaggctagtcaggctaatgtgaaagtctaagattctatctgattttcatgaccaccggcatcactcagtatattcacaaatgttccaggaagaaaacatgcactgggcacagccaataagtataaaaattgctaagtcaagttcatttaaaaatcacatggtaattccctagtaattctgggttaattgcatattaattaccatcttgttatagcatcaatgagccatacatttgatgtgggaacctgcagcagagattaaacactaaaacgaaccttctctgactgctgcaggaaatgatccctgatcactccatatagtcaatgtttttcagaaaaactttctatgttactcctttgttttcttctttttttttttttttttggctgcgttgggtcttagttgcagcacacaagatcttcattgcatcacgtaggatctttagttgtggtgcatgggcttcagagtttgtgggctccataaccactgggccatcagggaaatctttacgttactttttttttttttaaagaggtcagtcattaccctaagtggtaaagaaaccatcaatgcatggattggcagacacaagagatacaattttgatccctgggccagaaagatcccctggagtaggaaatggctacccactccagtattcttccctagaaaattccatggacagagaagcctggtgggatccatggggttgcaaaaagctggacacgactgagctactgagtgcacacacatacacctttcaactagagtttcttctagtgtaagtatgtaaagagtagccaataatatcggagaaggcaatggcaacccactccagtactcttacctggaaaatcccatggatggaggagcctggtgggctgcagggggtccatggggtctcgaagagtcggccatgactaagtgacttcactttcacttttcactttcatgcattggagaaggaaatggcaacccactccagtgttcttgcctggagaatcccagggatgggggagcctggtgggctgccgtctgtggagtcacacagagtcggacacgactgaagcgacttagcagcagcagcagcagcagcagcca

SEQ ID NO: 41609 - DNA, 1282 bp, Bovine  19866880506316
  misc_feature (1)..(1): n is a, c, g, or t
ntgaagttgtagaaagagcagtggtgtcatagagagtgaggaaaatgcttgtatagacacttgccatttaatctcactgagccttcattttctcataagtgggaagtaggtgtcagattggggtgggtggatgggtgattggaaagatactgccctggatgaaaaataaaatcattttctacagatgttaagactattaaattgatgacaaaattctaacttcctcattatggcattctaaactaatgcagaaccactaatgttacaaacacatagaaaattgttcaccattcatttgtgaacgactctttgcgaccccatgaactgtagcccgccaggctcttctgtccatggaattttccgggcaagaatcctggagtgggttgccatttccttctcctggaaacatgtagaaaagcatgtctcaaccagcaggtttataatgatctgtttacaaatttcagaaaatttgccagcctatatgagctggcataagcacacatcaacacaatcccaagatgacagaaatattcatacctagacaaatcagaaatgtcaagttggtccaaaggtgtataaatagatacaagacttagtgattagggaataggattttaatgtccatacagagtaaaagatgtagctgtgggtccagatgagaccaattgctggaacagacatcggcaaagagctggggtccctaagagctgcccaggttgttagctgaatgagaaaacatttttaagtcccaagaaatggcatggaaatatcccctttatgttttgggtgagagcaatgaacaaatctccaattaagaactgaagttcaaagctcagcctttgcccaggtatggaatatcaatttacactccacggacagacatgaatcctaagctgataaattaaacatgtgaatactgaccctggacaggagaattctcagaggtgcccagtagaagcaaaacaaaatttccctttagagcttttgtcttataggaggaaaaggattcactcaggaaagaaatatttgagctgaagataaacattcattcaaaaattacacactccacgaggaaatgaactataatgaagggattcagcagatacaatgaactgcagaattagtattctaagaacttgagagagtaaaataatctgaaaatataaaaattaaaaaataatagcaattttaaaatagataaaaatacaagaaaagaatagtcattaacaattagagaaaataaaatgtggaaaagaatgtaataactaaaattaaaagctca

SEQ ID NO: 41610 - DNA, 1392 bp, Bovine  19866880516477
  misc_feature (1)..(1): n is a, c, g, or t
nttcatgttgatgtatggcaaatcccatcacaatattgtgaagtagtgaaagtgaaagtcgctcagtcgtgtccgactctttgcaaccccatggactatacagtcaatggaattctccaggccagaatactggagagggtagcctttcttttctccaggggatcttcccaacccagcgttcgaaccgaggtctcctgcattgcaggcagattcattgcagctgagccacaagggtatcctcaaattaaaataaatacatttttttaaaagaaaaaatattggaaaataaataattcaaatatttttgaaaatctcagtgggttaaacaaaaatctgtctgaaggctatatttggatgatgctggatgatcctactttctgaccttacctggtaactttggggatggataaatggtacagatcagaatatactatctcaattattaattacaaatacactgagagtgagaacaatgtgagatcatctttccaaccatagagtgccttttctggaataggtgtttagtaagtttttgttgaactgcaggcagccttcagagggcggactggagaaaatgagctggctggatggagcatgctattttaggttagataggttgagaccacactttctgtaaactgtatcatttggatgttttattaatcactgctgccagtgaatttaaatattttaatgattggtatattttactcttagcatgccctggggctttttttttttttttttaaagaaatggcagttttaaaaaaatgaaaatagaatccctgctcaatcagcattcaaactgccaggtgacacttgggtgcttcctccactccaaatctgggtcagcatggcattcggggactgggacacctgccctgccttccctagcaaaggactggctgaaattgggctccttaggtaaagttgtctttcaggttagaaccctgaaaattatcccctgaaacaattctctctttggaatgtgaatctccatacttctagcaaagcttggaagaaggggaaaaaagaagacacttcgccaccacacctcaatcttgcctttgtaactattaaaatatgttttctaagttatggatcagctgtctttggggtagcctctgggcacaggcagatctcgtttcatggctgctgctgctactgcattgcttaccgtgcgaaggtgtgtgataaacctgttacgagcaagtctctcagtgccattttcaacaacatttgcttactttgtgtcttggcgtcatgttctggtcattcttgcaatattttaaaccctccaccagcaataagattacgaattcctaaaggctcaggcgatgcttagcattttttaacaataaaatatttagaaaatagggttttttttttaat

SEQ ID NO: 41611 - DNA, 1888 bp, Bovine  19866880637257
  misc_feature (1)..(1): n is a, c, g, or t
ntccacacagtcaaaggctttggcatagtcaataaagcagaaatagatgtttttctggaactctcttgctttttgatgatccagcggatgttggcaatttgatctgtggttcctctgccttttctaaaaccagcttgaacatctgaaatttcacagttcatgtactgctgaagcctggcttggagaattttgagcattactttactagcctgtgagatgagtgcaactatgcggtagtttgagcattctttgatattgcctttctttgggattggaatgaaaactgagcttttccagtcctgtaatgtagggtaaggaaaagatgactcaacagtgactcatagttttcttcattggataactgagtggattaatatgaaattcaaatgagttacagagagcagccagtttcaaagccaaaggggagatgaatttagctttttgtatgttgactctgaacagcctgttagttatccaggtgatggagaagggtgcacattaaaaataagagatctgaacttgaatatacgtttggcatttatcagtatacagataatacttgaggtcttgaagaatatatggggttgaaagagaagagggctgagtaagagagcaaaattagacgacttccctggtggttcagggttaagaatcccttgccaatgcaagggacacaggttcgatccctagtccgggaagatcctatgagctgtgaagcaactaagcccacgcaccaccactacagagcctgtgctctagagcccaggagttgcaactactgaagtctgtactgtggagcctgtgctccacaaaagaaaaagccagcacagtgagaagcccgcaccccaccactagagagcagccctgcttgccgcaactagagaaagtcggtgcacagcaacaaagacctaccgcagctgaaagtaaatgaacaaaatcattgaaaaaaagaaaagcaagagaaagaggcacttcatatgttacactgagctcttgatcttacccttctgcctacatccattgctaagatttaaaattctatattaaagcaaagatagccatgtgctaaaatagagatttctaaagaatgaggagttcattaccttggatacaattaaattgttcaggtgttgagtatccgtgaaaagataatatcataaatatcatttagggatgttgatcatatgaactcccaatctactgaaataatgcttaggattacattggaaaaaatgaaataaccttgctgaagctaacaagaaaattgtaattacaactgtatatataatatgaagacataaataataataaaaacatgcaaataaatagccactactcttcagatctcaaaccctggaactaggttagtaactcctttctcccaggtattataaaatgtaattacttgagctttgtaattacctaaagtctgagcttaaatcagccatgctaccgaaggcttttttataatctatcacacaccaagaacacatctcaatttatttgtcttcatttgaggaagaataactgagcatcagggtaagtcaatcaagaaaccagaaaaagcgctgaagatataatgatacatgcatgatgaatccaaacaaggtaaactaacttctagcagaactctgtatctgtcatcctgcggatagacgggcatgtttcactttatattttgtgaaggtgttaatttcctgcctcagtaagattggctctaatgctaggtggttccaaggattttcaaattcaagaatataagaaggcatcctgtactaaatcttaataggtagggctctcctttccattagagcaggggttcccaacctccaggatctaatgccttatgatctgaatccaagctgatgtaataataacagaaataaag

SEQ ID NO: 41612 - DNA, 1209 bp, Bovine  19866880655791
  misc_feature (1)..(1): n is a, c, g, or t
ntgaggaaactggggcacaaaataattagatgatttgtccaaaacctttaaaagtttttttgtttatttttggctgtactgcgtctctgttgctgctcatgggctttctctagttgtggtgagtggggcctatcctctattgcagtgcatggacttctccagagaacacagtttcgatccctagtctggaagattctatatgccacagtgcaactaagtccctgtgccacagctattgagcccatgtgtccaaaatccttttattgagttcatcttagagtccatctctccctggcctcagaatagatgacctacaccatgagcttcaaaactaataggtccaaatcctgatgacatgtcctcttcaaaggttacttccattagagagaaaaatgtgcaaaaatgtgggccagtcacacagaatctttagcatgtatatgtcattctagtgaagtgcttttagaaattggttccctagtgaaggaaggattggaaaacttagccctgtaagaaaaatcggcaggggaaatgtcaaatcactccagttctttgtcctcaagctctgacccaataattctgggtcattggaaagtgacctaaaaatataaagactcaaaatttcattcagttgggtacagtttcaaatgcaaacaccactgcatctctgcatgacatttagtgtttccttttttactcctcaggtctttgagtcccaggagaactcttcaggcaagttttttacggacatacaagccaaatactttgagagtgtaaataaaacaacaacaacaacaaaacactttcactttagctcatgggacccaactgtttcagttgctgcagcaggtagaactttaaagacaagcacaaaccagaggagaccagattctacattaatgttaggtcttcagttacaagctactttggagaagagtctgcagaactctaaatctcagccttggtccaaaaaaacaatacatgactcaaagcatctttcttagaatcgagggagaatgccgctggggcctggtgggtttgtgggtaaggggtcaggcaattttccattttcttgtactgttgataaccttggatctgttcctaggtatgttaaggggtcattttgatttgatttcagaaactcctaatgggataacagatccccttgcaaataccaccttatttttctgctatgaatcagttgcatacaat

SEQ ID NO: 41613 - DNA, 2400 bp, Bovine  19866880683999
  misc_feature (1)..(1): n is a, c, g, or t
nctcactgattcctaaaatgttgatgttcactcttgtcatctcctgtttgatcacttccaatttgctttgattaaggacctaacactccaggttcctatgcaatattactgtttatagcatcagactttacttccatcaccagtcacatccacaactggctgttattttgctttggctccatcccttcattctttctggagttatttctccactgatctccagtagcatgttgggcacctactgacctggggagttcatctttcagtatcctatctttttgccttttcatactgttcatggggttctcaaggcaagaatactgaagtggtttgccattcccttctccagtggaccacatattgtcagaactctccacctaaaggttgagaaaaaaaattgtccatcactgactcgatggacatgagtttgagtaagctccaggagttggtgatagacagggaagcctggtctgctgcagtccatggggttgcagagtcaggcacaactgagcgactgaactgaaaaattgagaaaaaagtataaagaagggaaaaactgtcctttttttatccatggataatcactataaacatttttctgtacatccataatctttttgcatgtagagatatatctactttaaaaaaaatggtgtctgctcatcaattcttctttttcacttaataaaatatcatgagcattttcttaaaaagttctttgcgatcattatttttaatgatcatacagtattctggctatagatgtattgtaatttattttaccaacacacccccccccctccattgtttgacatttaggtcatttccattctgctgttgtttttttaaaaaagaggttgtgataaatatcatcacgcataaatctttgggcacatctctggttactgccttaagataaattctcaggcatgccgaattgctctccaagaagttgttcaagtttacaggcccatcaaccatgtagaaaagtgaccccaagttttaataaatgctcacttagaatggctagagaaccctacaaacttattagaaagggaaagctatattttaaagggcatgtaaaccatattatctatcttattctcatgtgggattaattccaggggaacttagtttcaagggtattattttactgggtggcttattttaaatattggtgcttggacttccctggccatccagtggttaagactccaccttccaatgcagagagcgaccggtttgatccctggtcagagaggtaagatcctagatgcctcatggccaaaagcccagttttgtaacaaattcaataaaggctttaaaaatggtccacatttaaaaaaatctttaacattggtactagtggattgtttaaaaagatgacctaagaagtgtgagattttgaaaatgcattaaccattacttatgattttgtgccttgaatttctcgctccctgaatatattctgcttttataaagaaaattgatagaaaatcatatttttttaatctgcagaaacgattccatagctcaatgtatagaattaaaccctatccaaaggatgagacacatctgttttcatgtaaaaatccaaggtcaaagaggtacctcggacctcatttatgctctcaactgctatgaatggcagaaacaaatccaatgggaatatttccatcttccaaatggagtaactgaaatgcagatgtgtaaactgactttgctatcattacagaaattagtgatactaccgcaaaactccaatttctttattatgatatcatatagtagaatatcctaccatgcttttaaaaaaatcagaatccaacacatagcaatacctgtgttccacatgtctcaacaaaggaaggtcttttccaaggtgatggatagcaggcaggagcagatggccaggaggagaatgttccagccgggggctctgaagggacagatgggttgcaatgccctgagtctcttgaccacatgctcagtgatccacaagctttaagagccttgaagaggtggctactgtcatctagccaggggggttgcaattgtagagccatacacaccccaaacacagagatcagagttattattggtcagaaatttggtgtctaattgaaaatggacctggttctctggcaagatcctaagaaaaatagttcaattaaaagttgatacaactttgatcacaatgctgcctctatataaatgtgtgtgtgtgtgtgtgtgtgtgtgtgttagtcactcagtcgtgtttgactctttgcaaccccatgggctgtggcccatcaggctcctctgtccatgggattctcctggcaagaatactggagtgggttgctatttccttctccagaggatcttcctgatccaaggatcaaacctaggactcca

SEQ ID NO: 41614 - DNA, 1041 bp, Bovine  19866880833427
  misc_feature (1)..(1): n is a, c, g, or t
ncaactgttaccaaatgatgaaccactatctgatgtccttaccactcaaagcccatagtttaattaacttttctaatttatttctctgctcttccatctcctgattcaatcttattcctttggaataccagatattgggagacagaggccataaagggattggtgaataaaaatttctctttctgttctccttgtccctctgctaacattgaactgttattctggagtttgttatttttttctcttttggcccacaccacatggttatgggatctttgttccctgaccaggggttgaatccaggccctcagcagtgagatcacagagtcctaatcactggaccgccagggaattctcatagagtttgttatttcttttgaagtgatattttgtctttacattaggttgccattttcaaggctctcacaaccattaatatcatggaggtctcattacatttcattggcaagttcaaggaagcctgcgtcttcacgtctagggctcagctgggaaggagatgggttttggacactatcttctgtagaccatccatgccattcccgttcttacagagttaataattcacccctcagctttaatttaaaagtttctaattcattaacaatgcaattttcaaaatgagatttggtatgagatgcttaataactaaaatgctctatcaatcttttccccccttagaatctagcttctaggctgggatttcagacagccaagctcacgcgccacagggcagtcatccgaacgtagatgtcagaataatactgacaccacagtcctcagcagcactttacagtttacgaaacacatccatatgcatcgtttcacttcagcttggcaacatctttggagaggacctgggtctgcctgtaattaatgagaaccgtgagttactgttctctggtctcaccttggagggggcagtattcgtctaacccagactgaggcctctggccatagactacattatgcagcactaatgatgcaattaattcctacattagctgacacatcattccttaa

SEQ ID NO: 41615 - DNA, 929 bp, Bovine  19866880838174
  misc_feature (1)..(1): n is a, c, g, or t
ncggtgtggaaaatcagctgtgattcattagacatatgattgtgaaggagaaaagcatcactctggctttgagaaaagttgcagaaccctcattctgagaaacacattttttcaaaaaataattacatcctgaggacatgggattcacgctgtaaaatggacccattccataatccatgacatatatacatgcactgtgtacctatattgaaaatcttagataaataggtataacctattcatctttgtcatatatacatatatatagaaaggaggggaaatgcagattctattaaaattattaaaattgaattttaactttactaagtatttttgagctttttttttttctgtgcagagacatggggaatttttttttaagtcgggtttttcccctgtctggcccataaagaggcttggaccccctagtttataatcccctaaaccggctcagcctttgcccggctctcgtggtctcggtgtctccttccgagcacacagaaaactgatggctccatatgtgatggcaggcgctgtctacccgaagcatatgtgttcaatcaactttaatacccctacagtccggaggaagggaaatgctaggccctgggaataatcatcgtttccattacattagcgaggtttgctggtgtgccagaggggcagggctctctccatcactccgctaacactggctggcagctcggagaagagcatgggtgcccatccaggcaggaagtgaaatatatgccttctcctctcgctcttcccgatcatcttccctctattttcccccttacctctggggtcacagagtctactgtggttcatgaagaaagtggcttgagctgttttcatcaacgctgccttagtaagactttccattaagagaataaaatcaaaatgggtgtctcatgtacacactgcta

SEQ ID NO: 41616 - DNA, 1412 bp, Bovine  19866880874277
  misc_feature (1)..(1): n is a, c, g, or t
nagagatggagattacagttcaaaatacgccattaacaccaaattacaaaagtctttccaagagccagacagaggcacaaagtaaaagcgaagttttaaaggtataatttgaagagtcaggaaaacatacaaatagaaagtaaaagaaaaagaggaaagttacatgcagccagataggaaaggacatgatttttccaagtacactttgggtactttttcttgtcctgcctactacattaaggaatattatctatacttttattggtgtgtttgagagtccttaaaaaacttggtgattgttatattatcccttgtattttttttgaaaaaaatatgatactttgttttaaaaaataataatttcatttgtttgtttcttttttggctgtgctgggtctttgctgccgtgagggctttcctctagttgtggcgagagggggcttctcactgcagtggcttctcttgttgcggagcacaggctctaaggcacgtgggccgcagtagatgcagtgcgagggctcagcagttgcggttcctcagctctagagcacaggctcagcagctgtgacgctctggcctaggtgctctgcggcatgtgagatcttcccaggaccaaagatcgaaccctgtatctcctgcactggcaggtggattctttaccactgagccaccagggacgcccctcgcccaattatgataatttctaaattaaaagatggacttgggaatttgagtttattaaaaagactccaggaatggtaaatgaatgagatcatcatgtaggaatattctaaatgctatctgcattgcttatatatatatgtatgtatgttgctgttcagttgctaagttgtgtctgactctttgtgatgctgtggacagtagcacgccaggcttctctgcggttcaccatctcccagagtttgctcaaatgcatgtccgttgagtcggggatgttatccaactgtctcagcctttgctgtactccttcttctttttttgtggctcatatattgggaggcacgattattgtcttccagcaagaaaatggaagcaatttgcttcagtttcatccttcaaacgtttattgggtgattactacatgctattctctgtactgggcactaagcgttcaaaaatgaaagattttgctttcttctctggaaaactcaatatcctgctaaaatctaggagtgcccacagtggcttattttcctttctggagagttctgtgtctaatgtttctcatcttatttagtcactacttttccccctatcacttttcatcacatcatgaatgaacaaaaattaatcttctcctattatagcttcaccttaattctgattattcctcttaagtaaaagttatttatcttcaagccttacgattgctttcaaaaaaacaatcactg

SEQ ID NO: 41617 - DNA, 1091 bp, Bovine  19866880876095
  misc_feature (1)..(1): n is a, c, g, or t
nagatttggtgggcttgtgcagctaattatagcatcagagtatatagaataacaaaaggagcttcacaaaccccaacttgctatgaggattcagagaacttggatggggactcaatagctaagtaaaattcttatacatctgtcagttgtcattgggaataaaggcttctaggtgattgcccaacttcatggtgaggcaacagcattatttgtttgtgtaaagaaaaacagtgtgaaaagtcaggaagactgagaagatctagatttctaattttaacttgacctgctaactagcaagtgaacccaggcaggtcacttagcagctatgattgtgtatcttcagttttctcatgcaaattggtatggttgttctgagtactacataaaatcaagtctatgaaattatatttaagctatagaatactatattgccttagaggttgtaaaataaggaaaacagttgaatatcgttaggaactttatctatcatgcttatctgttttgcctgctaaaaatgtgagtgctcaagagaaggtcaatggcacagaaatattccctgttgcaattaagtcatctgcataaacatttgatgaaccgtgtacaaatggcagtggggaaaatgggtaatattgatggattcttaattttaaaagaacaaaaatatttgatggccattctgtttgatagcttctagtgaaagttattatgtaatattgatctttctttccataatgaggcttgttctgagcgctggcagctgaaggatgaagaatggaagaacttcattaacaaacaatccttgagtgactattgtgtgtttgatttcaggcaaggagggaaaagaaatgcacacacaggaaaaatggcacagttttttcaaataatctggaaaattgtttttctgaatgagaaaacacatcaccttttattcaatggccataagtggctactgggtaccatattgaacagtacgtatttagaaattttctatcattacagagagttctgtgatcacatcctttgaaaatgaggggttgtgtccactttgccagtgaagactctacttcctttatttggtgactcacagctag

SEQ ID NO: 41618 - DNA, 736 bp, Bovine  19866880912073
  misc_feature (1)..(1): n is a, c, g, or t
nggacggaggagcccaataggctacagtccaggggggtcgcaaagagtagaacacgactgagtgacttcacttaccctcacgtttggctttttttcagtaactggttaacagataagtaattcctgatttttctcaaggcgacctagtcctcttggcaaaagctcccgcttcaaagtaaggagactgaagtttgggaaaattgcccagaaactgccctcagctgacgggtgaccagtcaaccaacaagtactgcttgctggcttgacttgtacactgatctagacattgtggggaaacaaaaagcaaaagtagttcttgtcctgagagactttcgggttaaagctgggaaaaaattaattagctactaaactttgctaaccccctgcttcttagcctccagcatggattagaaagttttcaccacctcttcaccctccactcaaatatttgatctctgtgggccaaaggagattgatttttctgggaagacaccatggtggactggccaggcaggaacaactttttgtctactctgaaaaatggtgtttgggattgtcttccaggtaactctgtcctccatgccaaagaggcttctttcccaccaggcacgtacgtctcccccggccccgtctcatcaacagctgatgctgtgagagtctaatcctccatctgccttgactctccatataccttttttatttttttaaaaagtctttactgaatttgttacagtat

SEQ ID NO: 41619 - DNA, 1635 bp, Bovine  19866880915651
  misc_feature (1)..(1): n is a, c, g, or t
ntcattttatttttatttatttattaaaaaaaaaaatagaggaatagagacccagatgtggacaacagacgtgtgatcatggggtgggaaagggggtgtgagatgaattgggagattggaattgatgtgtaaacagacaatggggagctgctgtatggcacagggagctcagcttggtgctctgtgatgacctagaggggtgggatagggggagagaggaaggtccacagggaggggatatattgcggacatatagcttgtaactgatttaatctagttatagcacaccttcaccttccaagtgggggagttggttttcaaaagtagtcaaaaccaatttcatcaagtgtaaataatgggtaggtggtcaggctagcttctattatttttaataaaatataattggtgtatatttagcattgaattggctttttttagtagtacaaatactgcctacaaaggcaattgcaaaccctgttctagttacaattggactaaagaatacttgttacatgcatcacagacctactttactctctttgaaagttttttgttgataaaaggagatattctaggatgaagagaagatggtgttgctggattcaccttccttgtttcactgcttcagtttccatgacactaaggcagttcaataacttaaagttgatgggatggctatgaaaattcatatatcatcttttctctgaaattttatcatgtttgaaatgagattctgctccataagaaagatgattccatttgaaacctttaactcaggtacaaatgaaaacaatgaatgattaagagattaaattctattttttatcaataggaaggtctctcctttgcagaaaaacagattactgatcggagttcacttttctcctatggagagaaaaggaagggattgtcttcatggagaatggctgattttaatattaatttacaggagtgaatccattgtttctttaaaatgatgctttttctatgcagttttggttggattttaatgtaacatcatactcataaatttggctttggatatggtcttttgagtgggagggaggattttatttgtcagattaagtcacttgtgtgtatatgcgtatgtgtgtgtgtttaagcagggaaaggaagagagagagagcaatcagaaaaaacgtaacctctcattttagaggttacacaaaatccaattgacctttttaaaaacatctaattgtcatgcactcaggtactttccgggctcaaactggcagtcaaatatcacaagaaaggttattcttgttatttcaaaacctgtttgaaccaagaagtattgagtgtccttggggagattccaattaaactcatcatggtcttctctttaattaattaattacttaatgtttgtcaagtgttttgaggatgctaagtgaaatgtatgtgctaattattatttatgaaaagcaaataagtcattaatggtttctatttcctcccaggtatgttgctttatctggctaagttttatgaacccaaagaatagtgcgtttttgtagttttctaagatggacagtacaaagtgtcatttaaatctaaagacacataataactaggtaatattttttccctctctttccatctagtctatgt

SEQ ID NO: 41620 - DNA, 813 bp, Bovine  19866880921632
  misc_feature (1)..(1): n is a, c, g, or t
nataaaaggaaggacaaagaccacgtttgaaatacccagaggccaattatcttcacagcatctaggtgacactatatgggttaggttatggatcaagttattttctagttgctctgcttgctttttatctaacaactgcccacatacctaatgcaatgagtgtctttaccaacaaggaacacaattagccatctcttctctctgcttcccttctactctcttccttcctgtaaccttccagagtgattactactatgtattttggaaaggctctgtgctctgcactgtggaagggcctgagataaagcatagttggtttttgctctcaaatagcctagaatttgtcagagttctaagtgtgtagagattgttctataaatgttggttaccagaacttgcaaattactggggaattaatgcatgggaggagtgtttatcgagaccctgaaaaaaagtgaaagttgctcagttgtgtccgactctttgcaaccccatggactgtagcacactaggctctactgtccatggaattctccaggcaagaatattggagtgggtagccattcccttcttcaggagatctttcagacctagggatcgaacccaggtctcttaattgcaggtggattctttaccgactaaacattgtacatattctctgccttcggggagctggcagtttaggcagggagggggaaaaagtagcacacattaaataaatatcgaacaattaaatttaaactgtgagacggtgattattttaaatataaataggcattttaaaggagaaaaactagggaattccctggtggc

SEQ ID NO: 41621 - DNA, 1968 bp, Bovine  19866880956941
  misc_feature (1)..(1): n is a, c, g, or t
ntgccttgtagaaagtaccaagttcttttattaagtgtggctgtaaaataactgacatattaaaggtgaaaaagcctcaaaaaactgtatttaatatatgaaggcaccagaaaaagaaaggatttagcgttataggtcaccatgatgatcataaggattattcagtcattaaaaatgcctagtctcacaggattccctctaggatatacttcatatgacattgaacttggtgccattaggaggaattatacacacaaatatgtaacttgaacagtatttggtcctgccggtaattgttaacaactccgctgttttataaaatctattggatttacgctctttgactttgttttgcttcttcctgagagccttatgggcaatcggccaacttgaaccaatctggggatggcatcttgtggccagaggtttctccaccattgtttcccaccatatggccctccatagccatcaggagctctcttacccaagcctaaggcttcagttggcctctggttctgccatattattcacccgctcctttccactccagagaagcagttacaacataaaccaggtgtacccactggaataacttgattgagaagattaaacaaggatcagccattaagtttcatcaagccacatttttgctctatttcatagaaacagcaggtgagtcagactggttgcttgctaaagaaaaacacattaagaaggtttaaacctcaagcaggcatgggtagagaagtgtcgttggtgataaaaatctaacccataggacatttctacagctatcatctagatgattgagatgaacattactattttaggtttaacacagaggatttcatgcctcaaggggtgtttttgaatccccaagccagtacccagcaccactgaaaaatgtctctccacgttctgcagctacatggaatctgatgagaatatttagagcatacgtctttggcaatgggtgcttggctgctgcaaatatatcaaaatgactgtacttgggcaaaatgggagaaaggaaggagagtgacagtttaaagaagattaaaaaaccaaccaacttttaggaagattaaaaaagagagagtcaggaggatcatttataaaaggaaggatgtaaattctttacaacctgattggttttccctggaatttgcttggtttaatgaaactgttattcctgaaggactgaaagcccttttttaatgtgaataaagcagtactaggggttgacatattgttagtctttggcctcaggagactctctctgaagacctaattaggttacaaacatgtgaaatgagtttagtaatccctgtgcgggagctttcagggtggctgatttctgaacgttggatgcttaacgcttcccagagtatcctttgtgaactctataaatcactgcttttctgcctttcatacaacaactaagtcatcatcaaagactcatattcatcagatgaccttttctatagtgaaaaaattaaagatatcttggggttttcatggacttcctttatgagagtgtccctgacaaagcttgcatattacctaagtttttttttttttaataattttcctgccaaatggaatagcgagtttgatttatgattttttaaatcaatcattccaaggaattaaaaagcacactcttcaattgaatgaaatgtggcttgagctttaggagctaaagctttgctggctagcagcctttaacagtgaactaaggccaaagttttaccaactcaggaaagtcagaggaggcaagtgagacagaaaagagaatgacctttgggggtcacaggagggcaaaccactcaaacttgttgaacttataactgcgcaatggaaataataatatatacctcatattgtttttctaaagaatgcgataacagaaagcattttatcaaagagaaagtattgtacaaatagaggatattttcacatatacag

SEQ ID NO: 41622 - DNA, 1796 bp, Bovine  19866880973184
  misc_feature (1)..(1): n is a, c, g, or t
nggtcccagttccattcctgctcaggaactagatcccacaaccaaaaagctcacgtgccataaggaagatactgcaagccggaactcagacccagtgtggcgaacataaataaatacgtgttttctcaataccaccattaaaaaaaaaaaaagagtcaaattgcacaaagtctagtgatcaccaccacccccccccacccccagcccatcacccaggtcaatggagctctacgccaggagaaatgtgcaggaacattttaggttgtcacagaggctggggactatgggcaggtagaacgtgtaattgctaaatggtccatagctctccaaacaggtccaatacaggagagttgtcctccaggtacaagaatggtagccatggagaaacacaaccccttacccataggggaggtagatcagcatctaggtcaagagttctaatggttctgcgttcccctcccctcaaaacaggaaggaatactgagtaatcagggtctcacccagctctctctaactcagtttcaactgcctgacctttttttctttttttggccaaggagaaggaaatggcaacccactctagtatccttgtctgaaaaatcccttggacagaggagccctcgggctacacactccatgggtcgtaaagtcagatacaacttagcgactaagggacaacaacctagcatgcaggatgggaccccagcccctcgcagtggaagcactgagggttaaccaccggaccaccaggggattcctcagcctgagcattcttactgagattcggtttataagaactatggcaaatccagatgtttatctccagtgggggagaggaaacatactggtatttgggttgtcctcccatcatctatctgaattatattgagtgtgtttttgtcaattacgtagagaattcagaccagggcagtttatctccagctgtgcatgatcttcttccctaactggagcatgaaagattgcaacagtgtaaacaaagccaggactaaaatatgttccttctatgagtctgtacctagtaatggttatattaatcaccattatcattgtagttatcctcctctgcatcatcagaatcaattcagcaactgtttctcttggtgatgtctccttattacaacatagtattaattgtatccgagttgattttctgctcctactgctgaacagctgtgtgggagtaaatacccctcaatgaaacatcagcttaggctgccaggactcaggaaatttatccagatgtgagcagcaagtccagggggcagctgtggaatagaatacaccagcatcacctggaaaatcccatggatggaggagcctggaaggctgcagaccatggggtcgctgagggtcagacacgactgagtgatttcactttcacgcattggagaaggaaatggcaacccactccagcgttcttgcctggagaatcccagggacgggggagcctggtgggctgctgtctctggggtcacacagagtcggacacgactgaagtgactcagcagcaccagcagcatcgatactaaattctgtgatcggtgtccagtctgaggaattctgagaattgctttccaatactgtgagccatccaagagttaacagcttgagttttactttctgtttaatataggtcagagacattatctccgaaggaacttttgtctggctcccttttaaaaattaaaaaataaaaatgcaacctccatcaagagaaaaaccacatggattccctaaacatctgattaaaaactataactatcccaaatttctat

SEQ ID NO: 41623 - DNA, 1330 bp, Bovine  19866880983181
  misc_feature (1)..(1): n is a, c, g, or t
ngtccatctagtcaggctatggtttttccagtggtcatgtatggatgtgagagttggactgtgaagaaggctgagtgccgaagaattgatgcttttgacctgtggtgttggagaagactcttgagagtcccttggactgcaaggagatccaaccagtccattctgaaggagatcagtcctgggatttctttggaaggactgatgctaaagctgaaactccagtactttggccacctgatgtgaagttgactcactggaaaagaccctgatgctgggagggattgggggcaggaggagaaggggacgacagaggatgagatggctggatggcatcactgacttgatgaatgtgagtctgggtgaactccgggagttggtgatggacagggaggcctggcgtgctgcgattcatggggttgcaaagagtcagacactactgagcgactgaactgaattgactgaaatatctttcccaaggttatacagctcaagtttgggtcgtgcttgtctaaggattcctgtttgaatgccatgtctgtgctcttcattcagctgcttcttttcgtccatggagtaaaggaggtgcaccgagatcataaggtctatggaatgaatgagaatggatgaaaagggagaaagagattacagatcatcattttcaaggatagtagtaggtagcggaaggatacgcatttgagatctattctgaggtctgagaaacttgtgtgtgtttgtactttggaagaaaggaatcaagagaaaagagggcgacttccttggtggtccaaaatgataatagaatccagatggagttcttctctcctttggattgatgggtgggtgaccacttagaatggtgtttgataatgaagacaaatggaagtacacacataatggaagtaggtcttaagaatataaacatccgaatctaaggaaagggattagaagggaatttagaccaagtacatttcctttcagataagtgctctcctctgaatggtccagccaaaattgcaaagcccctgtcaataccacctctcattacacctagcttgatgtagcttaatacgaagcaatatgccccattaatcaaatttaaggcagtaaaaatagaatctgggagttgttatctgagtcacttttccccaggtaaataggaatgtgtttttctataaattgctttgaggtgccttgagatttctttaatcgaatcgcgagaaatgatggccaatacttatttgatggggtcgtgttgacatgtcttttcttccattacattttcccccagataataaggctccacagacttcggtattaaaaaaacacaaga

SEQ ID NO: 41624 - DNA, 1822 bp, Bovine  19866881010142
  misc_feature (1)..(1): n is a, c, g, or t
nacttttgcatctaggaagtgatggagtcaaattcaaaacagcttgtctgatacagaactacgtgcacatttcatggcattctgttgccttttgattgtctgagtcattaatgcactagtaaaaaatggatgacgctctgaagtcagagccataagcaagatctcctctggataaactttattctcacacatggctaaaggcagttgtatcttaagtcatcaagagtaacgtagaccaattagattaataagatacaatgaaaataataatgaccaagcacttttgcttgtgagctatccttttttttttcctctctaatcacaatatgtatctacctgtctatcaacctatctatgttctcagttgcttacttgcaccccattctttgagactccatggactgtagcctgccaagcttctctgtccatgggattttccaggaaagagtactggagtgggttgcccatttcctactctactctctgtctatctaattgtctatctacctaagtagttcaggctaagctttgcagctgaatatgaagaataatggaatacgcaacacatgtgtatgtgtgagtgtgggtttgtgagtgtgtaaaagagagaaagatggagaatggtgacagtcattggaaagtgtgtgagaggctggctttggtcaaatgctaataaaatgtgtaatatatttattgggcacagccacttaagtggtcacgaacatgatgtgagcaagtgaattgcccaacgtagttaccaaaagggtcttctcactatgggtgctgtatctgagaagtttcttggaaactgaaaaagattctgtttgtttcttcctgtaaaaggtttttttttttttcctcaccagaaaaatctagagattgtccataaatcaaatagagaggcagcaagaagcagaatgagagattctgctgcccctctgggttcttacatttttactctataaatataggaaaagatcagttctcctcctttgaatcattcttcttaactgaaggaaacaatatctcagtgctgtctccaaaactgattaattttgcataatctggacagataaaatctccttcagtgctgaggagcatgaaaagagtttagtgcagtgtccttgccatacaattagttattgatacaaatcttctgactgcctttgaagtggaattgaagagctttataataaagataataaagctatgaaatgtagactccatattggctgaaattagataattagcttaggatttctccaattacatatttaggagcaggagaaaaatgaggacctgatgcctagcaacacaagctaataatgtaatctatacaaattaatgagtgtacacggatactcaagaaatgctaagcactgtagtgcgaagatggagtctggattaacagaggaagagtggttaaaacacacacacagccagcataaaacaacctacccttagaaaacagaagaacaataaaaagtcaggggaaaaaatgtattaaagggtgcagaaagcattctagaaccccaaacaaaccactccaggtctatttttaaatatagaaaactctaatacaattgatttgtattttccacataatgaacttagaaattagctttgtttttaaagctccagatgaaaggtgttgactttctcctcatcttatctaaatggcacaggtatcatgatgatatttaagggtaagtgatcccttcattggcactcagccttgtatatgaaatgggcttcctaagtggctcagtggtaaagaatctgcctgcctatgtaggagacacaagatacatgggtcaggaag

SEQ ID NO: 41625 - DNA, 1343 bp, Bovine  19866881051039
  misc_feature (1)..(1): n is a, c, g, or t
nttactgctgtggagtattatctttcatacatagtattttagagtttataaagcagtttcatatatacaattcatttaattctgctagctggtgtaaagcaggtattaatatttccccattttatagatgagggcacagggctttagaaagtctttgcagtttgcctaaattttcacagcttgttgctggatcttggaactaagatttctaactacaagtaatctttccaggtagcatgtttatccagattgacagacgatgtcaaacagggtattcctacagaaacggctcatttaggaacatttgaatctttggccctttcatcatcttactgaagttttgctcccaagggaaaaaaaattgcatgtagacacagaaaagtcttcccaacaatcctgttctctaacgtctgatttttcctttttccctttagcacaggaagaaaagctaattgaaattcatgccacggtcttatgaactatgagtcagaagaaaagaaacacttaatcacttaacgcaatgattatcttttcaagcaagcaaaagggaataggttggggaggggcagggaagaggagagcttgtaagatatcttatgggaaactctttggaaacacgactctttgatctttgcagtttttcggagccctcctgtgtaactaaatatatacttctttcttatactgtagccaataaaggggcttcccaggtatatcagtgctagagacagcaagagactgggtttgatcacggggttgggaagatcccctgggggaggaaatggcaagccactccaggattcttgcctggaaaatcccatggacagagaagcctggtgggctacaatgcctggcgttacaaaagagtcagacatgactgagctactgaacacacacacacacacacacacagagtcaacaaagagaaagctgtagttctatatttgctttgatgtcaaaagacaaattcaagtgtgtgtgtattgatcacccagggtcaaatctttatgagaatccatccaactgggatgatggatgcattatccatttgggatacctgggttccttctatgctgtttacaaggccaagttagatttgtttctttgagtcaagcttagttattaggaggacagactctgtccttgactactttctgcccatcctcttcgcccatcaactgttctctcctctgtaggtaggctccaaagtcatggtttatgtctgcatgtagtcacaattactctagaagaatccccctggctccccatgaagaacacattctctgagcttatgcagattgcactgtcctagtaaatccagttcgcagccagttttgccctcc

SEQ ID NO: 41626 - DNA, 1645 bp, Bovine  19866881111997
  misc_feature (1)..(1): n is a, c, g, or t
ncagcaaataagcaaacatgacctagcccttcttgaaaaatactaacagacatcttagttcctaaattttgttagtttcaagcttaacattttcagattgcctttctaactccttttccttttgagaatgtgttcatggacatattttgtactaggcttctgctatttctcattctttaaaaaaatttgtttattatttcattatttttggttgtgctgggtctttgttgctgcgtgggctttctctagttgcggcaagagggggttactctttagtcgtggtgtgcaagcttctcattgtgatggcttctcttgttgcagagcatgggctccggaggacacaggcttcaggagctgcagtgtgagggctcagcagttgcaacttgagggctccagagtgcaagctcagtagttatggcgcatgggcttacttgtcccgcagttgtgagatttttccagaccagggattgatcctgtatcccctgcattggcaggcagattcttgatcactgagtcaccaggcaagtccccttatttctcattcttgactgatggtgcgactgtgccatgagaagtgcttcttggttccattttttcttggatttgtcacaagactatgatatcaaatatttaaggtcctatgtattctgtgaataatagcacagtggatgagatacaatgaccttttcagtattctgtattgtgactagctatagtcaatccattcatttcactctttttatggcctccctgagctggagagaaaagagtgaatggccatccgaatcaaaatatgatgtgccaaaaggtcagaatagtaaagtacactagtatatttcatacaatatattaaggcattaaaatcctaatatcttgccctggtgccagaatctataatgggaaaagaaaatggcagtttaggaatttgtccttgtgagaactggaacagatccaaatggagaatgactatttctcattttaattacagtaaaattttattccctatattcgaaaacctaaagatggtgttacatttttaaaagcatatgtgttgggagtttgttgacacatttaatctcaccactaaaggtgagacaacttgtcttctctaagctcctgccatctggtagattattttctatagttccccgcatctttctaattttatctcactcttaaaaaatatgtttatagtgtatatgaagatacatacatagcaagatagatgacaccattgcttttcttatttctttcctttgctttttatatgtgattaaaaagtttaaacctaatttcacaaataatcaggtacaatgccctaaggtcagaattctagctcaaggatattgttgcttttatttaactcttctaatcttatgagaactgaaaattcccacacatttttatctagggttatttcaaccaaaaatgttgtcaagtgttgagccagttctatggatacaatagtctaagaaaaaattctcatttcagtagatgttataaaattaattcagatcaaaattttctatcaggtccatgctgaaatttatactgaatcagcaaagtgtggtctgtatatttgtgcttgtatgttctccctcacaatacaataaaaatatttattttattaatgagaagacatata

SEQ ID NO: 41627 - DNA, 766 bp, Bovine  19866881130882
  misc_feature (1)..(1): n is a, c, g, or t
naaaatgtatatgaaaagtatggtgtgagacagtgtgtgcttctatgactaactatattaatgaaattaattctgagacagttgaggtgactggaggctagctcaaattataatgtagtgttctctacatatcagagggctggaatttttaacaggcagatacccatgtattacatgtaacatctgagaaaagtttatcttaaaaaataatttgatagcaacctgcagcgagaactgaaatcgggagatttttcagatgagtagccaattgtgttctggctgactagagtaagtaaaccttctctctccttactgatctgcttaattggaacgggaggtgacagtgtgagggacggaggttcgctttgtacatgtatcgcatagtaggaattattatttgtaggctccaacaaagagaatggttctgaatcctaagaggtccacgaggctggatctgtatgatttattattcagctaaaacctctaaagagggaaataagacctcgttgtcaactctgatttatattctctcattttgcaattcagtgagcgagtcaggtgggtattgccgaaaactggttatggatttcacccaaagacgtgggattgtatttgtattcagagtttcagcttcatgagctttgtatgattttatttttagaccttttctcgtatttaatttttatttatgcatattcttcacccactcggaccagaatggcaggacgtagctgcttaatatttaagccatttttcatgcatcgct

SEQ ID NO: 41628 - DNA, 1092 bp, Bovine  19866881230528
  misc_feature (1)..(1): n is a, c, g, or t
natcttcccgatgcagggatcaaacccatgtttcctgcattggcaggtggcttctttaccactgagccatctgggaggcccttgaccagggatcaaaaccacaccctctgctttggaaggcaaagtcttaaccactggactgccagccaagtcccacatctttgcacttttatctatccaatccctcacttggttttctctcctaccaactgctttaaggtcttttgctcaatagtgtgtatgtgtgtgtgtgtgtgtgtgtgtgtgtgcacgcacactcacgctcagttgtgcctgactctttgtgaccccatgcattgtagcgtgccagtctcctcggtctgtgggatttcccaggcaagaatactggagtgggttgccatttcctactccaaagactcttaatgacccagggatcaaacccaagtctcttgtgtctcctgcattagcaggcagagtctttaccactagggccgcctgggaagcccttaaagtgacactgattaaaataggagcaacagcacatcttttatcagggaagatttcagacttacattagagaggctgctaagaagaacacccatgatccactacccagattcaacatgatcatcttgtttcatctctctcaatcacttcttcccaccacccctctctgaaatatttcaatgtgaatcctatatatcaactgatatcagttgttcatgcatgcgtgctcaatcgcctcagttgtgtccgactctcgtgtgaatttccaggtgctgttctcagagtatgatctggagccccctgagggttcccaagactctattaggaggtctgccaggtcaaaactatttttataataatattaatatattgtctatctttttcattctcattctttcatgaaagtattttggagttttgcaacagactgaatgcagcagcagatctgagaatccagctttctcctattaaaccagatatgacagctgaaaatatttacaggaaatgtttaccaaaaaatatgggcttccctggtggctcagacagtaaagaatctgcctgccacacaggagacggtggggtttgatccctgggctggggaag

SEQ ID NO: 41629 - DNA, 1664 bp, Bovine  19866881259780
  misc_feature (1)..(1): n is a, c, g, or t
ntatgcaactccccggagacagaaggtggaggcatacccaagatttatgtgcgatgctggcaggaggctgtaaaagcaggctgtgtctggcccctacacacacacacacacacacgcatgcatgcatgcacatccctgccaggctgcagaggtggtcaagagaggaaattctacaaaatcactctgagccggtaggtgggagacccagcttcatttcccagttctgccactaacaggtgtgatcttggggtttaagctcctctttgcccaggacttccttgtgtgctaggcaccgtgctgaccaccttatgaaatgttcatctgccttagtcctcagaactgccctccagtttcagtattagtctgcttcgtaaatgaggaaactcatgctcaggcggttaaagatgaagtcctgtatccggaaaaatggtgagatgggcttgtccgatgacagttagcaagggtctttcggattccggatgttggccttcccagattcttattccttgaacgggatcatctggggctcccgtggccacccgcaagcagccagacgcagtggtgttgcagaacgggctgggagctctgggtacgacgggtttatttttttttttttgcttggctggagttggtgaccacatgataccagaagctttccccccgccgtggggctgcttggcgccacctgttttccttctgcagtcatctgccccttcgccaccccgccctctgtcctgcagcccaaaaccggtgtgaccctggcgtctcatggttcctcagccttgctggtatgtggcagcctgggagcgcctatatatagaaagacacacaagcacagaagccacttcctctgcctgcgtctcagtttcctcctcagccaaaataggcctgtgactccccgctcctgacctgctgagctcatcggcccaactccccctcactccgtcttccctgaccccctgccaccccccgccccaccctgccgccaggagcaggagctgatctctgccctacacaggatggaaggggccccgtgaaatacaaatcgggcaggaaagaaacaactctttgcaggacttacccgcattgtttgttgcaaaaggggaaaagccaggaagcgcccactggcagtggcttgaaatgggctcattgaattcagggtatttttagctgctttgctcaccccagcagctgagaaggccacctgtcccgagttgttggcactccatccccgctgggatggcccaggatctctgcttttttgctctcgttttccttgcaacccttttggccccgtttcatcccaacctctaccttcctgatatggaaatctacaggcagagtgaatctagagcgtgactctgaagccttcactgttccaattgatggtcctgggctctcagagtcagcttctggagaatccttgggtaagaccattaaatggagccatccagacagaagggcccccaggcgtcctatgccagagcaagcagaaaggcactgcgtgtactgcctaattgtagccatgctgcaggcgaagtaggcgaggctctgggagatgtgacatcccctctttctgagccaggaagccggcaggcttctcgccacttccttatttactctgtatatacctgctaaaagagcagcagtctgtccctcaaaag

SEQ ID NO: 41630 - DNA, 1420 bp, Bovine  19866881281691
  misc_feature (1)..(1): n is a, c, g, or t
nctgcaacacaggagatgaaaagttcagtccctgggttgggaagatcccctggagaaggaaatgacaaccccagtattcttgcctgggaaatcccacgggacacaggggcctggcaggggcggactgtagtccatggggtcgcaaagaagccagacgtgacttagcgactgaacaaccaccaccaatattgtcattcaccttattttattagagagggaagctggaatccaaccatctctgcacagaacgcccataatgactgattgcacagcctgggagtattgactggcaggggcgagcagggtgcagagtgggtctgctggcagggggttaggaagagaaatttaccttctcactgtgaagttcacttaaaaataatataaaagcacatttagcgatgttgtagtaaagaggatcccagtaactggaatttttcacagatttctctgccacatactcataatgggtggggtggcaggtggccaaaggagggggccaaagctcccacagcggccccatgcaaggaccaaggccttcccatcccctctccatccatctctgactctctccaggtgggcagaaatgccactgttcattagagcaaatgtttcaaactccttttaagagatggctcacaaaatgatcctccaggatttacttctgatggccaaattagagagctggaagtttaagtgaaaagactgaaaggccctaagggaagacagctagagaaataaagaagttctgacactgagtctgggatgtctgtcctcctgagagctcctttatgtaatccataatcgttatcaggctgcctcgctccagagccccatgctaccatcatgatgctaggtagctctgagcctcgtgttctctcatctttaaaaaaatgaaaacattttctgagtcagtgtttgttaagttggatgccaacttcggaatcgcctggggagtttgtttaaaattgcagaatgggacttccctggtggtccaatggttaagaatccacctcccaaagcaggggacatgggttcaatccctggtcctggtaataagatcccacacatacaggacaactaagccccaggcaacacttagacagaagcccaccccttactgcaatgaagagtctgcatgctgcaactaagacccaacacagtcaaaaataaatgtataaataaatattttttaaaaaagaaaagaaaatgtagaacattggaacccacttgaaaccaagaaaactggaaacccagaatctgtttttgtaatagtcccttcacagtcaagttggagagagaaatttctgtgacacacaactcacccacgcagaagaggaggctacagtccatgggatcacaagagatcggacacaacttaacgactataccatcgccaccaacctgaaaagtcagttaggga

SEQ ID NO: 41631 - DNA, 1827 bp, Bovine  19866881339537
  misc_feature (1)..(1): n is a, c, g, or t
natatgtatatatggtagctatatataaacatataaaaatgaataaatataaatagatagatcattcctctgtccatggggattctccaggcaagaatattggagcaggttgtcatttcctccttcaggggatcttccctgccctgggattgaaaccacatctcttatgtcccctgcaagaatactggagtgggtagccattcccttcttcaggggatcttcctaacctagggatcaaacttgggtcttctgcattgcaggccaattctgtactgtctgaaccaccaggaaccccatatatatatatatatatatatatatatatatatatatatatatataacttcttgctatttgtttccaagatacacaatgtcagatgctccgctagtggtggcagtgaggggccatgggtgagggggtggacaacgggaggaaggaaagaatgtacctgaaggaagaggggtcggacaggaacagcgtctcggggtgagacaggggccaggcagatagatgctcctcatcccgacggcgcatgtcccgggtaaagggattgatgagcacaggtagcctgtggcctcttggcctggcatccggtcccatccctgttacctcaaggccttctaaaccactgagccgacagcaattcatctggaaggacagactccatgaccttcctgtatcctcacgctgcattctttgggcgtcgagtcccaaccagtccaggactggtgaagctctgtccacacgcggcttttcgagaggcagatgaaacctttcgggtcccgggtagctcacctctgtggttgttttgcccatttgctataaatgactatctctagcacttggttaattatgtgattacagcacccagtgacaaggagaaaattaaaaatccatgctgcattttctagaacactttattgctctatgcaaaagagggcaaaggcaatttagctgagctgctgtgaacaagagctgtttccttccccttgcttcggcccctccctcacttcgccctggggagaagctgagttcgcagctgactaaagcaggaaagagagcaggtgtggaagaaaacataaattaccattatctgtgacaattctgggcagggccccccacagagaacgcgctcagccagatggtgtcccctcctaatttcaataaagcccaggaagttgtggactttgggccagtgcattagtgtccaacacagactcagcctgggctccatgtgtgatctttatttctttatgttcacctgttgtgactgcgcttccttagaaaaccccaggaaggacttccctgctggtacagtggataagactctgcctgccaatgccggagacacaggtttgatccctggtcggggaagatgccttatgtctctgagcaactgagccaatgagcctcaactactgaagcccgtgtgcctagagcctgactctgcaacaagagaagtcactgcaaggagaagaccatgctctgcaactacagagtagcccctgctcgccacaactagaggaagccctctcgcagcaaggaagacccagcacaaccaaaaatataataaataaataaaaattaaaaagaaatacccaagagacaccaaccaggacgccctgctaatatgtcaagactacatatctcagagctgagaaacccgagttggcctctgaactctgccccgtgcctggtgtctgctcatgaccagtgctcatgacctctaagctttggtttcctcgcttataaaatggagtttgaagatgcacatttttttcctctctcacattttaccatctctgaaatcaggatgcccttgta

SEQ ID NO: 41632 - DNA, 1142 bp, Bovine  19866881397483
  misc_feature (1)..(1): n is a, c, g, or t
ntcagtctcacaaataaacccagattcaaggaggtgggaaggggaaagcctcaactctttgatgggaatggatgcaaagtcacatggcatagcacccatggccagggataccaatgtagaaaggggaataattggagccatctttgtaattggcctgattgatgatgctaaatacatttcagccaaacgaatcagtggccttaaaggacacctaatccctcaccactctaagcttcaatgctctctactacatcttatccaaattgtcacccagcttttgcttgagcaccatccataataggaaattttaccttcaattatagcccacttctggaaccaatgaactgcattaaactgaagaaattactcatctgtttttctgtgaaatattagaatgatcttcaaaattcataatagatttaagagtatgtttttaataagatgccgtgcatggtttctgaaatagggatcatctctccttccttctctatctctccccccgccccccaatcccctgtcaaattagtataaaggattcatgtgtttttgagaaccagtgtactacaaaaacatctacccagattttgtcaaagacccagaggtcagaaactgatgcactccagatggtgtttttttctgtatggcttttacgatggtctctgctatagaacagttcctgctgcgctgaaagaggtacttccaaagggctcacctggcatttccaaagggcactgcagacattctgagttttcctggtggcgattctgtgaggtcagggagagctttccctcttctcaatttatgggtagaggtttagatgcgggaagtgtgccctagttcacaggatatgttggtagttgaacttccataaaagctcacggcccgagactctgtcagtttgctgacctgtgcttttataggtaggtgacgacaggttgagtccttggacttggcttctaccctgaagctctcactcagctgcaagtcagagtctagactatacagcaaaaagggctgtcagagtcttctcttttagggttgggttctgatctgcttgtgaaaacagtttagtgggttgtagacaagcattttaaaaagggaaacagagtagagataaaaagaataaaatagaaaatagattt

SEQ ID NO: 41633 - DNA, 2237 bp, Bovine  19866880420336
  misc_feature (1)..(1): n is a, c, g, or t
nctaagaactaaagcaagatggaaaaaaaaaaatctaaattcattatttggattatgttttactttataaatctcaacattccttaaggaaaaagccctgtagttttactagtgctcataaagaaaaagtgtactataattttcagaagcaattgtgaatttgaacaccttacacttctcaagaaagatctgagtttagtcgacactaccaggaactgatgtcaataatcaagataaaatttccttctaaaagcaaaaaaagtaatttctgtattaaattgaagtgagatctttgaaatattctaacaatactaattttacttttatgctctgctttaaccttcacattcatcctatgagacagatagaatttgaaatcctatatataggtgttggagattgggacttggaaaagctgtgtaacctgttcaaagttacctgaccattcagtgacagagcctggattggaacttgcacttcttggttgctgtctatttatttcatgatcccgtagttcatcagatagactagagaatgtcacagtagcaaaggaataagaaaaaccctgaattcagcttcttttagtaaccttgaaggaagctgccagtgttccaggacccaatgcaaaggcacttgaagacggcacacacactttgcttattagcaagctgatcaggctcatccttgtggaactagtcggagagaatgctcaagaagtttcagctctaaaggcccttgtttcccaagttctttatctttgagttacgagataagtagcaacaaaactgtgcctatcacttcctacagaatccttgctctcttttctcatatcccctcacccagcttacaaaaggaaacacaaggaaatttaccagcctcactcagtgggcccatcactgggagcctttgcagtccacaagtgtaatggtccctgatcagttattggaacagatccattttccacatttttgtgaacattactgctaactgccttatcagaggggcaagaatttaggcggcatagcccacaagtttatttttcttagttaaaagtaagaacatagccagacagtagtctggggctggggtggtaagtcaaaggaagtagaagacacaaaagaaatgagggagagagtggccacactcagctctagggagccttagatttcttttgttgttattttctaatgtctgtgaactaacaactgttaatggaattttaagttcagctgagtccagcaatgttgaatctacaatgaagaagatcagtcctattctaaattccaaaactcctacctataatattgatacatttccccaaaccttattagtgcctccaacagactgacatatgctataggttctttgacagtgttggttcacaaacattgatgttgaacttgagatcagtggttcccaacttgaactgcatataggaatcccttgagagctttaaaaactactgatgtctggaccccagccccaacagtactcctgatttagttgagttcgataaggcacatcagatttaaactcccacagtcttgtagacaagactacaatcctcctgctgtagaacaccagacctgagatccagatatttccctgcctacagatcagaggattccgtgggcagaattagttagggttccagtgaacataaccatgtgaggtcttctgcagttctgcaaatccactttttaaaatgatgactggagcttgaagacagaagtccaccctagcagacccataagctacacttgccaacaatacaaaacctcacagatttaagtcaaaactacaaagactctttccatctccttccaaccaacaggtagaattatgcggccaaggaagaacccttcttgatctgctccttgcttcctggacatgattttcagtcaaactatacttaaacacgagagtacatcttctgccctataattcaggttgacctggaagttatactatctcttcccttattttgtgccaaccacatgcatctgacactcagaggaataggaataggaataataggaataattcaaaattttcagaattagaggtatagctaattcaactttaaaggttttctaagatcatgcatttagcaaagggcctaacatctccacctttagtacacttaggaatacgtgagtagtaaatttattatccatgttacatagaagtctttgtggacttttccagagtctcaaatctaatcatgggtaagccaa

SEQ ID NO: 41634 - DNA, 1040 bp, Bovine  19866880566015
  misc_feature (1)..(1): n is a, c, g, or t
ntagagcttgggggtaagaaaaatgggtgaaggtcaaaaggtactaactcccagttataaaataaaccatggggatggtataatatacaatatagttaccacagttagtaatgctgtattgcatatttgaaagtcgctaagagagtattttgtaaaagtcctcaacacaagaaaaaaaaaattgtttactataaatggtggcaggtgtaactagacttattgtggtgatcattttgcaatatgtacaaatattgaatcattgtatctctgaaactaatgttgtatgtcagttataccacaataataataacttggtctggaaaataaaaagcaaaatagcagatacaaagtttttagaatcatgaaggaaagagatcagatgatgtgatcaccagatttaaaatattacaagaggtgctgaggaagagaggaaaggtatgacaaattaagacatcctgtttcacacccagaactcacaggagtttgtaaatagattttaagttaggtgaattcagatctgttactacctctgaagtaaggaagaaaatgatctttttttttttttcccctcacagtgctatgacctattctggaatccatctgctgagatgctttatagcagatataacaggaaatcttaagactactggcttctaatttagttgaagattcaaaattgtttgtgccaactgcagttaaagacagaatttcaacattgttttaaatgttgtgtatctgtaacttgcagaaggatcacttcagctttaaaacctgcatatgtccaaaggaagaatgaatttgtgcctataggggcagaaaggtttatacatgattgagttatgctgttcattagaagagataccagcagtttttaacaaactgacaaacaagaccatatagaagtccataaaatgaaaatctatttcctaccgtgtagatgatagagtgttagttactcagtcgtgtctgactctttgtaactctatggactgtatgtagcctgccaggctcctctgtccacagcattctccaggcgagga

SEQ ID NO: 41635 - DNA, 1625 bp, Bovine  19866880569734
  misc_feature (1)..(1): n is a, c, g, or t
ntttttggagtcaatgaccgatttgaactaggctttttatttttctctatggcaatgactggagaattccatggtcagaggaacctggctggccacagtccatggggttgcatagagtcggacacgaccgagtgactaacacacacacacatagcaatgacgcagttcactgtgtcccaaaaaaatgctctaataaaaggaaggaacacaccaattttagagttaaataaataactaaaactaaaataaaattttaagtgaaataaagcttaagcaaagaatctgggtctgttcccctggtaagtcacagtaatgactcatccccagattgagttggcagtcttcttccaggaatgactcagtagcttcattcgaacattgctccttctgattcactataaccagggtgggcagagatggggtttgatcatctttggaagagtgactttcaaaatgagcttatttatttatttgtttctatatttgttcactttggaaacattggttcaaacaaagtactatttgaatgtgtgcaactaatgaaagcagttctgattaactcgggatggaggctcagatcctccaccctttggttcccactgatttctggtcacatccatatttattcacatttcatttgccttaagacaatgagaaacctatgcgagtcgtggatgatgaggacttggtagaccagcatctcatcagcgagctgaggaaggagtatggaatgacctacaatgatttctttatggtgctcacggacgtggacctcagagtcaaggtatgggttcctgtttgggatagtgcagtgccattccttaagagagaaactcattttggggggatcagtgagtctattacacatatgactgagcacaaattatttcataaatgggaaattttggaaatggtccaaatagttaccactgtcctccagaatttgtggtctatggaaaatattggattggatgaccccctgtagctcagttacttgactcagactaaattcttctgtaacattaaagtcatgcattcaccagacacttgttgaatagctatgatgtgtcagaccctggtgataaaaaatgaagagcatttagcttcggttttaagaaaactcagatttaatataggcatactttggaagaacctggaaatttatctcctgattcagcatgggcaagacggtagggctttacacccaatatcttcctatgatagggacaaaagttctgaaccatgaaaaattatgccatgtagtcataataataataataacaataataactaactttattgagttctttcattatgccaagcactcacctcaaatgtttacaattcttatctcaaacctctaagagaaataacaaatattatctttgtttcaaagaggccaggaatctagagtcgttaagtaacttgcctaacttcacccagttaatgttagacttcatatgcacacagattggttccagagcccatgcttacatgaaaatccttaggaaaaaggctgcctgggctattagaatacctggttcagcctgaagcatttttctggatctggagagagatcccttcaataattcattctgcttttgtgttttgccacctctaatgtg

SEQ ID NO: 41636 - DNA, 1330 bp, Bovine  19866880725366
  misc_feature (1)..(1): n is a, c, g, or t
nttgattctgaagtgggtctttgtagctgttttctgaatccctggaataaagagggttgatttgcgatggaatctccagagcctgcagtcatacattacaatatgttgtaaatccagagggtacaatatagatttcacagggggccctgaggttaattgaaattccatctgtttcttctctgtggcaaacttagtatcctgggatattagctcaggataagataggggatttataacttttttatttttaggctaaagtagaagtttgtctaaacctgctcctccctatgttctacctcctaccttcacattaaaagaagtttacaagacagcctttattttccccacagctgcccccgagggagcccccccttttttccagtgcatgccgggcaatgccatgtattcttagactcccaatggcccccattactgtcaattagttacggaatgctacagggattcatgcctgacagcccgggcaaaggcaggagaaatgggctcagtagggagcgaggggcctgattcttttttgtgcacaagaaatacctttctcagcaaggcttttaatggccttcccttctttctttccttctgcccaagcactgcgccccccacgatcccaacgcacatcatgtacacataggatcctatgttcacacccaacgtgtttgtgtgactgttgcaaaggactgtgagaactctcagagcggaaggctctgacgttttcttacaatctatgaaaattacttgagctttaaaattctgacttatatctttgctataatctgattcctaacttcctttcttcagaaggtttcttgttactaaaagcctcttttgcctctttctgattagtatcttttcctccctctgaagaagaaatgtactctctggtctcagaacttgggtgggagcccgctgcaccatgatggccgtggctggcatctcctaccacgtccatgtctttttgacttccgtctctacttcttgccttcctctcctctaccttccctcatttccccctttgccctcatatctgtgcctgtatcattccacttacgctggaggcttgaggctaggagttttgtttcactcatttttgttctctctttcattttgtacccacaccaaatatctacagtggaaagacacagagactttgtttcattcaccaaaacacctgcactccataggatagcatctggcacaagcaggagctcttaatatttgttgaaaattaatgtactagttaaaaatcatttgcaagtcattgatggctctcagggttaaggagaacccagcgtcacaccaaaatggtttgcctatt

SEQ ID NO: 41637 - DNA, 1386 bp, Bovine  19866880771237
  misc_feature (1)..(1): n is a, c, g, or t
ncatgatgatgaaggaaatcattaaaaaattgatttgtaagcatctttaacaactaatgttctgattttaacactgtacaaatcagattttatcttgaacctaggaactgctatttttaatcctcaacatacattcatttttgcttttattcatttgaaacttcttattaaatttatccagattctgccaaagctctctagtcttcgtcaagggtgacaagggtttaaaagcaaacattccttagaatgctaagtcacttcagtcgtgtccgactctgtgcgaccccataggacggcagcccaccaggctcccctgtccctgggattctccaggcaagtacactggagtgggttgccatttccttagaatacatcctataaattgtccacatggtcccaatccagctaaaatgattcatagatccaagcccattttgtgggatttggtcatttcacagaatctgcccctggacctaagatttttgaggagggacagcagggagggtgagctctgctgtgtgctgatgaggactggccctataaatgaagcacttgcctagtttctcaccctttaagaactccaactccaaaaagtcagtggttaaattcaggtagtagtaagtttcttcatgtatttgtttttccatgtctgactatagacagcaatgacactgcagaaaaattcagcttcaaaggcaacttattaaatacgaactgtatgccaggcattgtatctaaagcctccagctgtgactgctgcctctctgtgatacccatggtttctcctcctcctccttctcatccctaaattcaggccattcctccagtgtcctgggacaacttcagctctctgtttgcttcaggagctccaaatctgctctggcagtttttcaaagtaggattcactgtataccttcatcatgagcacctggagtgcatgtaaaattacaatccttggacccagatctatctggctcatggcccgaggagcaccaatcagttgtctcagggccaggaactggacaattaggtaataccctacagccccaagcctaaccagctgggtgaacaccttgtgtttcccatggaaaccccaataataaccatggtctaggctctctcttcactctggcttctgcttcctgaccaaaacttggtgttcctcccatgaccttgtgaggtgtggtgcagtttcctctttgggtaatgaatgagtaatatattccattttcctttgacattctgactttgctgcaccaccagaccttaataaaccctgtcctgaagtaatgcacaatgtaaataaaacatacttataaggcacttaaaatataattatcctattcaagaagtcaatatagaccaaaaatctcttggttgcatttt

SEQ ID NO: 41638 - DNA, 1232 bp, Bovine  19866880843049
  misc_feature (1)..(1): n is a, c, g, or t
nctgcagtgaatctgtagattgcttctcccaccccaccaccctctattttgtggcagaaggcaccgtattctaaaatgttttaaccagaaacaaacagaataaagaaggaaaaagaaataaagcagaaattatgaaggagaagagggtaacatcatctgcagggtgtgaacgtgcgagggtgagtgtgcaggcaggtcgggcagaggcaatgaggacctggcctggctacaaaatatctgagcttgtggagtgggcagaggtgtccctgtcagggatggcacagcactaaggccatgttcagaaaagagcagtggggcagctgtggctggagccaggttggaagtgcctgagaaacgtcaggtgcagcattatcatggcacctggtcccctccctatctgtggaagtgcggggcttgtgcataggatttgctggatggatcagagtaaaattgcaccagctgggctttaattctggattgcagactggtccctaaccccagcccaagtttggcagggggtcatatgagtggagaattattagtattatggtctttatgagcgttttaaatactctgtgttttttgtattaaagtgtatacttctagaatgagagatcatgtttggcttctgtcacaaaccacgcatcaaattaccaaacacacacacacacacacacacacacgacacaatgcaagggaaggaaaactatccatgaaaagatccttgtgtctatcctggttgtacagctctgtcattgatcaaattaggataagttacttctctacttccccatttataaaaatgaatatactgatgcatgtttcataagaatcatttaaacagtatctgggatataactcaattgattacaattagatctgaatagtgggtcaaatgcatatgtttctctggagagaaataaatgtatataagcacaaatcaggaagtttagtcattatcacctaactcaccaaagaggaaatgcttcctcttaagtttctcgtgagctgcaaacacagtggagttgagagcaggggatttctcattagtgcttatgtgggagatcaggagaagaaaaagactacagctaggtatatggaaggaaaagagagaggtaaggataggaagaagaagaagggaactcccttcagaaaatgtcttcagcttttgggatacttttcacaatttttctccctttcacagctggtgagtctgttgggagtggtggtgg

SEQ ID NO: 41639 - DNA, 822 bp, Bovine  19866880874606
  misc_feature (1)..(1): n is a, c, g, or t
ntgaaaaatgtggaacttagggttattgcatttccttccaactcccaatttttcttaataagctctgagaattttatccaggtccactatagtgtatttcatctattctaggactcctatgttttcatattacaatctgaagttggggtgtgttaagcaatggcatgttaatatagctgctgcctcctggcagtaaggatgaagttgtctttgcttgcacaagctggcatttggcatgggcatacaacttcttgatatttcagtcaccaaaccacttaaagaccatttgaggagagaataagtgtcctggttgttgtctgaacgccttttgtgatacctcctggtaagatcaagaacacgtcagcatcaaattttacagaatgagtgtcaatatcttggaagaagatcttggagacagcaaagaaactctcttaaaatacgttagcatcatcacatctctcattggtacagggaactatctgcctggaaaacctcagacatcgacaactctgagcgtcaagaagtgattcaagagattcaggctggaagatgttttagaaatagtttaatttatttaacttgtagtttccttttttatgcaatcagaaaatgctacatgagaaatacaaagcctttaagactctttaaacaagataaaaaaggacaattttaaatgactggaaagtgatatatttaacagtttttcttagcatgacacaaaatggtggtcccccttagatttgagctgtcctggaatgatgaaattcggaagttctttttaaaatgttttattatgtacctttcctttcaagaattaacagt

SEQ ID NO: 41640 - DNA, 924 bp, Bovine  19866880880281
  misc_feature (1)..(1): n is a, c, g, or t
nctgtggcggattcatgttgatatatggcaaaacccaattccaatattgtaaatttaaaaaataaattaaaaaaaaagaacagaaggaatagaaaaaaagaaaatgtttattattcttatctagtttccttgggagatgaaactccattattgtatttcctgaaattgagacaatttgggccccttacttagatattgcccctatgtaatttcagaggcaataataaagaaatacatttttattggcaattttaaactgtggttcaccttgccaacaatttaaggacaatgcacatcagcctggttcttgcacctgccctcctcaagcagctggtacagactgttctagcaaagaggaggaaagatgcccaccatgggaggaggggtgaactggaagcataatttatacaataagaaaagtatgctctgaagtcacttgtactttctgaacttcagttacctgtaaaacaggtaagaatgaatggtctttatggagaataaggggcaaaagaaataatccctcaagttcatttgaggtagagattccacttttactgtaattataagaaagttcagatgaagtaaaagacagagttgtgcaaataggcacaaataagttaaatgctagtggtattcacatgtgacttgaatgcagttattaatatctggactcactaaatcaataaccaataatcaagattatttggaaaatcaattttaataacagtgacaaaaaaaataagcatccccattactgacagaggctggcactgtcaggatgctaaaatccagggactctgactgcctgccttcgggcaagcttgtagatattacttggtcattgtttgctggtaaaaagtaaaatagtatagaaggaaggaggggaaagagggagggaagaagggagaatatttagtttatatc

SEQ ID NO: 41641 - DNA, 1114 bp, Bovine  19866880898968
  misc_feature (1)..(1): n is a, c, g, or t
nttggttttcgtcatcccaacctctcctacctttgcaatctagtctctgccttttcctcctatacccaaaccctacccccaacatcagctttcaaactggcagttattaaatatagggtttattatctttatgatgatgtgtgtgcaaggatgaatttaaatgacacccttccatgggcctcagaatctcctctggagctgtactcacagtccctaagagaggagcctggacacatatctaccaaatctatcaaacattgatcatactttgttaccaaacctctaagtccctcaatgactcccaccttagatgcttacactttgggcacaagcaggtattgggctgtaggcaacagagcccaggtaacgtgttgatagagcatagtcatcaagagaaaatatggatttaatttaaagactgaatggagtagtgacatttctggtattatccaggctatagagatatgtctgacagtaggagaattttctgggcaagggaccttcccactccattaggttgcatcggcaacctgcagcctcccaaaactccagggccctgggtcattgcaggcctgcctttcccccagggttccccaccttttgtcctgtgctgacgtccgtccatcagcacagtggctcccacgggcaggactcttacttggggttagggagtgagtgctgcatgttctcctagggcgtgtgagtcagaatcccctggtgaagcactttgaactgcacccctccaggatgattctgatatccacccacctccaaggcttgcacctactgtttgataagtgccacagagtttagggctctggagagcagaacaggagagacttctaaattagccacacgtcttagagctgtttctccacccaacttggacagaagtctcccagacagattatgtcagtgcagctagagaggagacttgttaaaatctgtgctctcactggctgagaaaatttttcccggaaccctcagggactgatggtgggactgtagactggcccagtcattttggagagcaatttggcagtacttggtgaaattaagagtgcctacgcccctgtgacccagccccaagaaactcaggcacaggttcattaag

SEQ ID NO: 41642 - DNA, 2733 bp, Bovine  19866880955313
  misc_feature (1)..(1): n is a, c, g, or t
ntacttttaattgatctaatagctaacagggttcaaaataataatagccacactgttttcagttatacaattgaattattggttgtttatatataagtgaaatgaatgacaacattaatacaaggaatggccaaagttgagaatattagtaattctgaatgttggccaggatgtgaaacaacatggaccctcattgactgctgacaagaatgcaaaatggtacagcaactttagaagacagtttggtggtttctcagaaaactaaacatacttttatcatacaatccagcaatagtactccttggtatttacccaatggagctgaacagcacatgtccacacaaaaacctgcacacaaatgtttatagcaacttaattcataaatgccaacatgttgaggcaatcaaggtgcttttcagtaggtgaatggctaaatgaattggtacatccagacaatggaatattatccagtgctgaaaagaaatgagctctcaagccaagaaaagatactgaggaatcctaaataatattaaagtgaaataagccaatatgaaatggctacatactgtacaatttcaactacatggttttatttaaaggtaaaactatggagacattaaaaaaatcagtgattagcaggattcagaggggaagagaaagagaaagaggcaaaacacagatttttaggtcactgaatctttgtatgatactataatgataagtatatgacattatacacttgatcaaatccatggaaagtacaaccccaacagtgaactttatgtagactatggactttcagatgatagatatgcgtcgatctaaattcatcagttgaaattaacataatgctctggtgaggcatgttgatattgggggaagagggtatgcaagtgaagagttaggcggtatttgggaaatctctgtaccttcctcttaattgctgttaacataaaactacccttaaaaaaataaatcctaaaacacgaacacttttttataattagtgaatgtttaatgttatcaaatacataaggcaaccttatgattttcttcctttggacgggtaatagagtcaattacatcaacaggttttaattaaactctcctcctggtgactcagaggtaaagaatctgcttgcaatgcagagaacataagagactcgggttcgatccctggatcagcaagatcccctggaggagggcatggcaacccactccattatttttgcttggagaatcccttggacagagaagcctggcaggctatagttcaccgggtcgctgagttggacacgactgaaacaacttagaatagcagcacagttgccttgtttttggccatttatttcctgccgcacctaaatatttctctagccctttacatgagtcagaatctgctactgacttttgacttcatccaaaatgttcctccccactcccaatttctttccgctttccctggccctagattgctttctttctttcttcaaagaacaggttattttctcccttgactagatataatacagaagcgtggaagccagtgtttctcagaatattgtgaactatcattgggatcattgcaagaaaaaataggattcaaaggtttatttctggctacccaagtatgctctaatcagcatcacttcactcgtttattctgcgtgtttacacttatgagtaagattccgtttgtacaaagaattctggttggaagttgaaagttaaataaagattaattatttatcatttatatgttcttatattccctgagcctcattttctgaaaattgtacccacaattttcttacctctatttaaaaactgcaaaaccccaaatagaaatttaaggtttcctttttagccttggggctagaaatatcaaagcaggaaaagctacacaccagtaaatattaacatccgaaaattaagaattcaattgactcaataaaactacaaaccaaaaaaaatggagaaaaaatactacatttgtctaaatatagaagtttagttttattccattcgagggtccccagtattactctggacttcactagtctgtgcaacattggaataaagtaaaatcagcaggtttgctagataatgcacaaatctatcattgctactagagcaaaccataaaacatcttataaatggatcaagagcatcctcatcactattgaaagatagctttaatttttgctaaaaatgtcatagaatcagacttaccagacatcgtgataatgaaggagatcagtaacatctcagctgaagtccccccaaacttctgcttttggggtagtcggtgtttactttgatacaaatccacttaaatccgtccagatctctatctttcgatcacttttgtttactctcaattcaacagtatgatgcatcatttttcctagccattttagttggctggttaacaactgacaggaaatgtctgtgagttttgctaagtgataaggcaaaaaaaacaaggcttactattcattggttttcccacggtactgaggtgatgagataaattacacagcaatttttttttttaagttagcatttttggaagtataaattacataggtaaaatgcacaaagcttaagtttacagaatgatgaatttttatatgtgtatacaccaaaagcaagataaggccatttccattatttaagaagtttccttcatgctccgtctttgtcaatatccttcttcagaaaggaacacta

SEQ ID NO: 41643 - DNA, 1221 bp, Bovine  19866881027909
  misc_feature (1)..(1): n is a, c, g, or t
nggtggatcagatctgggggcttctgaccatgaggcataactactcacagtaaatttgccatgttcccacaagaaccgcggcgagttagaccttagctgcccaacactgagttgtatgcctcacatcatcattaatatgaaaaactgtgaaacctctacattcagccaaattcttctgctttccaaaaggatgtgggcgccgttcagtccgtatttccagtgactttccatttagtttcacagcttctctcagcccccgctcactctccccaagcctggccagagtcaaggactccgaagggtgtgtgggaccctatttatgagggagttacctacagcatagaggctaaaggaggatcagatggtgctgctcataggcaagaagactcaggatacagaagaaagtgtcagaatacctctctggctattctatatcagaatacctcccccaccctgccccactgaattacttctctccttgtcctccatcttactgactttcaaactgtagacagtttgcatatttttcattttagtgtccaaaacttaagccagaaccatccaggacagttatataagtagttaggcagactgacctttgttaccacaagaaaatagccctctggaaacccagattttccttttgattccccaccgacctctcccgtaaagcatgccccaccttagctaagagaaaatcagtaatataatcattaagttgtttcagagaacctagctggaagtggtcgattttcatggtgctgttgctgacagggccaaagatggtgatcacggagactttcctggtggccatcttgcagaaactttccagatactcatctcgctgctgcacatacatgctgttttcagccttgggagcagtgatcagctggaggagggcaaaagcaagcaaaacaattaactcacagtgatagtttcacactgagggaaaaatcaaagggatgatctagactacagggctggtggtgactgacaggatgtgtgtgttagtcgctcagtcatgtacaactctttgtgaccctacagactgtagcccaccaagctcccgtgtccagggaattctccaggcgagaatactggagtaggttgccattcctaaactagactgacacctaaactggatcattttgttggatagttagcataattaaagccaaaagagaccattggaaaggcctttttaaaaaatattccagacag

SEQ ID NO: 41644 - DNA, 955 bp, Bovine  19866881092750
  misc_feature (1)..(1): n is a, c, g, or t
ncaactagggacattcagggctagacaggcagggctcaactgtggttccataaaaagtgggttcagtgaatagaggtttgcccttgagatgagaaagtgaattgacaaagttaaatcttctctatatcaggcttttggtccaacatttctattgtccttaagcttcccttaccatcctgagccttagcacccatcccatgaggcaatgtgagtgcgtcagctgcacccactcatggtattgctggtttgttttttttttcctgccttgaagactaagttctctgtgacagcagcttttatcccagtctcaaccttttcttccttggcaactcttctcaaggatcctgaagtcaaaatcaatacttacctaaggaaatgtagtaggggcagaaagcttgatttgtatcaagggaaaccatttcaactcctgatactgggccagttaaatcattattgtgtctctaaatcccctaagaaatctaagaaaactacaggctccatccctagagactggagcccactgatcttatgtgcagccagagctgacatagacccttgcttatagatacagacagcctagaatcactcaacatttgaaaaaaccaggggcttgtgaaacatctgaaacaggtgaaccagggacttggtaacggtccagtgggtaggattccatgcttccactgcagggggcatgggtgtgatccctggtcagggaactaagatcttgtatgccctgcaacagagtcaaaaaaaaaacaaaaaaccagcaacaacaaaaaacacgtgaatcaaatactgatgaaatatataattttagggtaagatatctttaaaaatatatattggggaaggtatagttaaggagttgaagatggacacatacacactgctatatttaaaatggataaccaacagggacctactgtagagcatagggagctcgcctcaatgttat

SEQ ID NO: 41645 - DNA, 2086 bp, Bovine  19866881368344
  misc_feature (1)..(1): n is a, c, g, or t
naaaatggaaagatttttggaagatgcaggggaaaaaacatacaaaaagtctaacagcactattcagttgaggaaagaggatgattttgaaattattttaagaagttgttcaaactgctagtttctctaggccttgacataacaatattcaactcattaaggaacaagaaagcttcaaggaactcaggtcctgagtctgtttttgaatcatttaaggaaacagatggcagtgtcctttcctgagcagaggaaaaacgaactgaaagaggtactttttcctgtgcagattatttagcattctgactactgcagtgaatctcaactgaaagcaataattttgccttcatggtatatttggcagtgcatagtggcaagcagcacagtactataaaatgtggtacactccaaaggcattttttcctaatttgttctccagcttcttttcacataaaaatcttctggtacaaaactataccttgtgttgctttattttttaaatcaaggctgttataaaagattgcaaaagagtttaaaagaaattaaacacatgccattctattctcctcttacctgtattatgataagtatctacccatcccccatcgccatcatcttcttcaatgatagcttccaattcatctgaatattccatctgtttacaccgcttatagcatggaactataaagaaatgccaagggcagttactaggatatattctgctttctgtaaatccatttttaaaagagagtttattccacaaaatatattcctaccatcaaaatattaagtgaatattatattttatttctaataagagtatttaagagttacactcaatcaacagacatataattatttgatgacacttatctttccctaaatagctttgtgagaagacaagtagaaaggctctactgagagtgttcaaagtatgctctacctttatgatctgtgatcagcaaacctgaagtcagagatgacattgttcaacctcaggctaatgaataacatatcattttagtactttactctcagaacatggaggcactacttgtcatactcagaggtggtagaggtgacctctggtttacaacgttaaaagtaactttcaatatgagcttcataatttgtatttaagctccagctattaataatggataaaccagtgtaaagttcactaatctgctaaattttactctcttacacaaattggtgccaagttcttcatatagcatatgcttcgatcaacaggtattattcacataagcctaaaactgaaaaattataaggtaaaaacattgcagtgtggggtcaccaaagtgctattaatctcttgattttttttaaaaacaagcaagatagacatgaccaatcccatcaaaaactatactgatataaactgaccaatcccatcaaaaactatattgatataaactgtattgatacaaaagtgatgttttgtacatattttgcctttcctataatgagtagaacacaaatcaatgcattgttatatgtcattagactgtgaatgtaacaaccttttgatgttttcaaattagcttcataataacctcattaatttcataaatacttgtttcagaaacacgtttgtgcctacaggtaatctttcaatgatacaatggataataaaacctctagctttgagattttagatatcaaaagtagtatcaattataccttccatgaaaaacttaggtttaaaaaagactgatattaagtagctgaaaagattataattatgaagtccacttaaaaggtccaacaagggtgtcttttcaccttgcttatagtttcctttgttgtgcagaagcttttaattaggtcccatttatttatttttgcttttatttccaatattctgagaggtgggtcatagaggatcctgctgtgatttatgtcagagagtgttttgcctatgttctcctctaggagttttatagtttctgaaggtcttatgtttagatctttaatccattttgagtttatttttgtgtatggtgaaaagacagccttcagaatgggagaaaataatagcaaatgaagcaactgacaaacaactaat

SEQ ID NO: 41646 - DNA, 1469 bp, Bovine  19866881403973
  misc_feature (1)..(1): n is a, c, g, or t
nactgaaaacttggatgaatggtgagtcctgtgctctttaaaacgcatcatgatgttatttcctaagagacccaagcttcccgaatctagaggaattcagattatctatttcctaatcatagaatttttgctgctgtaggtgaaatttctgcatccctgcaccccttaaagtcccaaatatctgtagaattttcatccatcatgagagaagggatgaagaagggaaaaagtagagtgatttttttaaaaacactttttttgtgtatgtaccggagtttccctacaagggttttcaaccaaaccacactccccaagggatcaggcatctgggtcaagagaatttctccttttaaggtcttagtggaacttttgttctctgcagagttggaaggaagcagaaaatcaagcagtgttccaaatcccatttggaactagaaaggccccaataaatataaatacaatatacaaagccccccaaattaactgaatgaattaaccctcacagaaaatcagaagtatgtatcagtgtgccaaaaaaaaaagcagaagagaaagaaaagacttatccaaagccaccaaatcgacactcaagcttggatctgatcccagccagccttgcagccagagccacttccaacaggacaagaataagcctaccgggcagagtgctgtgaagcacagacacttgcccttctcatagggaaggtcaccctgaacagacacgtctgctttgtgtttctctggggtttcattagctcactcagaacgctctcctgccttcttcctcagtgtctccaaagatgtacctggataggaagttttccagtgactgcttcttgtcttccttgcaaatgatgccatccttcttctgcttttccatgtctttgattcgggactggaaagtatcgatcaaatcgaacacagacttcattgctataggcacctcataatattgctgttgaaggaaaagtaagaagtatataatgcattaaaggtgtttcttccctctgtccaaagggtggagagcctgggagaattcatgggagctctggggaaaacagagcctggagggctcattcgtttataaactctctcctgcaatagtacctctgctgatgttttgaggttctgaatccatgaaacaacttcctttaccttccatgaggatttcttcttaactctttttattggaaagggtccatgccttcttcaccacacatatcctagatttacttccctatctctggaactaacctggttcctgttcattacacgattggaaagtcagaaactctgtacctaacacaaaaaatcaaaagcaagaacatgtaagagtatctgacctcagcaataaaggtaattttccaccagaaggatgcctgctctgtggtcatcaggaatctacatgggacgcccctagtggcccaggggttagttaagactccatgctgccaatgcaggggctatgg

SEQ ID NO: 41647 - DNA, 1647 bp, Bovine  19866881886638
  misc_feature (1)..(1): n is a, c, g, or t
natgagttagtcttttaagtcatttcattaagatgattattaggcataaagtaaaaattttgaagattgatctgatctaattcattttcccttagacaagccccctaaatgaccttttgaagtaaacctctggaatcttcttactatggaaagtccttgccaaaggcggactgattgtcctattacttctgttggaatgatcaatgtagtcagagaggcagaggatcaatcaagctatacattccatctacagctctggggaccagcatagaattgttctctcgcaaaggctgtatttatactagcgtaataagaacttctcttcttaaaatacaatgtgagtttaatgttgatgacaagtgttgggcagcaagtacagaaccaaatttcctatgtcttgagaagtttcagctggtgtatctacagcaccagttttcctaacaggtagtaaatagctttagaggggcctgtttggtctcagggactcattccagctgacgtttctacctcaacggcccagttatgctgggcagaataaatgacacttggcagaggcaatgctcaggatgacatcaaccttttccacctggaaagaactgaaatcaccagctcatttttgatagtttcctagggagtaggttgggatttaagaaattgtaatttggaactcaatttagcaaaaaagatgcctttttcccaattacaccagatggtacatacacagcaccttcgttaccagctctttaatcatacatcccttttctaagttggcaggcctatgtggttggaatcaataaacctaattcttcttgaaacattacatagtcaatgtgctgtctgggagagaaagattaatgagtctcggttcttcctttaattctactcagcttctccctaagttacactggaggtgacagtgagaaaagcaaggatttaggaatcatcacagaacctagcacataatggggtagtggacaagacgtggttccacccctggctgtgtcatgctctgtgcaacctttgtgttgttttaccttttgggctctatttccctgactctaactgaggggttggattgagtaatcttcaaggtcctctccatctctagaaatcaatgaattgtatgctttagcacattttctactatctcctttgctttgtttgtgttcctctctgcctttccctaaaaaccgagtaggttgatgggacagctctggttaaggatgagctggggatagtgactaagactgctactactgctaagtcacttcagtcgtgtccgactccgtgcgaccccatagacagcaacccaccaggctcccctatccctgggattctccaggcaagaacactggagtggggtgccactgactaagactagctaggaaaaaacacagatgtttatttcctcccctttactcaagtcctactttcaacagaaacctccccaagacaccagatggctttgccttcttctggaagctggctctataggagccaactcattctttctcatgtcatttcccatattccttctaactctaagttgatcatctccaacttggggagtgtctctgtatgggcactggcactgctgtgttgacaaactggctctttcaaaataaagtcctaatttgtagcatttgt

SEQ ID NO: 41648 - DNA, 1415 bp, Bovine  19866880109678
  misc_feature (1)..(1): n is a, c, g, or t
natagaacagtcttatggactctgtgggagagggagagggtgggaagatttgggagaatggcaatgaaacatgtaaaatatcatgtaggaaacgagttgccagtccaggttcgatgcatgatgctggatgcttggggctggtgcactgggacggcccagagggatggtatggggagggaggagggaggagggttcgggatggggagcacaatgatacctgtggcggattcattttgatatttggcaaaactaatacaattatgtaaagtttaaaaataaaataaaattagagaaaaaaaaaagtcaatcaatattagatcatttcattatcagattgtcagaaagattggtatttcagaagaataacactgcatctggtcttatgcagctatatatgtaaatattgcattaaaatataattagatttttcctctctctagtagagacagacgacaacaaatatgtctgattaaaattaatgatgatatattgaacaagtaaaggttacataattacaactccagtttaaacagtgcctaagctacctgtcaaatatttaatgcctctttattaagacaattgctattgaattgctgctttacccactctgctccttccagtgatagtcattgttgttgttcaattgctcagtcatatccaactctttgcaaccccatggactgcagcatgtcaggcttccctgtccttctccatgtcacagagcttgctcaaactcacgtgcattgagttggtaatgtttgggagagggcttttcttctcacaaggaaaacggaagtgcagttaaaccattcagaccagttgagccatgatatgtcatacagaatcaatttacttccatctccttccatcttccatctctttcctagcttggataataattaatttgtgggtttataaaattaactcatcaactttctcacacaactttcccttaaaattgaagaatataaattgaaggaggtaaaggacagagattaatgtgaaaaaaaaaaaaaaattacagacttctcaggctccctttctaagcctcagttcagttcagttcatttcagttgctcagtcatgtctgacttgcgaccccatgaaccgcagcacgccaggcctccctgtccatcactaactcctggagtttacccaaactcatgtccattgagttggtgacgccatccaaccatctcatcctctgtcgtcctcttctcctcccaccttcaatttttccaagcatcagggtctttttcagaagagtcagctctttacatcaggtggctattggagtttcaacatcagtccttccaatgaacacccaggactgatgtcctttaggatggactggttgaatctccttgcagtccaagggactctcaagagtcttctccaacaccacagtacaaaag

SEQ ID NO: 41649 - DNA, 3172 bp, Bovine  19866880346371
  misc_feature (1)..(1): n is a, c, g, or t
ntctattttatatatgtcttgtggctcagctggtaaagaatctgcctgcaatgagggagtcctaggttcgatccctgggttgagaagatcccctggggaagggaatggctacccactccagtgttctggtctggagaatacatggactgtataatggggtcacaaagagtgagacaccactgagcgactttcactttcactttcaatgtatacatatgccagtgttactctctcagtttgccccatccactctttccccaactgtgtccacaaattcattctccatgtctgcatctctattcctgccctgaaaataggttcatcagtaccatttttctagatcccatgtatatttatattactcagccataaaaaggaacaaatttgagtcagttgaactcagatggatgaacctagattctgttatacagagtgaagtgaatcagaaagagaaaaacaaatatcgtatattaacacatatatatgtggctgatttttaagagctttcttcctgagctaagatgtttgaagcatcccaaatcagcagtgaattcattgctcctactttagaaatcaccactgggtaggagaggctgcaaggggagatacaagtcaaggagattttaccatagtttaggcaagtcaagatgacagctccttcttcttttcagtcttggaaattcccaagtgaaagacagcatggcactgataaaagggcagaatactttaagatttacttccaatttctatcacttaccatgtataatcttggggaaataatttaaattcagacagcccaagcatccttattcagttgggtagcaacattatctatctcatagttattttggagtcctgaaggagacaatatgtgtggagcactttcataatcataaagcaccattcaaatggcaattatttaagtaaggtcttttaggaatgccgaacttaatgctataaacaaaagctaaatcaaagttcttggaaaagttgggtaacagggcacaaaatattttccatattcctttacccaactgttcccccaccataaaataacttcctggatgtttattttccttcttaaatagatacttcccttctatctaattatgcagcattctacagtttcatcagctatcagcaaaatcaagctgtcctcacttgacttagagtatcatagaaatgataaactgaacagcttagaatagcacaaactggagagcataatgcaaccatctcaagtttagagtcttaaccagtctgcacagattgtacaagttaacttttaggagcttattaaaactacacacattcaatagtatcatggtttgtatttcatagcattttaagttctcattagcatgtggtcttcacatcaacagtgtaaaattgtaaattaaatttaaagaataggtttaaaattgccttcaatactgacttaaaacattaaagtgaaagttgctcagtcatttctgactctttgccaccccatggatagtccatggaattctctaggccagaatactggagtgggtagcctttcccttctccaggggaatcttcccaacccagggatcgaacccaggtctcctgcattgcaggtggaatttttaccagctgagccacaagggaagcccaagaatactggagtgggtagcctatcccttctccagtggatcttcctgtcacaggaattgaaccggggtctcgtgcattgcagtggattctttaccaactgagctaaacagggaagcctaaaaccattaaaaaatctattaatttccaagctttgaatgtgatttgtatgatttaagaataatgcattctttagttacattaatatttattctgtcatagacatttctccctaagaaaaaatgttcattaagaataacttttttttttaatgtcaaaattcactttggtgtgtgtgtgtgtgtgtgtgtgtgtgtgttcctcaggaaaaacataatgcactctctcagacaactctcaggcttcattaatgaacatgatcttctctaagctttgaagaatgtgatttctaatgatataatcagagacatacatctaaatatttaaagatctgagaggcctcatcccctccccaatcactcagaccattttctatacatcatgctcttctctgaaggaaaggttgcctaagtccagtctaagatacctcatctagtgtaagagtcatttaaacttagctaagttaatatttattcatagaacatatgagggggtaactctttgatctagttctatatctgtcatgtcaaattagttctacatctctgttctcaactacaagtcccctactccagaagccagattggtagaagatcctaggaaggaccatctatgcagcaatggaccagagtgccctggttcataaccatgccctggggacagtagagaagaactagttgcattctataataatttttaaaaattcaaattcttttttgcattccttaccaggtgttctctatagtggtttaccttagtgaggatgaatccaaagtccctagtccataataaaagtgtgttccttctttggtgttttcacaaagactgcacatgcataacgaacttacattttgagggacagatcttgacaactgaacaaatgatcatctggctaattccatattcatgtgtgactcatggctcatccagcagtgctgtcaaatctcctttatgagaagcaacagctgctttaaattaagcatcattactaaacagctcttctctaaagatgtgcagaaaaaattcctttgtcttaaaaggtagatggcttttcaggtttaaaggactaaatttagagaagtccatatttttcaataggtttattaacttgacactctatttcctttctcctctcaaaaaggctttgtgaaacagtggatagccaagaggcggccctgtattcattttggtttgctagccactaactgatatcttcagagaaggcaatggcaccccactccagtactcttgcttggaaaatcccatggatggaggaacctggtaggctgcagtctgtggagttgctaagagtcaggcactaatgagcgacttcactttcattttttactttcatgcattggagaaggaaaggcaactagtccagtattcttgccggagaatcccagggacagaggag

SEQ ID NO: 41650 - DNA, 1814 bp, Bovine  19866880615070
  misc_feature (1)..(1): n is a, c, g, or t
ngctcctctgtcctgggattctctaggcaagaatactggagtggattgccatttccttctccaggggatcttcccgacccaggaatcaaacccaggtctcctgcattgcaggaagattctttaccaactgatctaatagccttttgacttcaagagcttgcaaactccaccctcagataatgctaagagaattcattctgaaaatgcagaggcatggaactgagatacatctgtgtagaagactaatccccccccccaatcatcttttccacttaagaatatcttgcttattccataaatatccaatctcccttccctttgtggaggcaggtatgaaaactcttctccacttaaaagttgtttaattttaacttttattttacattggagtatagttgattaacaatattgtgttagtttcaggtgtacagcaaagtaattagttatacatatacatgtatctgttgtttatgaaattcttttccaatttagattgtaaaaattgttgagggtggttttaagttagaatactagcaaatgttgtacagtatatacacaactatgtaaggaattctgaggtaaaacatagtcatttttggtggctgtgtgttttaaagacttaatggaaaagttaattatgaaatatacataggattcaggcattaagtagaaaatatgtttcaggtaagcaaaatagcatggtaatgggggaaaagaagatatattgaattgagagaagagataagggtgtgttatgagttgaaacagaatgaatataaaaaagaaacagctcaagtttcagagtttgtatttgatatggtaaataattaggtgaaattaggtccttacatacaaaatgatgcaatgatataaaatgacacaaaaattgtggtgactattcaattatcagattttctgatgatctatttccttcataaataaagtactgaacttagagataatttgaaagccttcttctttgctatctatgctatttctgttatctatgtgctaacttgtttatataagttaattagtaaagtttcccataaaataaaataaaagttatggcatctaattctgtggaactctggattttcagctattgcatttttgccttcagaaaaggacaacagatcgtcaaacaacagcaataataataagttctgctaactggtttctgccaaggcttgctttatttcaaaattcttcctgattacatagagttcttcacaggatgagccatctggcaatttctccaaatgtctcattggaatgatggcagaaaataagaacagagccaattctcagagaaaacaaaggaagaatgtctagattgcaatggcagattttacatcaatgccaagaatctctgcatagatgccaggtagaatattaccactgaaatttgacttaactatcaagggatatcttactctgaacttactaattgaaatttgcaaatcaccatcatctgcaaaattaaaaaatatttcaactatatatatatttgcaaaagaattttgatataaattatgtaccattaaatttttagtaagctcattttatgaaataaaatcataggatgacaaattttaccagtcaaatgtgggtttaaaaaagcatatcattaggacaatgtaagaatagatatgaaatattggttttgttgcaaataggaaagctcctacttcgtttatagataaattatctttaaaaatttttggtaatgaaattaaaatatggctttaaaaaagaagctcaaaagagtataatgtatatttcatcctgatcacataaactccttgttaata

SEQ ID NO: 41651 - DNA, 2807 bp, Bovine  19866880629761
  misc_feature (1)..(1): n is a, c, g, or t
nctgcaaattgagggaatgaaatatgtcaatatgactatagcttttagtccaagatcccatgttcacatctgtgttaagagacacagattcagctaaaaacataccataaactcagtctcctttaaatgttatgtttttttcttatagttccattacactctttgttaactactactattttctatttgaaacgttttccaagtctgcacattttaaaaagatttttaaaaattagtttgggttgtgaaggaaggatactgaatccagaaattcttaataagattacattcaacaatttttaaagtgtatgattacagctgtgtaatgacacaaagccaaaacagcaaggcactactgctacacacacacacacacacacacacacacttatgcatactttaatagtgttattgatagtctcacaattgtaaagttgattgaaatatagagatcaactatgtttatagtataattcttttgaacaagatgtcaaagcatcactattgcctacaggacttaaagattagccccaataaaaaggtgaaatgttatataattttcatcaaataaacacagaaaggtcagatcactattttaatccaagagcacaaaagaattctaccctattctataccctaataatttgtagatttcaccatagtcagttctcatcatctcagtaagtgcatcaacttaaaaataccaaaagtggaagaacttacaatattttattcctacatatcatttattattctatataatatagtagattaaattttctgaccttggtggcatataattgtaatggaaaatgaataaactttcctttactatggtagcactgaaggtagaaaatgttaaccattaaataaaatgacctcaataaaatggtgacatgttccagataacccacttaaaggaatttctaagatactagaggaattatgttgacacatttacctgaagactgaaccctgctccccacacacacaaagttgctatatcttagggttacaggtaaaatttaccaaaaaatactacttaaaggagtgaaacaaacttactcagaagaagtaatggtgagtataaatcaaagatgaaatgacagttaagagtatcacagtatcttaatgagttgctatgaggaagatctatataagaaaatctaggatctgatacactgtgtaatgggaagacatgataccatcttaaagagaaaggcaaacgccaatctcataatcaagaaagaaagtataattagagaaactaagggtcacttgggcacctggtaaaaatatattttgaccttagattgaaccttagattggtgttttagtacttcaaggagaacaaggcaatcatggaataaagcgagataggaaggaagaaaataatgaagtaaaattatctgttttgcatgcaagttcataatgaatgagaatagtcactgaaaattacatttcagctacctgattggaatgagattaatgatgtatatttatatcatctgccaatttgaagacaaggatatttacaaaaatacaacacagaaaagttgagcaattatattttgatgtttatgattagaattgtgggttgcatattgaatttcagctgtccagcagagagagtcactttagcttgaaattgttttaataggctatttcattaaaagtctatagagaattttatattcttggctttcttttaataactagtctataattaaatatggggctttaatgatgaagaacaaagattcaagttgataaatagaacaagattatttatgtgctaaccaagtgtgtcagagcaatgaattgaaaacaatcagaattgctctgatcttatgggaataaaaacactgagttatactggcctgtagaggtacacagatcacattataattgcaattcttgattagacttgggcaatgtgtcccagtatgcttgcttatccctctatgaaatatatcaaagagttcgctttctttctttagttgtgaacaaatccatgttgatatattgaaaaccctcaacgggctttctttaaaatggaatttaatcattgaatgtgcaaatgagaattttttttttttcactaagaaaaggcaacaggaagagaatgtctggagaatttaaggaaatattttgatatttaaacttaggtaaaacaaatgtaaaatgaactatgtcttatacataattggctcattaaaaatgtatgcattgaaggaagagctgaaatacatgagaaaatatatggggaaaatatagcgtgataccatgagtatatgaaatttgacaggtaaaatgaaaataggtaaaaagttagaaagcagataaaattcacaggggaaacaagatgagttgtttcacatatgtttggtgaagaaaagaaaatgaaaaatcaatactgggtactcaagcaaagcagaacaaaatggaaatcaacatattagttggagataaatggggcatggccttaatgattggagtaaacctacccttttacctattgtgttatatttgttgttcatattcagtgaagcaacctagacagcatattaaaaagcaaagacattactttaccaacaaagtccgtctagtcaaagctatgatttttccagtagtcatgttggatgtgagagttggactataaagaaagctgagtgctcaagaattgatgcttttgaactgtggtgttggagaagactgttgagagtcccttgaactgcaaggagatccaaccaggccatcctaaaggaaatcagtcctgatattcattggaaggactgatgctgaaa

SEQ ID NO: 41652 - DNA, 1494 bp, Bovine  19866880629762
  misc_feature (1)..(1): n is a, c, g, or t
naaaatgaaaaatcatactgggtgctcagcaagcagaacaaaatggaaatcaacatattagttggagataaatggggcatggccttaatgattggagtaaacctacccttttacctattgtgttatattgttgttcatattcagtgaagcaacctagacagcatattaaaaagcaaagacattactttaccaacaaagtccgtctagtcaaagctatgatttttccagtagtcatgtatggatgtgagagttggactataaagaaagctgagtgctcaagaattgatgcttttgaactgtggtgttggagaagactgttgagagtcccttgaactgcaaggagatccaaccaggccatcctaaaggaaatcagtcctgaatattcattggaaggactgatgctgaaactgaagttgaaatactttggctacctaattcgaagaactaactcatgggaaagaacctgatgctgggaaagattgaaggcaggagaaggggacgacagaagatgagatggttgtatagcatcacttacatgatggacgagtctgagtagactctgagagttgttgatggacagggaagcctgatgtgtttcagtccacggggtcgcaaaggggggtcagacatgactgagcaactgaacagactgactgaagcaagatgtctatatttttatattcttgtgaattctctttcccagaagttaactttatagttttgtaaacattcaaataactctcatctcaatttcctttcaattgccaatccttctgcaatgccattaaatgatttgcaatttaaaatttgccattcattctctctagaattattcaattatctcagaatgacttgccaatggttgaagagcattcattctcttaattgagttccttttatcattcccttttatgtttattaaattatataaaatttcttgtgttttaaattgatagacaaggagatttacacaatacttgctctctattttaattgcaccaaatcaattttgacaacaaggttattcaaaaaaaaattttgtcaaagtaaattcccaaaacccacaggctccaatttcctttctggcctacatcttttcagtttagacagacagtttcttccttttctcttgatgtgaggaacccatgccagctccaactaattaaacactgtccctcatattctgtatgcttgtgcctacacacacacacacacaatttgttaagtaattataactttgagtttcaatatatatatatatttaacattaaactgtaatgtgatatgtcagttatatcacaaagctgaaaaattaaacattatgtttttcatttttttgtagctactgaaaaaacatgtgtgtgtatacatataatttggggctccctggtgactcagtggtaaagaatccacatgcaatgcaggagctacagggtttgacccttgggttggtaagatctcctgggggaggacatagcaacctactccactagt

SEQ ID NO: 41653 - DNA, 1553 bp, Bovine  19866880664289
  misc_feature (1)..(1): n is a, c, g, or t
ntgttgaaatataggtactcacccaattattagggtaagtttgagaatatttctgcaataaatattgaccaatatagggtacttccctgctggtccagtggttaagactttgccttccagtgcagggggtgcaagttcaatccttggttagggagctaaaatctcacataacttagggccaaaaacaaaaacataaagcaaaagcaataaagtaacaaaattcaatacaggttttaaaaaatggtccacataaaaaaaaaaaaaaaaaacttaagaaaactgagctatataatcaactcacttctcaaagaaaaatgcccagtcctccaatgtattacaatactaatataaaaataatcttagtactactctgagggccaaataatcaaatccttattaagtgaaaccctgaattaaatcagatgaatgccactaattagtaaaacctaccaggtaggaattttattaaattgaatatattttcatagatccttcaagttcataaagctttaacacttagattctatctgtaagtacagtcactccaattcactatttagaaaatcagcttggaagtttgttaaaattcccatccaatcccatccccaggaattctaatattgtaggataggatgcctgagaggggtccaggaatctgtacagtcaacaagcatctcagatcagtctggtccgtggtgttcttaaaaaacaatccacaaatgcaacagcaaagaacatggagaaggaaataaagccagaaaacttaagctaggtacaagctgcaaagtgaaatatttgctaaaggtaaatttctgagttttcccaatgtattaatgaaagaacatcatattgctactaagacaacactgattatttatccattccatataagaaatctagactcgaaagcatatagtgataaaaaaagctatttataaatagaatatcattagttaaaaacagcacattcttatccatctctctttctcttaaaagtattagttgttaaaaccaactccctacagaatctatttcaaatatcttttagtgttaagaaaaaaatagattcattcccagcttatattccaaaaatagttgtcattttagttcaaatctgaacaaaaaatataacttcctgaaaatatcatctctctgatatcttatttcacttgaaaatgtttgtcttcatttaagtaattcctggcattgctaaaaagaaaattggatttgtgcattaaaagaaaactatgatggggtatattacaaaaggaattaactgaaagatataacagccctgtattgggagctgacgttatcaactagaattgaaaaccaatcttttgaacattgctaaaaagccacttcttcttgataatacttcaaactttcttgttaagagtcagaaagaaacaaagtaatgaagatgtaataaaaagaaggtcacgggcttttcagcatctattcatttgctttacaaatttagaacaaaatagtccatttttaattaaaggattacctgattctggaatcaacacttttctatgtttcagacg

SEQ ID NO: 41654 - DNA, 1218 bp, Bovine  19866880876295
  misc_feature (1)..(1): n is a, c, g, or t
naactctctgtcttccccttcttcacctttaacctgtattctctaagttttgtaatcggataagctctccagtgttttcagacccagttactgcttctgtcttttagaactgttcacaataggcaatactgtattccttttttgcttaccttattattttttactcccttactgaattataatttccatgagtgcttaatacagtctgatatattatgtgttcccagtaaatatatttttttaaaaataacaaatgaactttaacaagaagcaaacacaccaattaaattaagactagatgttaattaggagggtaatggaattacctagaacatgtgtgcaatactgaataatttaagacttataaagttattttacatatgattttctagtttaaaatattattatatttggtgaatttccttaaagtatgctaaagccaatagaattaaatataatagattttgctataaaagtggtctgttctgtttagtgaagtgcaatttctctgacttaaaatgatggctgatggcctctgtgtacaaattcaatatttaatctaattgtataaatagaagcataccattaattcatccatgtgggatttaaattagttactctgaaatttatcccacatacatactcactttttaaactgtcactgtgaaaataaaaactaaaaaaaaaaaaaaaaaattggaagatagtagtttcaaccactatgatcttcttcaaaaactgtacatgttctttttcttttgtttcaactcataacatttagcttgatagcgtaagcctcttcatattagagaaaatataagataattataatgtaactatatggtgccagaaatgtcatttttacattagtgtaacatattttaagagttgtttttaaatatttctaaaactaccagttttcatatatttactaaataagcacaggattattaagaggtctcagtatgctataaaatgtatagttcaatttaagattcatttgattatttgcatgtgtattcagttagcataaatttttaattagactttaaatcttcaaattttcttttaaaagtttgactaacagcaagttgaaaaaaaatggatgattttgcttaataaaaaataactgtaacatacatgtagataatcaggaattataaaatcttcagatacatcttcctattttgattttggaagttaaataaatttgcataa

SEQ ID NO: 41655 - DNA, 1185 bp, Bovine  19866880896285
  misc_feature (1)..(1): n is a, c, g, or t
ngacttgaaattcaagttagatctctaaggtctattatctgtatccaggacacttaggatagaaaacaaaaggaactggtgggaaagtttcaaatgtaatatcgagacaacattcaatgcaaaggcatcagactgtggtggagagcacatagaatacttatttccacactgtgcaaagcccaaccaactgacatggagaaaaaaaaaaacagcacattcacttaagatatttcacctcccttcaatccctgtatgtcatgctctgaatttgttagctctgacaggtctcaaatgtacaactgtgccaacctcacttgtcagcatttttgaactacctgtaaccataaccctttcaaaagcccttttaataagaaactcacaactattcactgtgtttaaaaatttgctattaatcctggctaaagtaggtcttgcattgtaacattaaattttacaccccctcatgactttataattttaaacacttgacagatatttaatgaggattttgcctccctctccctgtaaagctcttctcagtaatatgtggttatcttattcaccaggtgtctgcccacgcaataaaaaggaatacaaatgatttttcattatgctagtaatttgaatcataattctgtttcccttccatttacagagcagcatggtgaaacaaaatcagtgtcctctagacaaaatatcattacaattggaacttaaaacatactctcatttttgctatgttaataaattgctttatggttaccattgcctgattcttttaaaggaattattaagtgatgggaactagttttggtgatgtcatcaataccttacctgtcactgatacagtattgtataaacactgtgcaaagatcaataaggaccaaaaagtgcacgtgcatttacaaggaacattccgcaagaagggatatgtgtatgtgtgtaactggcacaggatatttcactgcaaatactgttgagatcctagtgcaactcacttcagtcagttcagagggtagtgaattttttttataaataaagaaagccttctaagctgaatcagactgtggacctaaatggaaagatgtaaagacagctttatgttcctcagggagtctttccagctctcatcctcccgaccctgaattgttagtttggtgactatacagcattgcactagcccag

SEQ ID NO: 41656 - DNA, 1845 bp, Bovine  19866880984706
  misc_feature (1)..(1): n is a, c, g, or t
nactcacaaaaataacttctgatactacatgaagattgaagcttctgaaactgtttgtgggggcacacgtcaaaggaataagagatgattgctagcttggcctcattttaactccaagattatgtgatttgaggcataaagtttacaaagattcaaagaaattgtagagattcataatgtttgaaggaaaccctatcatcatgctcattatcaccataactagtgacagaaagactcgtatctgagagggtcataaatatttttataatttaatactttaactgttaaattaaagaagaaaagtaaagtatatgtttagggcagttagagtttatcacccttaattttcttttctttttgtgcctgttcacctctaccctaaatcccctcagcacagagcattctcacatgacaaaggtcttagatgcttgctgaatatgagtctttgtagttttgctcttgctgtaacctccacaaattgataaactcaaagcacagttcgggagaatcatgcctatgttgttggaaagcaaaaactttcccttgaacagacttcaaagggaaacttcagtacactcacagcatactaagtgatcttccttcatgcggattagtctgcagatccacttccacacaatattctgacttgtaattcagtcagaaataagagaatcaaaggcacactcctccaagtgtaagtgtgcctgactgcatccctgaataatggaggtgggaataaagtgctcacttatataaacatccaggaggataactctcctcgtgtaattaatgagagtctctgtagagcatgaatggatttgctttcatgctgatagccacagtttattagagaagaattcttagttgctctgtgatctttttttcagtgatttccatagtttcaccgtaggtttaccacaaatttccataggttaccaggggctaagatataacattctatattacttgcttttaacagacacaatatattggggataaagtcttgttgatgatgaaaatatagttttgttacttatctaaatttccaggttaatttttttcagcttccattgcaacaggagcaaaatatggaacaatatttatatcactaactgaccaaatgtagcagccatagaagtatttgcatcaaaaaaataaataaagcatgtttaaccactaacaaggcattaaaggttattacagaaaatgtgagaatatataaatgaagaatgagctttataatcatctgtagtctcagtatctagataatgactcttttggtacatttcttcatagatttcttactcatatggtttttcacatagctgcaatcttgtcaaaaattacaatagttaggtgcctacctggaggacctggagtagttgatacatggtaaaaaggactcagaaaagtaacacagagaaatgggattagcatagttactgcattttaatcaattaataagattaaatgaagaaaacattctaagtgttatgaattgattatttcagtaaatatttactgtgtctactacatcccctggtatggtactggatgtgcatgcatgctgagccgtgtccaaatccttgcaacccaatggactgtagcctgccaggctccattgtccatggaattttccaagcaaggatactggaatggattgccatttcctattccaggaggtactgggtgtatttaatatttaattgaatgttttatgattcataaaagtgttgattcttatgagcactacatctggagctttctgataacattactctttatcacataataataatacttacattgattgtactaatcctcttgtttgggaaggggttgagt

SEQ ID NO: 41657 - DNA, 1328 bp, Bovine  19866881076933
  misc_feature (1)..(1): n is a, c, g, or t
nttgacctgtccctctgattactttaagctcttagaccttggattaagaaccttagaaccactctacttttctgggcctcagtttctgctgagagagtgcatataaagatggacaatggctacactctgtataaaagtagaactctgatccatagtctgcagcacccagcccaggaaaccaacccattatctgcagtaagcagcccacagagctggtctgctatctgtaagttagattggtatgaaatcagaccagagtctctagcaaccagcccatgaaggcaaaccataactcttgtagccattggattcaaatggccaggacttgattaaaaactggcaacttcctcaatttttgtccctgtttctaaccaagcatgaaccggaaaaagccaaataatgtgtccttaaccaatcacataggatgttctgcctctagttagcctactgatggcccctcgtgtcaacaacctccagttaaggcatatctgacaagttccttgttttctcctgtaacgatttcccacttctgcaggcttttgtcgttcagttgctcagttgtgtccaactcttagagtctctgcagaaatgtgtcgtggtggctgactctctttctataacaagctctgaataaatagctttgcttgatctcttttggttggtcttcatttactccacactgcaaaattaaatgaaagagttaggacagatgattctgaattctagaaactggatgtgctaaagctatctcagaagatccgatctagctgctgctgccttcatgactggaaggggtttgtatggttcctgtgtcaccagctttggattcagaatttgaggtgagcatatcaattggaaatacccaggtgatgtcagtgaaactggacaaggcttccctctgatggaggggtgggctcagaaggcagaggatctcctaaagctacgaatgagatccagctgcagggtggctcaaagaataaaaaagtctgctgaacctttcatttctaccatgccctaggattgccccaacttcttattttcaaggactcaggtcttctccaacatagtccagtgtaactttgtctacctgtttctcttccatacagatggagaatgaatggaccatttccctgcaggactcttaagttcctgcaggacaggactgtgttaaaaaagcctactttatttcagcacagtataaaattacattattgatgaggactaaattcaaaagcaggcgaatggaatgtgtctttaaaagttaaaaaaaaaaaagaaactactgttctatgtttgaggccctcagccaattttttcataattaacag

SEQ ID NO: 41658 - DNA, 1380 bp, Bovine  19866881231387
  misc_feature (1)..(1): n is a, c, g, or t
nttgattccgcatcccctccattggaagatggatttttaatcactggaccatcggggaagtccctctggattattttctgactggtattcattgcaggttaaaaattaaaactttaaagtaacgaaggagccaactagaggcatataagttagtttgaagtttatataaggtagttgtcactatgtacagcccagaaatttatagtagtctacgttctgtcttccagtgtccttagttcctatttcatgaggttctttttgctaaaactcatttatttcatctacaaaagcaaaaatctgcacaaagtcctgtagaaaatctaaacgttttcatattatgtattttggactcattatcacttcatagagtcacatgtaatgtaaacaacatttattttatactcagcttttgtttcaaatgtttcatttttctattttgatctcagacaccatagaaaatgtctcacagcaatttaaagtctagagatcaacaaataagaaatttctatcttttgtagaaatggaaatccatgaaaagtgttttattgagttaatttcacaacataataaatatcttctgtcacaaactattttacaaatgagaaaaaaaaaacacacaaatgtgtgtaggtttttttccctctagttgagcattttcctcgcttataatttttctccttttctctttattcaatatttattttgcaggcaggttttgtctattatttatcatgatatgctaatcatattttctttaataatgtcttagagtattgatttttctctctgctttttgtgtatgtgtactcaggaaataactattccttagttttcctaagaataccttctggggaaagcagcccaggagaagattactatggcatgtcaaacaatggaagttattatggtttatcaatgcaaaactgctttttataatttcattcagattgaaatgttcttatttatattggcataattctctaattttccacatagacctaattgcaaccccagatacactttgttcaaatatcaatttttatttagcctgaggaaataaaatattcaaactctataaatcacaggagtgctagtatgccatgttttaggaagggtattggtaaatggcaattataaattcaaatctccattagaaaacttcaatatcagtttatgcatgatgcaaaatcatacgtccatcctaaataatgttgtttccttctagaacatccatttattaaaagattctattatatcccaattttagacttttttcccctaagagagtcataccataaatttttaaaacttcaatggaatagacagttttctagaaaaaaatatagagaaagagaattgtaacatcacttactcattaaa

SEQ ID NO: 41659 - DNA, 1125 bp, Bovine  19866881267977
  misc_feature (1)..(1): n is a, c, g, or t
ngggcaaaagaagcttagcatttgctttgggatttcttgagaaatatgttttgtctgtacataattctatctcaaaataatatatttatattttcacaaatgtttctcatatgtctatttttgtataaagacacacctgttttttttttaataatattactatccatcttttaaattctgttgtagtaatcataacatttgttcctttagcatttttctggaatcaatactgattttgctgcgatgcaatagtttcttgttgatttttactggaaaagttgtcctcctgtggattgaaatatcttacatctctatcttttcacttgctgctttcctttgccacttatgcttcttggcttcacagcgagtgtttcctgattcacagtttagtaaattgctgctcacaaaaatgaaactgtcaaagtaaaaaatgcttttcacgaaagaatctaaaactgtggtggaatagcagcagacaaaatggttcaacaaatactgctataatctttctttcattttaccttttactttaaaaatggtttgcagaacctcgctttccttgattcattcgtatttactcttagtacctatgtttccagttacccatttagtaaattactagaaattaactaatattagaaaatgtttattctttttctgctctttgttcccccttcatctttgtaatttgattattaataggcatagtacattttgaggagatattggtaatatataacaaatacttcagaagaaagcatatgtatatattaataatctgatttcttaaaatatgttctaagaaaataatcaagcaaatttcagcttattcattagtaagcggtttataattagctccttccacctccacctcctccatcatgaagaaaacaatccaaatgttgatgaatataaaataaagtttaactttaaaagttatggtgcatgcaaataatatgcgaatcatttgctataaatttgtgatatggatatataaatacacacatacacatatgcacaaagatgtttgatctgtagagttggtggtggtgctttagaagctaagtcatgaccaactcacagcaacctcatggactgtagcccaccaggctcctcagtccatag

SEQ ID NO: 41660 - DNA, 1848 bp, Bovine  19866880479249
  misc_feature (1)..(1): n is a, c, g, or t
nattcatggcttgaagtttctcagagcagagaacaaagttttctcaaatggatcatcttgaaagaaagcaacatttaagaggagaggttaagaggagaggtgagtgattttattttaagagcatcagtttgggaaacagttcagctttaaattgatataactttgacaaagtataagcaaagtataacactggcagcagatggtgctaccttttacctcctaccttacacctcacgggaccaatgcagaacagggtgagctttattagttacggagaccatgagctgactgtaagcttcacatcccaccacccttctttggatgcaacatcaagtggtacagatgctactctagggggcacagcagcatctgtgaacaaggacctcttctgactgtttaagggaccatgtcaggcttctgttgtggatgcaaagctctgagctgcatcattttggatcagtgagattgaggtatgattgggaagttttcaagtaaaagggggtaggtgaggcccaggtcaagcattaagttcttagaaggacatgagaaaggacagtgtgaacctggagggtttctatgaccttgactttgggggagcatgttaagaagttacaggatgggagagccaaccccctgtcaaattgctctttcctgtaatgccatgagggctctattgtttattaactggggagcgtgttgtttgtatctcaaggttttagaggaacactttgattagagaacaattattttatttaattttcaaaacagcttcattatgtagaaattattatccttattctataccatgaggaaacaaaatttggagttgttacccttacctaagcccatgtgggcagcatcaagtacaaagcctggatttaaaacaaggtttatctgactcaaaagtcccttttcccagaacttcgttgtaaagaaggtcaattttattaaacattcttctaacattgaagtgtaaactttgatcagtagagtgacttgcttcatagtccataccttaataagcagtgaggccaaagcaagaacacacaggtcttcccaaagataacattacataccattggttctttaagtcagttgtttcctgtttactcaaagaaaaaggacctcaggaatatactgcatacttcatttaagattatttgcctcctaaccttaatattcttgaaatccaaaggtttcctgagaatgaatgctgagacctatttttactgtcaaaaatttatcaacaagtttatcttttagactaatggaaaaagaaaaatcttttggccaacaataaacatccatatttgacccaaagttcagttctacaggatgctgaaggtataactttttcacatactcatcaatattttcttatattcttgaagcatagaaagggaatcattaatcttgttgggcttgtgacaatttttcttcaaatcctttagatagtgtagagtttatcaaaagattgtagttgaattagcaaaacactcatattaactgatttggcttaatactaacctttatttatgaaaatcaaaattttataaaaaatagatcaggaacctggcaaaaatttttagactttgaaatgtttacaggtttacatttttgaaatgtaagattaatacctatgggtaaaatgcttttaatcctaatgctttgaaggactttttaaaaagacttaattgagtttcaagctatgagctgtatttatacttgatatggtatcagtgcatgtgttttctttaattttcttgaatgaccagtattaccaatagaaagtcttttaaataattttttatcagaggaatgaaatcaaatatgaagaaatttcttagg

SEQ ID NO: 41661 - DNA, 1546 bp, Bovine  19866880654568
  misc_feature (1)..(1): n is a, c, g, or t
nactgaagaattgtaagggaatgagtttgcaatgttccttgaggtgctaagacttaacatccccctcttttttccctaatatatacaggacagaaatatatgtttaagatgaacaatattaatgtgttagtaaaactgctgagggcttcccaggtggctcggtggtaaataatccacctgcaacataggagatttgggttcgatccctgggtcagaaagatcccctggagaagggaatgtccacctgctctggtattcttacctgggaaatcccatggagagagaggcctggcaggccacagtccatgggatcacaaaaagagtcagacacgacttagtgactgagcatgcatgagcacacatgcattctactgaatgaggacttaacttatcctttcctctcttataaaattgtgaaagggtgcgctcttgttagaaccatgggacacctccttcatacacagctttcttctgttaatctcacttctactcttcatgattaaactgtattgaaagacttcttccatgattcaagaagattgttttttaatatttattttaatatgaaagaaggatatgctcattcatcatcagaaatgttgttaaagccacacttcttatcaaccattgatgatgaatgggaagatctttccttagtacaggagaaaatattgcacacatcttcttgagtctaaccacaaatctctcttaataaaattcagctcatctgtttgcagaatatgtcttcagtcataaaaggtatagtgacagcagaagacgtttcggagaagatcttttatctaatttttttttattgtgattgagcttataagtagataacaggcacaactgaaaccacattagtttttaacagagaaaaatttaggccgaaaatatttgttttgagtggacagcttgtcatcttgtcatataatctctgatatttattagctatcagttgagtgtataaatagttctagatattgggagaagttgcaacagaaaagaagccagcaaacaacgttcttttaggagctagagtacacatatattaaataaaagataatgctgtgtttgctgaagttactacgatatgcagcccttcatatttttaccaagtacttgctattcatggggtcctaatagtcccagagctacagctatgcacagagcagtgctcctgttgtcatggaactaatatttaacttgtcccaggggtcttccatgtgtcccttgagaatctagccagcatattttctagcatctaaaaattctttgtaggctggcaaaaaaaacatgctctttaaaaatttaatgtgctgtttctttatcttcaggaaaaaatgatgaggaacaaatttgaatcagatattgcagtccaaatattttcactagctgctggatcaccctaaaataaggctctagaacaccgatcttgaaccttggaagtattagaacttaaagaatcaattttgtgtcagaatctttgaacatatcaggaggtcagtcctgcatcgttcattcctctgatcttccattgctgtca

SEQ ID NO: 41662 - DNA, 892 bp, Bovine  19866880720827
  misc_feature (1)..(1): n is a, c, g, or t
naggagtgtacattgctgtttgatccaactgaataaatgtgcaagtaaagaaatgtaaacacacatgtatgtgtacattccatctgaaatgctctccttttctctccccacatctcacatctcactgtataagtaaccagtggtcttcaacatatgatgctcaagtcaagtctttattttctcataaagatctgagactttttttctgctaagttgagagtgatcttcccaaacaagatgtagtatatgtttattacttatagtatctacacagtatgaagaattgaataggcggttgtatgatgtagaaaaaccagtgacaaatggcaattagtcattttatatacatcaggatgtaaaattgatatgtcaaatgacattaagtatgaatatgaaaaggaaaattagtatatattgtatttaattgtagttgtaatttcattttatctattttttaatctttcttgaaattctaaaaatattctatgaggtccctttacttttttttgctctctttgcttggactgcttttttccccctatttgatggtggtgggaggcattctctaaaagttttattatattcttgggtgtctccagggtgtatgtgccctccaatgcatgattcttctgccaaaaaatgactaaatgaattgagcctggaaatgatctgctgccacatttgacacacttctctttcagataacaataaaatatactttgcaaaattccacagtatgtcatgtttaaaaacaaacaaacaaacaaaaagcttatagaataaaagagccccttataccttgagaagtatttaaaatattatttacttctctagttgccttaatcaaatattatatatgtcttgaattttcaaactctgaaatatttggaat

SEQ ID NO: 41663 - DNA, 2399 bp, Bovine  19866880787985
  misc_feature (1)..(1): n is a, c, g, or t
ntagtagatataatgtcatctgagttaaattcaccccttccgggtccaacttagttcactgattgctaaaatgtctgtgttcactctatgactatgtctgttggttccaatttctaccgatacataaaaccaattttaccagtgtgttaaatgtgtggttttaccaaaaaagtaaaaacatatgtacaggtgtataaaatagatatatgaagagtcataaagaccaggaaataagagattagatgtagttttgcctgtgcctgtgaaaatacagtggtagtagaaaatagaaaaattcaatcttgtatgcttgtatcaataataaacaaaggaagaacacatggcaaaagtaaataaaatggttaataggaagaatgagataatataagaagaactgtgtaaaatgatcaattgattgtggaaatacatttaactcttttttcattattttatatctcaagtttcctgttcaattaagtcagtaatgagactctttctcattttcttattcccttgtcttcaattaattaatgcagtgaatgaatgtgaagccaaatttaagagaaatttcttatatagaacaaataggtccaaaggaaaagtttatgagtagaatttaaaggagtaaattaaagtaataaaaatgacagccaaaattatcatattatattttgtgtaacttctttcaaaattttgggtgaatattatccacttaccgtttttaatgggcacagagtttttagttttgcaagatgtaaagagtttaaaaaaggagagtggtgatagttgcacaagaatatgactatgcttagtcctgctgagctgtgcatttagaaatgattaatatagtaaattttatgttacgtacattttaccataaaaaggagggggggaaagaatcaaaaaataacatgctgaacccagctgaagaattttttgaaatcacaaaaaggaaagtacagtctcatcatttttgcttaaaataatagaagcaaagacaaaagagtatgagtaattgaaatccaagggtttcctgacaaagattaattgaggaaatggaggggaaagaatttgatagtgcaaggtgtgtacagatgaatgcaacatcctttgtactcacagatgctggctggtatcactgtatatagtcgctgagggtgactctcatgaagttttagaaatagtcatcttcaatctttccattcgcttttatgaaagttataaatattttaaaaacagtgtctctgaatcagtttttttttttttgtcttgctgatacaacttttactgcactatttcttgatttactcttttatctctgacaacttgtagtcctcacttctaattagaagatgtccttttccatcaaaatataattggatcttcatcaaaataggttcattagagaaagagagaaagaagaaatgagaaaaggagaaagaggaaattcagacaggtagactctgagagtttagggcaatccagaaataaagagcttttaaaaaagaaaatgataggatgcacctattctgtttcaatcagagtttcttaacagctatgctattgacagttaggagcagatatatctttatgttggggctgagatatacattgatgttaatctgattttttgatttgtgatttaagacttcatctcttgacagctgaaaaataatattgatttggctgtctaagcctgcctaatattaatgcttctcactttaaatcttttaactcttttggaagccctacttggttcatcccaattacactgataccctgtttaagcagccattgtttcactcgcagaactgggtccttcatctagtgtttgtggttaggaagtatgcaccatgctctcctttttcatctctcaaggtatcaagtccatcattgggcacattttcgtagagctgtaaaaattattaaacacaaacctcaattgaaatagaatcaggaggagagaaggggacactctcagagtctacaatagcagagcccagcaggaagaagaaaactttcttcttacttaggaagagttcagtcaatgagagattgtcacaattcagccaatgaaaagcacctatattttgaactctaatttactccagtgcactcttcttccccatcacttcatggaaataaggatggggaaacagtggaaacagtcagactttattttttggggctcaaaaatcactgcagatggtgactgcagttatgaaattaaaagatgtttactccttggaaggaaagttatgaccaacctagatagcacattcaaaagcagagacattaccttgccaataaaggttcatctggtcaaggctatggtttttcctgtggtcatgtatgaatgtgagagttggactgtgaagaaggctgagcagtcccttgga

SEQ ID NO: 41664 - DNA, 1514 bp, Bovine  19866880803599
  misc_feature (1)..(1): n is a, c, g, or t
nagcctgagtgttcctgtcttttcccatgtgactaggtagttcgcatctttacctctatacagtaatgccattttctcctttaaactgttgaatgtgaaaatattgcttagttgctaagtcacatccaattcttttgtgatcccatggactgtagctagctaggctcttctgtccgtgggatttcccagggaagaatactgaagtgggttgccatttcctcctctagggaatcttctagcccagggatggaacccaggtctcttgcatctcctgcactgagccaccagagaagcccgtgaaaagcttaccacaggcaaaactatatattctaaatttctctatgtaatttctctctataagaatgtatatgttcagtatattatctatttagatttagaagtacaaatatttaaaagtataagtgaatagacagaaatatggtttgtaaagaaagttttaacaaggttttatcctatttactttttcagtgccaactactttaatactggtttactgcaaagttaattacagatgaactacaaaatatagccttcactttgctattaaaagagagttaaatgcctactttgactggatatcattgcagaagcgaattttcacctacaatgtgagttttagagtcagtttgagcactgtgtaatctattgctgttaatggactcatctacaatggcatcctctaaatcatatttaatgggatatagtctacgtttttcaacatgtggtttttttattcatagagaggctgtattatgaaaaatattatcttagagtagtagtttggttgttaggctgacacacatgtgacagtcctgaggtttcaattatccacttgcatcaatcaatctttttgttttcgacactgttgcctgcagtaatgtcacagcttttctgtcagacagaagaactttgcgggaaatgttattcattacagctgcaaatctgtcaccgtgcctggcatggcttgttaatgacaacatttatttcaaagagccatgtttcgctttgttgcaggagagttgactttgtgatcgtaaagtctaatgaaatgccaagaagatgaagtgaacaaagttttccaaaaatatgctaaagtgatccaaatctgtttttttaaaaaggagaatacatttacattcatattttcatgctcttacttgtgtttgcaaacgagtacccttagaattaggagggctgtatttgggtggctgtagaaaagttgttcttcccctgtgttgcaataacatttccggtggatacaagttaattgtccaggcttggatgaaacatagaaaatgcttagtaatgttgcatttctttctgaaaaccctttgtgaaaactgcataatgactagtagcagtgcataatgattcatgaaaactaatatattcttactaatttatgtgttatttaaaaaattgtgtgctaaaagcgatatgtgttactgagatgagcgctagaagaaaagggagggatattcctcagtttaacg

SEQ ID NO: 41665 - DNA, 1643 bp, Bovine  19866880829778
  misc_feature (1)..(1): n is a, c, g, or t
ncctatatgttcaatttcccagcccagcatggtgtttaatgaagctgtttaaagttatggtcataaaaagtcttatttttattgaaaggaaagaaatgcttttgaggaaatgctatagtagaaaagagggatagaaaattaaaatgcagtttgatcctatctatataagataatatgcccatatggaagatgtatactaatatagattccttctcatgaaggagaatcttgctctgaggattaaaatatttggggacatttttaaactatataagccaccactgcttacaaatgtaagatttatagcaattactattaaagactccatttctcccagcctcttcttccacacatacacacacacacacacatgcacaagcatatgctttgaaacccactagataactgaaattattgatggaagtgtctttaaacatgtaaactgttagaagcaaacagcataatagagaataattgctcagaaatcttgagtggttaatgttgggtagtgagatatgagtaattttgtaactgttattgttcatgttttctgtaataagtgtgtaattttagaatcagaaaaaaacaaatatttatgtattatttttttctaaatttaagcagagcacttgtgtgtcaaaacaaactgcagaatctgatatctgctctcaatttctcccttttaaaaatctcatcaatattgaaatacaaaagaactaatctttgtaatattctgcattgacaatatctaacctttctgtcctcttggaagtcatgaaagctggtcactgagttagtcatgacctgtcacagagcatgaacacacatcaccagggaaaaacatagtggcagtagggtcacaaagagtcagaaacgcctgaagtgacttagcatcacagtagacgtagcagtaacctgtgtgcatgctaaatcaattcagtcatgtctgactctttgccactctatgaaatgcagcccgtcaggttcctctgtccatgaaattttctaggcaagaaaatggagtggctgccatgctctcctccagggggatccttcccactcagggatcaaacccacatcttttgtctggcaggcaggttctttaccagcaggtacacctggtaagcccagcagtaacttactgacttacctctttgaggcactgttctcattgttttatgtacattaatgcatggaatcctcacatccctatgaggtatctagtccttttgtttcttggtgaggaaacaaactgagacacagagaaatttaaaaatctgctcaaggtcacctattaaaagggtagaactcagagttaaggccatatggaccaattccagaattcactcttaattcagtgcttaagtaaataataagtaattcaattggcatcaaaactctatgatccattttcatttgatttctaattatatctaaaacttctttctaagcatgatttctggcatatcacaagctctcattaaagaaatacagactattttaaatattattatgttactactattattatgtctcttttcattatttcacttcccaatattatttatttatttcatctgtaaagaattatcagatgtcagtctttcactctacacacctggtgaggttctttttttaatttt

SEQ ID NO: 41666 - DNA, 920 bp, Bovine  19866880877383
  misc_feature (1)..(1): n is a, c, g, or t
nttctatctataaatgtaaagataagattgcttcttggcaactaactacagggcttagaggaaaggactaatgagttgacatttgtatagacatttgaaaacatcaaacaagcatttctttgtgctgttagtagaattcagtgttattactgagctcatgtaagaacagttattaaatgaatgagaaatgaactagtggtatagagatgtataaattgttaaaataaagatgactgattaaaaaccaaaaggcagaagagatcataaggatttatataaagtcatttttgtaatattaccacatttgaattaagcacatgtaatgagttcataaaagacaggaaaaaaaatcagtgagacaaacatggaaggatgaaaactcatgcacctgttctctttcaaaaacctcacacgcataaagaaaaggataaaagatcgtataattccacacgaacaaatataacagtatgagctgactggcaaaatttgagaagctggaaagcacatctacaagtgatagctgattaagcaaactgaagaaagctgaaacttaggtgcgtagaggctgaatcagacagtcaagctgactgccaccagaaaaccccagaaggctcaagaattactccactgcagtcaaactagtcaatcctaaaggaaatcaaccctgaatattcactgggaagactgatgctgaagcttcaatactgaccacttgaagccaagagccaactcattggaaaagaccctggtgctaggaaagattgatggcagaaggggatgacagaggattatatggttagatggcatcatcgactcaatagacatgagtttgagcaaactccaggagatagtgaaggacagggaggcctggcgtgctgtgttcatgggttcgcagagtcaaacatgacttagtgattgaa

SEQ ID NO: 41667 - DNA, 1018 bp, Bovine  19866880969206
  misc_feature (1)..(1): n is a, c, g, or t
ntaaaagctgtaaaaataattccctttctacacatttcctgctaaaccctttcaaaatctctagcatacacgattcttccctccataacagtgccttttctcattttcctgcagaaggccacatagagcatttttgtctttgtttttgccagctgaatggaataaaatattaggatgcaatgattacaggggcagatcaaatgtgctttagttactggacttctgctcagaaggaaatatagattagagcaaatgtaggtaagaaaaaattttataggtgattgatatactgaaaatacaaattataccctagtaatagctgatatgtacagtaattagaagattctttctaccactaaacagagaatatttgcagactcaaatattgcctcatgacattctccagatcattgacaactctatgcctctgtacctgggccatgacatagtcatacagcagtatggattaaacctccagtccctctgaatggtatctatcttgattgaatttgaaacacataataattttattaaaaactagaaatatctaaagtattctcagctctatttcatttttttcttgaattaaaagtgaagtatatggtacatactctcttattcaaatggattacaagcattatttttttaagtatgaatatacaatattcaatatctacatattttatgttatgaattttacctattgagacttagaaaaaatgtgttattccatttctctcctaaacaggtccttactgttgcagactcagtgaatagtgaaaaaactaaaaaaatgttatttttaaatagaaaataaggtacatatgtaggaataagataaattaaaaaataatttgatcttaaaaattgtaaaatctgtgtggacaataaaaagtggactagggaaagattttttttaatgctatgaatgtaaataaactatctacaaaggaacaaataacaatgcatataaaacaataaatagtttttcatggggattgcagcaattcatatttag

SEQ ID NO: 41668 - DNA, 1572 bp, Bovine  19866881149753
  misc_feature (1)..(1): n is a, c, g, or t
ntagtaattcagtaattgattttgtaagggcagtgtatccttcagagtcgtcttgtacaaagaactagaggggaagaaaagcaaaatgacggtcaagagtccattttctaaatgtatatctcctctattctttaaattatttagcaccagcatcctcctatatttttatttcagtcattgtatcatggatttttctcaaatccaatagaaaagcagtctataatttttagcttatgccactttgttctcagtaagctattttcttcatatatatatatttcttccttctttaataattgagccttccttgaaatgaacatttgttcaaacctatttttgtaaaatatatgactcaagactttttctctccaaacattctttgttcaaagatgtcatttgtcacactatttcacctttctgccacttgggaacagaattttaataccactaacaaacaatattctttacttataatttaggataattaacacaacataacaattgaccttggttattatggccttccaagagaacaatagaaaataaagaaattcatttgcctttctttctgctgacactccgcactgtggctggttgctcctgagacaggagacatcctgcatatcactttagattcgtgaaccttgtctaataagctgctctcctgccgcaggctccagggctgtgtgctgtcccatactgctgggtcagcaccacaatcgaatccactcttctttatctcactcttgagacctgtgagctaagcctcactaaccgagagccctggataactcaggaaaccaggtgtgacagagctgcacacctgggctatgtctcttttcaaggtggtgctagtggtaaagaactcacccaccaatgcaagaggcatagaagatgagggtttgatccctgggttgggaagatcccctggaagagggcataacaacccactccagtattcttgcctgaagaatcccaagaacagaggaccctgggcagtccacggtccatacggacacaaagagtgggacatgactgaagcgacttagcacagcacagcttacccatggggcttcccagatggcgctagtagtaaagaaccacccccctgccaatgcaggagacatgagatgtgggttagatccctgggtctggaagatcccctggaggagggcatggcaactcactccaatattcttgcctagagaagcccatcgacagaggagcctggcaggctacagtccatagagctgcatagagtcagacatgactgaagcagcttagcacacatgcatgcttacccatttctgatctgtggcagaatagccttactaacacttgctgtcttgcccttgagagaatctgcttggttcttattccccacttttcacacttaattccctgaatggatgcttaagcatttacaccagttattggagactttataggacacaaagagtgtatcactgaatacctattttaaagtttcaagctctattctaacacagtcaaatcaatcaaatctcagcatataaaggccttgagatttcactgttgtgcttttctgcaata

SEQ ID NO: 41669 - DNA, 1229 bp, Bovine  19866881178689
  misc_feature (1)..(1): n is a, c, g, or t
nctgacactgtttcacaaagtcatcataagatgacactaatctctctgtaattactcagactggctctactactactaaatttcctctacttcacttactgcagaatcagcagtaggagaaactactgtctatgaaaggtataccatgcctggagagacgagcaacctattctaagaataacagactaagaaagaaactttaacacatgcatcaaacttgatggagtacaaatgtaatatacacagtttataactacacatatagagccttcatttttttgtgagctagtttttaagaacaatatgatggaagaatgagaccttttcattggctcaaccatgcaaattagcattatttttaggttcaaagactaaagcaaactatacaatgaaagaaatccagaggcaaccaattaatttccaggaagagatgagtcagtgacattggtattcaaaatggcaatagctggactctttcagatatttatagctgtgtttggataatgtggtacttttgctcctttctctcagtaatgttcatttagggaagggagggactcagctttgaaatgtgtttgaactctgaaaattgctgcctcattaacccttcacagcaaataggatggtttgtactgattatatttattttctcaacagatcagtgctatggcacttaatcccactgagagctcagtcatcagaattcttagaatttgcttcaatatttcaaatattctccaaattgaacctcttattttctctttttgcctagatgatgctggatcaaaaatccatctgacgcagcaggtagacatggcagcccaggttgcctctggaatggcctatttggaatcccagaactatattcatagagatttggctgccagaaatgtccttgttggggaacataatatctacaaagtggcagattttggacttgccagagtttttaaggtggatttggctttgttttaattagttggtgatgagtcaaaaggcgcacaggccaggagactagtagtattcctgctggttttcttccacaatatttctgagagtcctgtggtccatagatcctgtcaggataccaaggccctacagacaaaactaccttctatttctgtttcttcatcaatttgaaagaaacagagaaaacaatgaccaaccacatgggaaagtatgtaattaagtttgtggttgaattaatgatcagttattttcatatcagt

SEQ ID NO: 41670 - DNA, 855 bp, Bovine  19866881242870
  misc_feature (1)..(1): n is a, c, g, or t
natatctgtatccccaaatgatctttaccctcttggtgcagtcatcaaagctctgatagggaggagttagaattagtatctgagccatcagagattctgagatgtctcaaagaagaaaaaggaggggaaacgtgttaactttttgtgttatgttaatgagatccttcatccctgtcaccttaaaagaagcctaagacacatttctctctctgattcctttttcttctccctctcctcctccttcaccaacctcccccatatctaaaaatgaaggttaatattaagcatcacattaatagttgtcaaatcaatcatgatttcctctgagttatgttacacagagcaacatgctttatcagaaatcaaagaaaggacagtgccaaaagtggatgagctaatgtaaaatcacttacagggcactctggagacagaaactcgtttaatatttaatatagtcattaacctaagaaagagaaggagatggtaatggatggtctactccttttgcctacaggacagggtactgaagtgagctgtcccttctgggatcacagtcacacaagtctaaaatctataaagtgggtcacaggtgaagggaactggaaaagtctcaagtctcccagatgtattgtttaagagcacagtcctgctcggcagtcatgcctgaagttggccacactggaggaaccaggaatcgtgtcaactgaattgctcaattagtttgttatggcaacagacatacggttcccaatacacacagtcaaaccacagcaagtaatcaattattgaaggaaaccatctccaagaagcattaatccattgggatatgaaaggttgtttctgtctctatttaga

SEQ ID NO: 41671 - DNA, 1173 bp, Bovine  19866881467377
  misc_feature (1)..(1): n is a, c, g, or t
ntaataatttattttaataagtcatgtcagaacaagaatattctaatgttaattgacaaaaattgacactttcattgttttattaagttgaacttgcaattgccatgtatgttcataaaaagctacttaaactttttttttaaacaaatatcatcaaaaagcaatattttaaaacctccactaggttggagcatggtattttgctcaatttggaaaaaatatggtacctacagttttgaagattagcaaaatctctctcctaacaaacatggctctgaaaacctccaacatgggaaaatgtccaaaatgtcatttttctaatcttttccaatactgtttgcttcctagatgaagccaagtgattggggacaggattgaatagatgattttgattaaatattcttatatagcttttgaaacttaaattacgtgaaaatatagtactgattcaaaaggacaaattaaaatttcagagaaatgaaagcactgtctctatttcagttgttggttgttttcatagttgttcctttattatgtgaagaagctactatactatcacttcaaattaacagaaataattaaacgtcagctggaatactctaggaacatttctctgtatgtgggcatagggaaccacaaaattcttagtaccgtgtcagttggataaaagatgactgttttcccttcttcctgaggaggacaaatactaacacaaatcacaaatccttagactcagccaatactattggaaggaaatgaactatcttttagttcaaaggatagtaaagtctgagtctctttactgttaattccagatttatttctttacattaatcaagcccattaactaccctcttgcttgtatgttttgagtctctactatatgaactcagaacacaacatcatttgcatattagaagacccttcctttagtgcatagcgatgccagatcaagactgaactgacaaacattagcaaggtgtctgaatttgagtttaatatcagacaacaatagaatgatgggtactaaagtaatgctttttctgctgctgctgctaagtcgcttcagtcgtgtccgactctgtgcgaccccatagacggcagccccctaggctcccctgtccctgggattctccaggcaagaacacggaggggtgccatttccttctccaa

SEQ ID NO: 41672 - DNA, 995 bp, Bovine  19866881638941
  misc_feature (1)..(1): n is a, c, g, or t
natattattatgatgatgactatactatgtgcatgtatgtgtttgtgtgttgtgtgtgaatatgtatctccaagtatgtataagaattatgtatttatattgcatatatttttaaagcaaaactaaaagttaaagtaaaatttaatattaatgtttcaatatctgctatattgtcaacaatttcctgtgttattgtattgaatagacaattctgagagaggaggaaatcaatctttctttgtatttatgacagacaacaaataataacttttcattgaatttttaaactaaccttgttagggccaatcagtcttgctcagttcatttcaaagggaaaaggtctataaagaaaacaaaaagttataatgagtaaataaatttatatctttgcccacaaagaaataaagacttattttctccaattttatactctttactaaatttctgatatgctgttttaagaaaactgctactaacagctaaaagattctattttgataaaaatagagccataactgtaaatgaatatttcaaagaaataatttcatgatttgctaaatggggacccctttcttcctttatcttattaagcatgagaaccagtgagttggaactggggcaaagttttaattattgtgtgtatatttagaactaagtatgaatccatgtatatttcacagcacttgaattcacagctccacgtgttttactcagctataaatgaatgagttttactcagtatgtccaataaaactcgtgtaaaattctatttctaaacagatttgataagatttttatttttataatttcactgtatagctgagaaagcagatccaaagaaacaagtaacttgacctagtaatctaagaagttagcaagatttggggtctcagaactcatcacctgacatagtgcttagtcactgagtcaccatgttccctgaggttcatatttcctggcttcagatcagatcagtcgctcagtcgtgtctgact

SEQ ID NO: 41673 - DNA, 2592 bp, Bovine  19866881709511
  misc_feature (1)..(1): n is a, c, g, or t
ncgagatagtgatcatttactatttttcatcaaacttttgttctaaagtgtttttgtattctaactatattgtgttttgttagaaatgaaggaaagaatatatataataatggcagtcaagatttccaagaaaaagacagtcttagaaaaaaaaattaatgaaattgctcagtgatgctctcaaaatagcagtcatatcatcaaaaacgcagtctaacaatatctgttgataaatgtattgacttcaagaaggttcatatcatctttaaagttcaagtgtgtgaaatactaataaatatgtgaggttttgttctatgagcatctatgtctacattttttaagtagatgtaggagatgatacattgtaactagagaataatacaaaaagtaatttatgtagagtgtccatgtttatatatcccatatacttaagaaaaaactaaaaactatctcatcccatctttctcctttgttgtaggtaaataaatagcaataatgaattatagatttttataacacttttattccaaagatataacaaagggacctgtgccttgaatgtggtaaagaatcacaaaatgaaagtacaagtgaggaaacttctagaaaataggattgccagataaaatggaagaggcccagttaaatctgaatttcagataaacaacaaattgtttttcaatataagtatgttcaaagtattatatgggactttcatactaaaaaatatattcatataaaatttaaatttaactgggagtatagttttttgtttttgtttcgaaattggacagtgctactaaatatattaatgggtaccacattgttgtattcagagggccaccaagtcattgccacatttatcatttgcacaggaccctgtactgcgtcatgctatgtgtctgaacacagagtttttatccccactatcatttgaaaatcaagctcatttccctttgagcatagtttgaagtcaactcctaccaccacatttgctgttgtatgattagatccagttccttaagatttctcttctttaataaaattaattaaatttaatcaatttttattgcaatgtagttgatttaccttaatgtttcttttcttcagtctttctacttgtgaaaattaggatattgatatacacctcataagtgtagtgaaataattgaaatattgtccatgacttgtgcagtgcaatacttgacaaatagtaatagatttagtaaagcaaagaatctgcctgcaatgcaggagacatgggttcaatccctgggtcaagaagatcccctggagaagagaatggcaactcactccagtattcttgcctggagaattccatggacaggggagcctggtgagttacagtccatggggctgcaaagagtcatacatgacagcgactaatacacacacacagggattaatagagaggactctggaattgaatatcctggatccaaagtttgccacttcctaatcatgtggctttggagaaggcaatggcatcccactccagtactcttgcctggaaaatcccatggatggaggagcctggtaggctgcaatccatgatgtcgctaagagttggacacgactgagcgacttcactttcactttccactttcatgcattggagaaggaaatggcaacctactccagtgttcttgcctggagaaccccagggatgggagagcctggtgggcagccatctatggggtcgcacagagtcggacacgactgaagcgacttagcagcagcagcagcagcagtcatgtggccttaagcaacttactacctactgttgcttcaagttcttcatttaagccttaaggataatgatgatgtttttcataccgttgttgtagagtttaaagaactgctgctgcacataaagtctggactctgggcttcatgataattttataatgatggattcaaacaattaatattttaaggatgtaaataagcacttgctaataaatgtacaatttgcaacctaacattaccaaattcaagtatgttgcatccacatttgaaactattgcatcaaaattttgccttttacattgaattttgtgttaaaaatcacctcctaaattttaatctctgtcactattaggataaaaatgcatatctaaccaataggtatgtttactagaacagctgaaataaaaatttagcaagactatatattctctcacctggcttgaagttaacaacccagtatctatttataaactgtcagagctttctaaaaaattgttccaatttcttccacaaatttaatatcaaacctggagcatatggactgattgaaagatgacttgattgaaagatgtttctactgaaagaaataaaatgctaaactgatgaaattactggaaccctgtgaacccagcgttcacatttttacctgtatctagtggtactgagaaggcaatggcaccccactccagtactcttgcctggaaaatctcatggacagaggagcctggtaaggtgaagtccatggggtcacgaagagttggacatgactgagcgacttcactttcacttttcactttcatgcattagagaaggaaatggcaa

SEQ ID NO: 41674 - DNA, 1452 bp, Bovine  19866881711572
  misc_feature (1)..(1): n is a, c, g, or t
nctttttctataatgtgaaatttgattttggaagatgatttaaagatgagaaaatgctctcagtattgttaagtacagaatacaaaactatacatagatgataaaacacacacacacacagaaataaaagtaagtaaaccaaaatattagctgtgattattacctggcttaagaaatttattccagaatcctccttcacaggtttattgaaaaaaatattgtatacaattcaccatttttaatgtatagttctaggagttttgatgaaggcagagagttctatgaattttttttctggacatgtgcccacaacaatcaagtaaaaaacacttccatgatcctgaaaagcttctaaatgttccattacagtcattcctcccagttcccaatacataacccatggcatccactgatttcttttggttttgccttactctgaaatatcatattctgaaatcataaaatatgtagtttatgaatttggcttctttcagttagcataatgcttttgatatacatctatattgttacatgtaccagtcttcatttttttccagttctatagtatatggaaaatctcctgctctattcctaatccctttgttgagtactcattagaggtttgtggataggagtcagagagtggatgcaaactcctctcatatctgagctcccgtgggttctgtatttttacataatttggcttttataagcctgttaacattttaaatgattctttgtgtgatctacttctgtgatgccttgtgtcttgtactcctgcactctgccacaagtgagccagtgctcacatcctgctgttctttcctgaggtatcaagccacttagtttctctggtcttcagttctctgaagggttgaaaaaaggactctctgttagattttaagtaccaagaaggaaaggctagaatcttggagcatgtgaaatgcttactttttgttacataaaccagtgagcaagtagataaatgaatgacttttgcttgagcaattccatgtaaatttcattacttctttactgactattagctagcttttgggaaaactattagaaacttctctgagcatttatgctccaatagattggtttctggacccatagacatactggagagaggcttcatccagcccctactgaggaaattataatctgagtacagtataccaaggtaactggtagaaacaatgaaaaattcaatcaacaggttaatttgaataattgatgtcagatagccagttggtttgatttttacccctcactgaattgacttataattgacagtttgttttctgactgtgtagctgtctttatgcctattgacacataagattctcattcacagtaagcaaagatctcccctgagaaccagattttgactactctattactctgattatagtttctacatttttttttaatatggcacaatttaat

SEQ ID NO: 41675 - DNA, 1114 bp, Bovine  19866882071211
  misc_feature (1)..(1): n is a, c, g, or t
nttactttgaaatacaaacataatcagatcattaaaatacgggaggaagagagtcttagaacatgcaaaataatggttcttaagcttttatgaaagtttgatgaaagctgtaaatctcccccttagaaaaatatagatatgcacatttttacatccaaggttaaaaacaaaaacaaaaaatgctcattcatggaaaaactcctcaaaacccctgcttgaagggtacaaataaccatgtgccaagactggaggttacaaactcaactgctgaggagattagcatacaacagagcgaagtgggctgacaggactatggtgtgagaccatgaggcttggggagaaccagaccagaggctcagctcctcagcacctgccaggtggcaaggctgcttcattgctactgccagagcttccaacttttcaagacaaaaaccaagtttaaatttctgtgtaaaatttctcaatgcctaagtttcagcaactaattcatatttgtttaaaattctgtgcagatttaaaaaaaaggaagaaaacaagcaaacaaaaattaaaaggacatcacagctgtggcggaaaagcaaatgcctgaagcatatacattctgtatcatttaaaatgagacatgtattgttcagataagttctcagtagaaaaacaggcattttctcacagaaagttaactacttcacatgttcttgccacttcacctttccagagtgaaaactataggaatagcagaagataaggaccagatttccctaaggaagcagctttagatctgcttaaacctatgaaaacctacatcatgaaagccacagttttccagaaggcagaaatttttgtcctaaaaattcctgagggtaggagctacaaatcagtggtttcaatctttaaaggccttagtatggccaccgcagcacattcagtcttgaacagactttatgctgattggtcaaccaagatcagctagctgctaaatgtcctcccagatgactctgtgaattgatccatgaaatggagttatttggaattgtccatgcaagtgatcaacagcatctgcatggaacagtcatcttggctctatcactaaagacaatactaaagatttcagtct

SEQ ID NO: 41676 - DNA, 3011 bp, Bovine  19866880385831
  misc_feature (1)..(1): n is a, c, g, or t
naccagggtgtctactgacatgcaatcatgttaggtccttccccagactgtgattaagagtgtctgcagcagggctcaggtaactgcatttttagcaggctccccatgtgggtctcatgcaggaattcacagactcctatgagaaactccagggaggaaaccggcagggagaagtaccctggtagccagtcctgctctcgatcaagggctctgatgaggggagagggcacaggctgagtgaactccttgtgggatggccctctagcccttcctcccccctcaacttctgaaacagctgtccccctccacctcctccacaagccacatgctaaactaggaggaaagggtagctgtatgtggagatgaatgtggcatttggatcagattccaagcttctcttgtagctcagttggtaaagaatctgcctgcaatgcaggagacctgggttggattcctgggttgggaagactccctggagaaagaaaaggcaacccactccagtattcctgcctcgagaatcccatgaacagaggagcctgggaggctacagtccatggggtcccaagagtcggacacgactgagcaattaaaccaccaccaccaagtctttaaagaacccctgcagaggcaggcctagggacacaggcccatccattcctccccgtgaggggcaccataccttgaccttcttctctggagatgaatcctgacagcactgtgtggagaaaaagcagaggaagtcactgtcctcaggtgggcatgcccacagagagctctacctctgcaaaggtaactatccccgtcctccatggaacagagaccaggcggagggggcagggtcacactcaccctcggggctgaggcagaagtcggtggaggctgagccgtgctcgttgtggatggtgcatcgatacacgccacagtccacgggggacgcctgcacgatggccagggctgcgggcccctcatccccggcactgcagagaggagaccctccccctgaggccatcaccatggcacagcccaggccagactgtgtcctgagggtcctcagaccccactgtcagaggcttctgtgggcacaggctccaggagctctgggcagagccaggcctgcatcacacaggccaggttttcgatcctgactctggctgtgggactctgggcaaatgacttagtatctctgagcctcaatgttctcctttttacggtgggagtactagagtctcccttacagggttactatgaggattaactgaaggtggatccaaagttgggacaatgcccccacgtgatcactgctgccatgtcttagggggccaggtgggggtggcacccagctggcttacctcctgcccacctcgcccactgggcgctgatccttggcccacgtcaggaccgagtcactgagaatgttgaagaattggcaccagagcttcaggctgcccgaggcgtcaggaaactgctccacccgaatcttccgaatcacctgtggggctgggagcaagggcacagtggaaaggagtaagccctctccctgccgtcctacgccctctctggccttgcccccgcttccctgggtgtcattggtgcacaggctgagagaaaacaggattcaagtctcctcacacacccatcacttcacccacccccgccacatctgtgtctctgaggcctttgctctgacttcagagcacacagctttgctagaaaaaacccggccgtgcgcccccactccaggccaggcagagcctcacagctgaggccaaagacagcagtcaagagaggacattcagcttgtagcctgggctcctaaccctaggaccctgcatttgagtcctgtctgtaccactctgtactcgtgggacgagtctgcaaagaggggatgatggtggtgacaacgaatgatgatgatgctagagctaggatgctattgaagccaggccccaggccgagcccttgatttattctatcccatttaacctcataatgttatgaagttggtcctattatcagctccaagccacagagccagggcaaaaactaagcctttctgattctacagcctgtgggattattacatgggaatacctttacagaggtgcaccaggtctccagcaggcaggtgacccagcagcatcctctcctgggaggccatatctagtactcacctttcagcaggtctttggccttcctggacttggccagagcatcctgattgccttcctccagggccagctcagcatctagactgccagctttggggctgggggctgggtctcctgctgccaactcctcctctgcccgcggcacctccagcatgcctgcctttctgccttgagtcggggagcgtctctcgcgcccaggagtccctggggacccaggtgcaagggccttcctgggccccctgggggagactgaggggctctctctttcttcaggcttggtgccctctccatctcccacagcttttacctttgggagaaatctcttcctccgggccccaagagccagctcctcgggcgtcgccgcggggagcgcctcccccggggcctcctcctctggggagggctcctgggctctgctctcggttgacagcaggccctgcccaggggctgcctgcccaccaccctcctccctaagcagcccacccatgctgctttcccgagagacctccaggaggccaggcccctcaaggggaagctgtccctcaccctcactggatcctcctgaggccagcccagggccctccgcctcaccaaccacgatagcggggaccgagagggggctggggcctgggcgccgggcagcagccaaggcctgccggccagcctccacctcgcggtccaggaggccggtgagacggcgggaggtgccggggctcagcaggagggtctgtgcgctctgcaccaagtggttgttctccacgcgctccaggatgcgccgcgaggttcgcggactcagtccagccacttctatggtgggggccagggtgggcaggggcgccggaa

SEQ ID NO: 41677 - DNA, 3218 bp, Bovine  19866880386510
  misc_feature (1)..(1): n is a, c, g, or t
ncgccccagacagtaggccttccacagacattggttgaattggagaattgtgtgaactaggctgttagaagtggaaaatccagccagtcctagtaaaggagaaatagaagccagttttaactagagtgaaggctgtagaatttagacttgagtttttgcaagtgtctggtattcctctttcagcgcttttgtacccaggaaataatccgtctttgctctggtgagcccagatttccccgtgaagacttaaggattagtgcagccgggtgggcagtacacagaggtgaccggtaacagcgcggccaacgctgacctctgaccaggggttactgccgtcagctctcaggctgactcgccgtttgtccttctctagtatttgctgtgtcattttctttccctccacctagttttctctaatttttcaccaccttctccttcttcccagtgttttctccctccttttccccgccagcccaccatcctccataaaattggtgacatgaatcatcctaggccatcaaaatttgctggtttcttagtgtttcctagctctggagtaaaatttgttgtctgctgttaatatatagagtggattaatccaactcttatatttccctaaaagaaagtgaagtcttctttttgtgtgacctgagtgaccactctccctgcaccgcccccccccaccccaagttagggtcattgacccttgaattatagattatataaagtactgaaagtttccctgtaaaagcatagttgagaaaatgggacccaactttctgttcctgaagtaagtgactagaattttatcttgagctcatgggctctgagttctctaatcccttgtgttcttatgccttttggtatatagaatctcattatcttgctaagcctagctataaagataactgctttttaaattttcttgaatgcctattatatacataaaatattttgtattatacacttttttttttagtgcttaatgtcattaccaccataactgtaaaagcgtgatgtgatgaaggtcacagctctgtcagctcagacctacccttggccggccttgactgtctccttgctgaagtgagtgttcggtcccttctggcacaaacgttccctgtcaagtgtcttgtgatgctggtgaccccttggactgcttgcctgtttggattgggttcttccgtaggggatggttcgggatgtgaggccatggggtgaggcagtcatctcagaattacctaaaatgccttaaaggacagagtatttttaaaaattaaaaagaaatcagagaacagagggagaagttgactggcacatgggtgagcccttgggtgtgtccaccgttggtggctcccgcctggtttctccgtgcacaggggtcggtggtaggaggcctcggactctgaggttctggagtgcaagctcttcgtccgagttgcacctggctttcctcgatgcctcctgtattgtaggcactttgctggatgccttgcggaccttatctctcttcagccctctgaggtggctggtgtcatttcctttctgcagataaggtgccagaggttagaaactcaccctgggcaaacagttaagcagggatgcaaatccgttgttcctggtgcttatctcctggctggttgctctgataaccaaccacctgtcccagtgttacatccaccattctctggcctcccactcagctatgagcatcgtgggtccacctgggctttaagcaggcatcctgaatctgttattaaaatttcaagtcttgatttactgtggagatccagtcctagcttaggttctcatgtctgtggatgttgcagctgtatttggccctgtcccaggtaatgcctctaatctcccctcttaactctctataatcagtcggcaggcatcccttggggctgctttctcctccctttcctgctcaggctgcaggtagccttccttagctaggacctccgtaggagccagcctggagggcaacccctcaccccttcttctgcccccagttccacacatacatgtcctgtcttgagccctcggttgcacttgcactctcctctgctcttgccacctctcctatagctctcgtgggctcagatttctctcccaagcctgctgcttgatgataggcctctggagggcaggggctatgcactggtttcagtacagttcccaaagcgtttggtgcactgagtaggtgtttggataaatacacccatctctaaggctgaaagggcttttatttctattccatggatctatctcacctgtttaaatttaacagaaattattggggtgtgttatgctttaacaaaaagccaaaataccctgaagccagtgattaatctgcagggtgatcagtaaagcttttgcctctcatgttggccgtgtcagggttgagcaaacgtgcctgggtcccgtccctctgctctgcttctgttctgctctataagatgagtgctggactatcttgggagagagctgttttgacaagtcttgtgctggagtttctttgctacaggcctcatccgcgtagacggaaaggcaagctcagctttccccacactttctggatgggctcaaagaacaccaggacttccctggtggctaagacagtaaagagtctgcctgcaatgcaggagacccgggttcagtctctgggtcgggaagatcccttggagaagggcatggcaacccactccagtattcttgcctggagaaccccatggacagagcgggaacggtccgcttttattctgtgtgggttgaaaattcaccttcagttaagatggtgctcgttgcctgtcagcatgcatctccctttcgtgtcctgcacgtcagtgcagcactgcttcagccttgtcctttgctcctgggacgagcgaagggctggaggcccatggacggtttccacacggtcttcacatgtttgaggtttatagcggctcccaagtgaggtgtgttggaaagaagagaagtggaggagccacaggtgtgtgtttttaaagccagcaccatgaggtaccagctgtgtgatatttagcaagttctgacccacattttctcaagcataaaatgagactagaatacctggattttggtgaagatcatttaaaatagtctgtgtgcatatgttttgttaattccaaagcaccagtacatgtaaggatgatctttttctttcaggtacctttttcaaggacaaa

SEQ ID NO: 41678 - DNA, 1625 bp, Bovine  19866880603994
  misc_feature (1)..(1): n is a, c, g, or t
ntgggatgtagcaaaaagaaaaaaaaaaaaaacaactcacaagtcagatcatgccactccttactgaggtccactgcttaccctggcttgtccacctgccctcctcctcccctcatctctctccctcttccatagcacagtctggaacacagtgtgtgctggaattatttattgaatgagtaaatgaatggctctgagcttccccatgtgctctttctttctggcaaccccctcatctttattggaagttcaggcttggagttaaatctgcttctggtcttttgcatgaacagaggcaattctttgaacctctctgatcttctgctctcctggaacatggggatgaccacttccttcccagaagtgtggaagtgatgagtgtcaggtgcttagctgagtgcctgtacgtgggaggcactggacgcaggggagcattatcaggtcagaaggaaggtctgggggtcctttgacagagcttggcttttgccaaggttctgagaacttcagccaagtacagatgctggtccttacccctccctgctgtctcttcccctggggtcccccagtcatcactgtgacccactcactcccaggggtgaggacatctctactgccccccgtgctagcctggccagctctgcttgtctgacgtctttcccttttgcagaccgaggctcctctactcatccgaccctacttggcagacatgacactctctgaaatccacgttgtcatgaccggaggctacgccaccattgccggcagcctgctgggtgcttatatctcctttggggtacgtacagcccccttctgcttgctgaaaaccaagaacctgaaacctacctttgtgggagccccacacagctcctggccagatcgttctggggtcttctctcatgggctgcatcctgaaccagggctcctgtgatggtgggggtagaggcttcacctgagtaaggcgggccaggtgggctgggccatttgggctcctcacgtggccaaagcatcccagtgttctgtttactgagcaccaactgcatgctaggcaaagtgcgaggtgtttagtatcccgattttacagatgaggaaattgagactcggagaataagtgaggtgtccaaggccagaatttgagcccagatctgtctgactccaaaacacagacacactgtcctccacctaggccatccctggagatttgtcctacttttcttccacccctgcctcctctccaccacattctctcttggcacatgtccttcctctactcctaaattattacttgtgcagctttctgagcataatgcatttctaggtcaaattccaatggtatgaatctggcctttaaacccatcccaacactactgcatggcaacctgagatgaatcttgtgtgtcccaacaaagtgcctggtaataatgtgtcatgtgtgcgtgcgcgtgctgagccacttcagttgcgtctggctctttgtgactgtagcccaccaggctcctctgtccatgggatttcccaggcaagaatactggagtgggttgccatttccttctcaaggattgtatttggataaaacactatacttgtctttgcttttacatgcaagtctttaaaaatctcattttccc

SEQ ID NO: 41679 - DNA, 1216 bp, Bovine  19866880625360
  misc_feature (1)..(1): n is a, c, g, or t
natgtgctcatttgctaacatggagtactactttaggttaatgagatagatttcaggtcacagctcttttttcctttgcatcctttttgtactgtctggattttggagtgaccatgtattactttagattcaaagaaactataaaagcgttttctttttggaggaaaaaaaggaaaacttaagatttgaacgtggtaaagttagcctttcttcatacttcccttgaaaattatcccaagcaactagggagggggttgaaaaaaatcctggaaatgaaaactctgtctttggagaaattaggagatgtctgcaaccccaaaccagaaaacaagtggaaaaagttcttgaaagattggaccagggatagagaggaagtagaaaacactcgtagctgcagacctctggaaaagaaaactcaactagcaaatagcactttccaaggtgagggatacaccctggggtttagaaccaaaacgtctggtttgaaagagtggaagcgaccgcacaggctggtggcgggagctttaccggatccagtttgattccaggacgcagaggagggtgcactgaacgaggacttacacaagtagtgtttgtgggggcaggagggacaggactctgctgtgaacagcgcccacaaccacctgggtgggggacgagaagctcaagaatatctccccccaccctgagtgcccacgtacaccagaaaaggaaagagtacttccacccccctggacgtggctctggctcctctcccaagtgaaccttcttcaaatagctaaaccaagatagataaaaaaaatggaccaggtcaggatcttaccaaacataattatttttttttaatgatgaagaaacatgaaaataaagagctgacgatgaacagtactcactagagaaacactggcacagaacaagtgaaaatttgaccaaatattttacaagttaaagaaaaaagtcagctcactgctgtgaagagttggagcacaaatcagaaatacaggaactttgggaagaggtggcaggtcggcaggcaaagaaatctaaattcaggaatgtgaagctaaaaatgaaagccatctaagaagtgaaggcagagttagcagtgacataagacaatgtatagaaaatagtgaagtaaataagtgaagtgaaaatagtttataaatctgatagttagaatgaaaagtacagaaattgctaaggaggaaaaaaa

SEQ ID NO: 41680 - DNA, 2710 bp, Bovine  19866880879337
  misc_feature (1)..(1): n is a, c, g, or t
nctaatgcgtagaattgactcatttgaaaagaccctgatgctgggaaagattgaaagcggaaggagaaggggacgacagaggatgggatggttggatggcatcactgactcaatggacatgagtttgagtaagctccaggagttggtgatgaacagggaggcctggcatgctgcagtccatggggtcgcaaagagtcagacaccatttgagcgactgaactgaactgaactaaagtcaccttcagcatcggtccttccaatgaatattcagggttgatttcctttaagattgactggtttgataataaataattatcattgttaggatgtacttccacgtggaggcctgaaaagctcctccttcttccagaccttgtttaagtgtcatctgctctgtgaagcctgcttagacctccccggggcagaattaacatgccttcattagttccactgccgtattttatatgtccttttatctatcctttggtacactgaacttcaatcatgcccagttatctgaatcaaacgtatggtttcaaggcctgatataatccagaaaaagaatagtcactgtgggagaaattcttgcttttttaaagaagagattgttaacccacgtgagtctgtaactaggaaagttgaactgaacgggtggaggaatacttttggggtagagtacttcctgggctgggcctgccctattccagatttgtcaacatccttccttccaactccttccagctgctaactagactgcccagagaaaaatgcaccataccagccttacctctcaccctggaggccccagctgtgcccagcttctttcagttccacaaaaggatgccaggcctcccctacctctgctgtttctgcctcgagcattttcgagccctctcttctcccttttcctagctgttctttaggcaatctttgtcccctcctccaccccaaaggctttctcttatctctccaagatggctcaaattatttctaccaagtaaagatcccttggagtcagaaatggcaacccactccagcattcatgcctgcagaatcccatggacagaggagcctggtgggctacagtccataggggtgcaaaagagacacaactgagccattgagagagagaggaaagcagccactcagaccttcatatttcccctatcacaacatttactacattttattaatatgttaattgtttgcctggcttttctgcacagttgtaggtttcacaagctaggaaatatgcctgtaaaagtagccctgggcacaaccgacccatagttgatgtttagtaactgttgttaagagtaaaaagaaagaaacgaacaagtgaacagaaggaatgaacatctggcagctggcgcctgcatgcattccctgcctcgttagcttcccaagggattctgtgcagcttggggctaagcaaacaacaaacaaacactaaagccatctctcggggatagaaagagagctgtatgtgtgtaagtcactctgtcgtgtccaactcttggcaaccccatgaactgtagcctgccaggctccccgtccatggaattctccaggccagaatactggagtgggtagccattcccttctccaggggatctttccaactcaagggtggaacccaggtctcccgctttgcaggcggattctttattgtctgagccaccggggaagccaccaggaaagctgaacctaaaacatttaaaatttcaaactggagagtctcagaatatgaattttcacccacttccttcgtaattcagacctacctaatttaacatgttttcaaggaaagaaagaaaagaaaggaagaaaagaaaaatatatagacaaaatacttcaatgtcataatgctgagtatgattttctctaagccagggctaaggatacaaggtccacggagcacctgaaacggggtcagtctaaactgagatatactgcaagtaaaaaatacgtgctagatctggaagactcaggatgaaaaaaagaaatgtaagctattggttctcttcgttataagttgaaatgataacacttttaatatattgaattaaataaaatgcattaattttaatttcacttatttctttttactttttaagatggctcagtcgtgcccaactttttgaaaccctttggactgtagtccaccaggctcctttgtccaatggatttttcaggcaagaatactggagtgggttgccatgctcttctccagacccagggatcgaacccgcatgtcctgtatctcctgcattgcaggcggattctttatcagctgagccatcggggaagacccaagatggctaccagataatttaaaattgcatttgtgtgcatggagaggttaattctcaaactaggtcaggtggctacctgttttctgctcagatctgcttttccagtcctttcctggtctatgaaatgcccttgaaccctggcattttctctccactgcctttggtgtgacctgtggggccgcgactttggtgtggcaacaggttctgtgccctgtgtcctgaccttggggcctatgcgcccagtttgctcaccaaagccctcaccctggctggagcctgtgacctgaccgggcaactacgtagttacctctggcgtaaggcttggttttagtttaatttgtttttgttgcatgtgggagtttggcaaaaagaaataaatctgttttttctttttc

SEQ ID NO: 41681 - DNA, 1681 bp, Bovine  19866880976029
  misc_feature (1)..(1): n is a, c, g, or t
nactcttcgcttccactgaagggggctcaggttctatccacggacagggaactaagattccaagtgccacacattgtggccaaaaaaaggcccccctgagacgggtacttagaccaagacttggaaggaggagcagaggccagaagaaatggggaaagcattccaggcaaagaaagaggtacatgcaaaggctctggggttgcccaaagcactggcttggagaagtgagagacgtctacttagaacaagtggtaattgtgacagagtgacccaggccaaagagcagttggaagctactgaagatttgacttctgacattttagcattacttgggctgctgtttgcagggtgattgtaggtgagtaagcagaatgcaagtaccttaatatttttaaatcaatttataaaaactctgtatgttataaagatattaattcttttccattttctattaaaaaaaattttttttggccatgtcacgcatcatgtaggatcttagccccccaatcaggaatcagacttggactgcttgcattggaagcatggagtcttaaccactggaccaccagggaagtcccacagtttctacatatatttttcctggtctttttattttcctttcccttcattccgtattcaggaattttttaaaatacaaatttataccaaatctttgcatttcttatattatttctaaatttaagagacttacctccattccagaaacctggtaagggttaaattcctaaaacagtatgatgaagtagttgaaatggtgcgctcttgggagtcagacaaaactgagttcaaattgtgacacagctgcctttttgctgtatgaacttcagtcacttctaggagcctcagtttgctcctctccaggatgagagcaagaaggctattctgtaacaataatactattatcctatattttctaatatttaatgtttaaaatgttaatatttatctgctttaatgatctagaattaaattttttatatggtgtgaggtatgggtctaagcctatcttttttttccccccaaattgttccattttggcccttagtacttctaggaaattacacaactgttcagagcaaaagggaaagagagttatattgcttaaatacctactctagggacttccctggtgatgcagcagttaagactccgtatttccaatgcaggggcacgggttcaatccccggttggggaactaagatcacacaagctgtgtggcctggccaaaaagttaaaaattaaataaaatctgaaattaatatagaaaaagaaataaatacctactctatgcctatttcttcctatacatgatatgatctctatgacagtcctcccagtcagatagtgttattcccacattcctgatggagaagctaaaatttaggttcccccctggggtcaggaagatcccctgtaggagggcatggcaacccactcaaatattcttgcctggaagattccatgaacagaggagcctggggggccacagtccataggtcacaaagagtcagatatgactgaatcgacttagcgtgcctgggggtggtttgagcacatccctgtgggaagcccatcacctctcatcttctgctttctcaggtcagagcagaaatcctcacaacgtttgccctctgtggattcgccaacttcagctccattg

SEQ ID NO: 41682 - DNA, 1152 bp, Bovine  19866881014554
  misc_feature (1)..(1): n is a, c, g, or t
natttgaggagggaggaaatgcgagagcagaaagggggtgaagggtgggggcacccatcaatccacccactccctgatcgcctttcccgatttgtgcctggggtgatctaagccctgtggcttcccccaggataggggaccctggagagagaagggtggtggctctgcttcttgggagagaataacgcctggaagacacagagacgttctgtccccgctacgcacagatggtgtgattatagaaccgacagcagttgtccagggcctctaggctgaactccgggccggtgctgaaaagaagcagaatctgtagtctgcgctccaggcctgggctctgctgaccactaaaggctgagcaacttcaaggaagttgctccatgtctctggtccaaacttctaagtttggtcctcaagccccgcttcctcttcccttggttacatcagccacagccataacgtttctacccccttgctctggtaccacaggcctcccccaccccaggtactcgggcctctgcgccccatcactgtcagcaccccggcccccggcccctagtcccccggcccaggcactcacctctggaaggcctggtggcagcactggtacacctcaaagctgctgctgttgagggtggtgttcaggagggacacacagtccaccgcagggcccctgggcatgtagaggatccctgtgcagagcaagcagctagtcggcagggtccagccccttactatcccccgcaacgccacccaaggactgtcagagagcccggggccccagtgcctggccctggactgagtcctgagcccaccaggcctgcactcaccggccacacaggcgttcaccagagacacacaggcccccgtgcagagcgcccggagcacgatctgggagaagtcgctcttccgctggggagccatggaggctgcaggaggataggagggctcagggccaggactctgcaggcccctctgcctcctctctgcgcttctggctgtgtctgctgaccaacccccttcctcttctggggggccagaggaacaggcgctgtccttctgatgcttgttgagtctgagagtcctccttggcctgactaaatagcattccacacctccccacatgccatcagcggcaggtgtagggaaagaaca

SEQ ID NO: 41683 - DNA, 1682 bp, Bovine  19866881053512
  misc_feature (1)..(1): n is a, c, g, or t
ntgtccagtgtgcgcttggctcgtgcgccagccgttcctcccgccggtcacatcgcgccctctcttcttcccgtgtcccctcgccggccccgccatgctgtctctagattttttggacgatgtgcggcggatgaacaagcggcaggtgagcttggccgcccaccgttccccttgtaccttccactgttgccccgcggacctctggggccccagtgtgagggcctgagcgggtctgacgcctggactcttccatctctttgtggattctgtgttcagagatagctttatccactcgctgttttagcccttggctgagactgggccttctccgggcggagcgggaagcctgatcgtcacgttccattgcccataatgagacagggaagcaagtgcaaaccgtagggctctttgtaagtgggagttggggttgcttattgtgttagactggataaggcggcaaacttcaatcgcagtgacttccgatggattccggcaactgggtttagtagtgcactgcttctctggcttctgggatgctcggggagacggttataggcctcacaaaagccattctacgttgagcccgttgtacagctgggccccagcggtctgtactgacttcctggaaccaccttcgaggtcagagttgaaacagttactctgcttgccctcgagtccactttagcgttaaggtgtacctcagaatattagtggtacagggatcttgaaacttacatttcctgatttttgtccttaaaccttattccatcctgaacttagacatcatattccggatactactgttgcaattatttgttgttgttgtttagtcgtttctgtcgtgtccgactcttttgcgaccccatggacagtagcccgccaggctcctctgtccatggggtttcccaggcaagaatactggagtgggttgccatttccttctccaggatatcttctcggatcagagatggaacccgtgtctcctgcagtggcaggcagattctttaccactgagacacctgggaagccctgtaattatttagtcattggaaaaagttgcttttttttgtcttcgaggtcagtagtgtctgcagagcctagttttgcttgcctcggacctttttacagtagtttgctgttaagaaggatcctgatgtcactattaaaggtttttctcttggacttctattttgcagtttataattaccatttagggaagaaaatatgcaccctccccttattccccttcagacctcagctacctcagtgttacctcctcttagacatgtttcctgcttccttcagtcataattggtctttccttttcaaattgcacgacgtttatgactttataacatttaaaattctcacttgaatagtgttttttcatccatatctgaatttctaggtgccacagacatttctctggagaaattcttatttggggcctctattgttccctatgctaggttcagtgagaaaaatgcaaagataagtaagacagactctgaccttcaaggagcatcaatatgtagaaaatgactaaggcagaacagtaactattttgagctcttgctatatgtggagtgcattatatacctgtgaggtaggtcattttatgcccattatacaggtgaagaaaatgagcagcctaccagagattgttaggaggggagggaagg

SEQ ID NO: 41684 - DNA, 1423 bp, Bovine  19866881145734
  misc_feature (1)..(1): n is a, c, g, or t
ngatcttgttctcctaattgctctagtggcccctgggagtgaacaggagcctggggtggaggatgttcttaggttcatgtttggaacacagtgtataatgatgctcacattccatttataggaatggcaaggaatttactctgtcaggaagaaaaatggagataacgtacaacaaaatgtgaagataatacctgtcattggacagggagggtaagtagaaaaaacaagtacttcagtcagtataccatgtttggcttattgcagcatatgctttaaatacttaagtaagttaagaactgcacatggaaacttctaagaaggactggtaaccaggtcagttaccaccaaagtgtgaccttccagggtggcttccccatggtcacagcccgaccctcctgctggcagcccagagccaccagactccaacagtcctgcttaagctgtgtgagcacatacataaaagatgaaagcatttaaatccgatgccacctcactgagttttgtgccaagaacactcactgggactctatatttaaaagttttctgtctggcttagcaggtaaagaatctgcctgcagtgtaggaggctcagattcgatccctaggttgggaagatcccttggaggaggaaatggcaacccactccagtattcttgcctggaaaatcccatgcacagaggagcctggcaaactacacagttcatggggtctcaaaagagtcatacatgactgagcacatgcacacatctggttttggtagcctctgtatcatttctgcacagaactatcaaattagataaagtatttccaatactgtcatttatagaaactcatatgaaacaggtgtgaccacaggttggaaaaggcagtatatatcaggagcctaaaagtgtcatagtttgtctcggaatctatgttaaataatacaaacagtggaaaattgagtgtgaattgcagaacactcaacaataaaatataccacaattaggaatgatgatcatagagaattaaatcacaggagaaaatgtttatgataaatacaaaagtcaaaatgtaaaatcatacctagtgtatgttcttggtcatgaagacaaggaggaggtgtggagacagtgttgtaaccacgctgctgtctgggagcccttccctccctgggcaggtgctcagggcctgctgggcgtcccttctcctcctcctcaccacggccctgcagtggtggcactgtgaccgtctctggttgacagatgaggaagctgaggctgagagaggtgggctcagcccagggcctggtcacagagcttggtgggagccgtgctacagacccccacactgcccatgaggctcacgtgttggtcagcagacctggtttccagctggcgactgcctcaaggaaatggctctgtgtgcgctctctgttctgact

SEQ ID NO: 41685 - DNA, 1478 bp, Bovine  19866881337743
  misc_feature (1)..(1): n is a, c, g, or t
natctatagttcctgtacaaaaaatggtatcactttcccccatttcggtagtgagggggtattccgatggcttgtgctcatcctatcctaccgtagtcactctcgtcccagtcgtcagggccattgtgggggttatacctgtttcagagtatatccatttcaactgtacgctcaaaataaccccttcattggctttgagtttccactgagtctactatggcacaaaatttagtctattgaatatctccttggatggccagaccacatgcttttctgttgtccccagacattggacttagcttgaagccagtgtcctacagaaccccctccccaggtctgagtattttcttttcctttccattcccaaataattgaacatagatccctttgggggaagactgcaaggaaggttcacaatatgcaaaataaggcttttattcaaagacatttgacatttggaaattaagtgggagattttgactctaccttggcagtttgagacaggcctctttgcccgaccagaagtctttagttatggtcatgactgggtgatatcttaggcactgtctggtctttttcattcctgggaccccatgatcgattaaccatagctaggggtctggtttctatgcccatgtctatcatgctgactcctctactgtgttccttctatttatctatctctgctgctgagatcagggagttcattttcacaggacctcttccaaccagcattccaggcccagagaggaatgccagcagagcctccctcgccaatttctcaagacagagtgagaccatcttgtgggtcctgtcagagaacagtgagagcatagttgggctggatgcttgccagggacccaataaagccctcttgtttcctgaaatctgtgagttcctgcctttcttggcttttgatcttctgttacaatttatcatgggtcagcatatccaccccacatggtaagaactgtggctgtttgaactccagaatctctggtgagtgagaacacatcagtaaacaaaacttgaatcaacaaactatgttatactatcttggtcaaacagccttaaagtttccataaatttcccctctattttttgacaaggtatattagctaactcacagggctttcctggtgactcagtggtaaagaacctgcctgcaatgcaggagacgtgtgttcaatccctggatctggaagattacctggaggagggcatggcaacccattccagtattcttgccaggagcatcccatggacagaggagcctagtgggctacagtcgaaaagagtatgacacaattgaagcaactcaggatgcacattagccagctcatacagtttcttctgagagtaactcttctgtttcctgatctgattctgtctctcgtcccttggattatgttgaaagtggattctggttactggcagatcaacagtgttgcatggggcagagtctgggtcccaatttt

SEQ ID NO: 41686 - DNA, 1279 bp, Bovine  19866881478058
  misc_feature (1)..(1): n is a, c, g, or t
ngcaaggtttaaagtgataaaggcaaagcccagttgtgttttctttttttttaatactgagacagtaaaggaaatagggagtatgtggtaactggtgtgttttaagcacaaaagacttaatcctttctgttctctctgtattagtgtgaaatctcagtactttgcaaaatagtggggtaaatgaatggtttttgtgattcgttcaactgaggtggaaatcagcccatactttaattctaatggaatgagaacagggacattaatcttctgaaaccctcccctgtagagatcagccatcctaaatccattctctaggatttagccttcaaactttgcatacagactcttaaagatatcagcagagtatgaaacttggcaaattactgctaacagagcttctttgaacctgtctttgaggcttacatagtatttctattttctcatgagccaaggagagtgctgaaatgccccccgcccccaccccacctccacgtgtggtagaagattgctgcctgctccatttttccttcctgataacctaaagatggtgggctaactgttgagccagtagtaactggctgttttcgtaccagcctttctgagactcctctggggagaagtcgtgtgttctgctggcaaaggttgggatctcaaagttctttgtgatcctagctcgccagagtataaacatgcttgtacttgtatcctccgtgatccaggttcctcctccttttacacttactgggagggaagtctttatattttcttcacttgcttattttcataccagtcttataaaattactgtttctcctctttaactggatgtcatagtttgaagcaacagctaaatttctctgaaaagtaatcagatcatttaaaaatatttgactcactctagtaggcaaaaacaaacaaacaaacattatttgtggaatgaggtaccgtgttcccacgttttatattttactgctaaaacataagacttaaaactgggagattttattagtaaatagaatgtggtttttttggtcacaccacaaggaatgtgggatcctaggtccttgaacagggatcacacccatgccccgtgcattggaagtgcagagtcttaaccactggtcctccagggaaatctcagtagatgtatttttaaaagctctttggaaatgtaagaaatgccagaggtgcttgattcgttattttaagggaagtataaactctgtgagatttcacagggctagtgggaagttaggtggatttaaccattgtgagtgaag

SEQ ID NO: 41687 - DNA, 1488 bp, Bovine  19866881704199
  misc_feature (1)..(1): n is a, c, g, or t
naaaaacaagtgggaattgaggagcaagagtttgctagtatgtccgagtcctgcccagaagttaggggctgggggtggggagggccatgaccagaggacagagatatctgtcattctgcagtttcagttctcaaggctagttaataccctgattttttgcatcagtctcttccaagtttggttagtcactctccctggatctgaaccagctccacgtggcctacacaactgaatttcaaggcttccctggtggctcagtagtgaagaacccacctgccaatgcaggagacaacaggtttgatccctggtcccgtaagagcccacatgctgtggatgcggtgtaactaaagtccgtgcgccacaactattgaacctgtgctctcaaggccaggagccacatttactgagcccatgtgctgcaattactgaagcccgcacaccctagagcccaagctcagcaacaagagaagccactgccatgagaagcccgcacaccacaactagagagttagcccccactcgccacgagataaaagcctgagcagcaacaaagatgcaacacagccaataactaaataaaaattatattaaaaacaaacaaacaaaaccacctgagtttcaggtttctgaaacttcatacactgaagccctgagatcccaccaaaataaagtcacctcccaggatgacaactgtatcctctctatcagcagcacccatcacggtatggatctgatgtatccagtagtctctgataggtccctgtgccttacggaattaaatccaaacctgacctgcctttcacaagcccagctcagcttaccagcctcatccctggacaaaccaagcctctcacagctctgtgctttcacgtataactccctctacatagaatgtcctttgcccagtcttacatggtggtaacactgttcttcctccaaagcccagttcagaagtcaccctggccccaaagccttccctatttccccaggcatttagttcttaccctcttaactgtagctctctaaatacagggggttttgagaatttgttaagtacattgtagctcattttaattatctgacctcccctagatacactgagcttgagggaaggaactcacattgtatctagaagtcccagtacagtgtcaagactgaaacaagaaatcagtgttgaaggactgagcacatggaacattggcattaagttatttaaaggaaaacagagtctcacaatattcaagaactgaattgtccctacagttaatctcatccaaaatgacaacagggctgggaggcagtgtggatgttttaaaattttaataaaagaaactaacatgttgtactaaaagttaatttaatcagtacaaaaaccctaggaagtagggacttttacctgcattgaagctaagaaaagcttgaggcttttccagataggaaactgaggcaccagaagggttaaataactcaaaatcattcagttagtaa

SEQ ID NO: 41688 - DNA, 949 bp, Bovine  19866882102306
  misc_feature (1)..(1): n is a, c, g, or t
nacggagatgggaagcaggtactggagggccactgcaaggactgatgttcactttcagatggaaggctggcggggacatgggggaggggagcaacctgcattggcaggcaaattccttaccagcgagcaaccgaggaaaccctattttatatatggtaatgtgtatacatcaatcccaatttcccaaattatccctcccccgtaaccctctggtaaccataacatattttttaaatgaaggaaaaccttctaatcctttaagctgcttgctgcttagtcactcaagtcatgcccgactctttgtgacccactggactgtagcccgccaggctcctctgtccatgggatttcccaggcaagaatactggagtgggttgccattttcttctccaggggatcgtctcaacccagggatggaaccagtgtctcctgtgtctcctgcatttcctgcactgcaggtggatccttaacctgctgagccatccatcagcgaaatcctttaagactgagcccaaattccacctccacctcaaagtcccctgtaccagtgcaaggccgtgctacaccctacgcccagggcggcaggaccactagggtggcccagcattagcagcacatgcccacagcaactaatgttcatggaagtttcttgtgctgcccacatgcctctcctgtcgtgcggaacatgtccctttggacactcttgcccccaagtccctgcctgggtcccagtctctctccccattgacttaattaactcctggtaattaaagctactgtttagtgatgaactgccaagagactgacctctctcacagggtgtaaatattttaaaaggggactctaaggggaaatgcaaacgtcttcagactcaggggaatggtggaacgttaagcactggggctcactggggatatgggtaggtggctgccttctaagggtataggtg

SEQ ID NO: 41689 - DNA, 1766 bp, Bovine  19866880556106
  misc_feature (1)..(1): n is a, c, g, or t
nctaatagtgtttgaacaaaggaggcccacatttcgattacgcagctgatcccatcaatattcatcattaactacatcttaaatatacaaaattaaatgtgactggattctgcctttcagatggaatacattttgctctttaaaagccacttaatagacaacctcatgcaaatcattctcaagttttacactatctacaatttaagtttatgaccttcatttttttttccttggcagttcttaaaatgaaagcactctattaatacttttaagatttaggaagaactcagaataaacgcatcttcactatacattaagtaggtattagagaaagatgacattcatttttactgtttaaaaattcactttcaatctaaagacacttctaagtgttttatactataattgaagactaggtatatcatgaatagtttaaagaataaatcaaaggaccaaactaatttactttaacagtactttctgggcaatcaaatccaggcaatgaaaaggtaacgaagaaacctcgttttctaaacgagtcacagtttaagaattctagttgttccttagacatccttagaatttcataaagcccagccttagctatctactctgcttgtgacggggtgtcccccatcactgggttggcagcactgtattgtactagctcacttctcagatcacaggcagaaagggcaggtggggggtggggcacagcttgggaagctggggtgtggatactaggttacatttgctctcagtctgggtgtctgcagaggcttcaaggactggtgagattctgtcctaaggagagttgatttaagtaccaaacaatgctttgaagaaaacgggtgctttgtgagccagtgagtgcctaggctggatgatcaattttcagggacgtgtaaagaatcatctgtcttatagagacggctacttgagtttctgcatgctggtagctcagatggtaaacaatctgcctgcaatgcaggagacctgggttcgatccctgggaccgtgaagatcccctggagaaggaaatgggtgcctactccagtattcctgcctggagaatccatggacagagaagcctggcagactacagtccatgggttcgcaaagagtcggagaagactgagcaaccgacactttcactttttttctccttgagggcagaggaccagaatgatatgggagatggaaggagagaaggagcaagctggttggatgaaatgccaatttatcctgagtggagcaaaaaaactcagcaacttaaaactatcataagaaaaccctgagacaattgtgagatatttatctccttagaaagacactcctgggagtgattacaggggtcaggactcaatgtagaatggtgtggcaactctggaaaacagtttggtagttcctcaaaatgctaaacacagagttaaaaaactcagtaattccactccagttatatacccaagagaactaaaaatatatgtccactcaaaaacctgtatgttcatagcagcattattcatagtagctacaatgtggaaaataatgcaatgtccatcaactgaggaatggatatacaaaatgtagtctgtccatacagcatggaatactgtcttagtctatctgggccctataacaaaatatcatagactgggtggcctataatcaacagaaatttatttattacagtcctggagactgggaaacccaagatcaaggtgccagcagattcagggtctggtgagtgcccacctcctggttca

SEQ ID NO: 41690 - DNA, 2615 bp, Bovine  19866880593167
  misc_feature (1)..(1): n is a, c, g, or t
ngtgggggaggacgctgccggcagcctgagagaggggtctgtggctctaacacaaactttcaactaatattcctgcttccacctgccccccgcaccccatcatcaggaacactctgtacccctcattctttagcctttagtgggtcctgtgtacatgtcagctccccttcctcgcagctgggatattcaaccttctaagctttgcttctctctcactcctctgctccccgtctttcaaaagttttgctcacatccctccttctctatcacctacttttctgtttttcttaaggatttatacctttactctcatttttgcattcagttctttttgtggaggttcatgatcatatctaacagtaaatcaaaatcaagcttccaaagatacacgcaaagaagtctctccaggggtggggtcgggggaggatactccaataaggaaacatggttctttcaggttggggtagaattatagccaagagatgtttgcaatttctttctgttttgtacactttcaacagtaaataggtatcctttatgaatcaaaaagtcagagggttaaaaatcattattaaaagtcattttctgaaatacagatcaagatagtgtaaacaggtgtgtagaagaaactccaactcctcaacacagtctacacaacccatggtttttgcctctgtgccagggagtcctgtggctccacagaaacaccctgagcttttcagagggtggcaagtgtgggacagggtgctgagtggaaggggttctgggcaggtctctagttgtaccacagtggcactctttcattctgctttataggtaaaaattctgcttaataatttgatctttttagagagagccacactaataaagatgcttggaaattcccgatgaagatcgaaatgaagtgagggtgagggggaaagcccccaaggatgacatcatgctattaccctgtgccctacctgaaccatcagaaatgacagtggctgcttgaacatccgtataaggagcttggtgcttatagtgtacaaacttggtgtacaagaatacacaagtacacacacagctggcaaatgggaccaatctgcgagcttgttaaccacacacagccactctcagacaccaaaggcaggtgctcagccaaggtttggccagtgtcagtctttggcttcagtttcttcattcgcacaatgaaaggactaacgtcccggaagttccaaggagcatcctcttattgtacagtgactgcggactccctagagaaacagaatgtccccacctaaggactccttgagaagcggtatcaagttatgaaaattcaatccatttcctccggaagaaggttttaattcttctctggccaaataggcctgcctggctctaccatgaacaagcaagtcaaataccaaatgctgcagcctaaaaatgagctctagggctcctcagagcaaagccatccctttcttcctggtcagcagcagacctttgctgggaaactggcaaggatctaagttcacatccccctttgttggctctgagcacaaatttgggtcactctcttcctgttagcattctagtcctacagagaagctctcctttggctagatagtcagggagggtggattccattcaaattcttaacctatctacaaaataacatctcttcttccctcacacacttgtttccttttcgtgatctacctttctggaatggtccaaaaaaccagcagcaaaggtccctctgcctgacaggttaaagatgctttggaatcaatgagcatcaatgcactcttgcctgactctgagctccttatctgtctggaaaaagaaagagagcaagaaagacagaaagaaagagaggaaggaaggaagaaagaaagagagaggggagagaaagaaggaaggaaggaaggaaagtagagaaagaaaaaaggtaagaaatctttaaaaagagaaagtctcagaaaccttcagcacattcccttagaggacttcagctcaaaagcaactctttcaccaaggttccctttttgcaaaccagtcacattgtgcttgacgggcctttttcaccatctgtgtcaatgccacccccagctctctttggtggtactgaagcaaaccacaggaacatttccagtgaccgaagcaggaatttatatacatacagatgattcagatcatttctagagttgtttgttggttttgtttggtatttgaaagcaaagtaagtgatctgagtcaagcctgggttcgagttccattcaatggctgcaaaaaacatgtctgtgaacttgaggtctctattcaacacccagatcacatcataaaggaggatttatccttgctttgtggagatgaaagggaatggtgtgtggggaggggttcgcccactcactgcatctgtggtacttctttacccactgtgggcggctcctggaaataatctgaccccagagagcaaaagatacctgagttccgaaagcccatgcatctggattccagcagcaggacatgaggcttccccctcactccccacgctggtttctcctgcctggaacccactgagttcctgaagagcaagaaacctaacccattggcttcttctctatgagaca

SEQ ID NO: 41691 - DNA, 2228 bp, Bovine  19866880663806
  misc_feature (1)..(1): n is a, c, g, or t
ncagtggtgagggctgcaaccaggtccacaccccactgcccacggcccccagctcacctcctcctccgtgaagcgtccatgctctccaagccgccccagctccaggatctgcaagagtgaccctgatatcagcagtgcccctgggacctgggagagcctgggtggggggccctgggagtcggtgtcaatcccttggcactgctgacttcgtggcgagtgaccctcagtggtggggatcgtcccacccactacagggtgtttagcaacatccctggcctcctcccatgacatgccaggagcatctccccagctaggtttaacaaccaaaattgtctctggacattgccggaagtcccctgaaaagacaagtggccccagttgagaaccaccactctaggacacatgaggacttcagacagtcaaggaagccctcaaatgtgtgtggggacccagcccccagccctgggcaattcacagggtgcagggaccatgacctgggcgccccagaggcagggtggggacggctcatctttagccttgaggtttctgggcagggtgggccctggaccccaaatggcgaggaccccctcactgaccttgtccaggaaagggtagtatacagggtgaggggccacctcagggagaaagatgaccagggcggctgcactctcagtgttggggttactccgcacggtcccacaggggttcagtagttcccctttctcgtctggacacagggacagatggagttgcaaggggaatgtcgccacgtccggatgcaccccacactcccacctctccctcctggcctgggcccacctgggacagagggccacatatagagacagtgctcgcccgtcttgagctggtccttgtagtcaaacagcatgaggttggcccaggcaatggggcagtcctgggaaagaagccaggtgggtcagggccagccgccccaaaggcctctgtttgctcaactgcaggatggttccagtcaggccacgctgccctgccctcacccacactccctatgaggcagccgggaaggtcagccacactggtttcctactgctcccagacacatcccaccctcggcttcttgagaaagcctctcacagaacatagcagccccagagagctggccccagtcaaccagtgagtcagtgcagttcggtggccagtcacagcctggtcctggtgactcagtgctcgaccaccaactccatccccagctggctgttgacttaggctccctgctccctgggaggacactgcgtttttccttccacccgagggagaggcctccaggttccctcaaggaccaaaggcccaggtctagatatcccgagcatccctgctcataagcccaggattccagcaccatcacacaccagcagggcagggggtggccagtggggtgatggggaggaggccggggtctgcaggcccacccagaccccattcccaggatgtgtgcgtgccagctgggatgcttgggagggatgaacagcagccccagggggctgcaggacaggaccggaccagcagggagtgactcccacaagctccacccaccgccttcttggacttcttcttggtggagcgggccttcttggccttctcgatcacagcgtaaagcgcgaagcagagccgggccatgcggggcaggtcacagatgttgatgtcaaactccagccgctgcttccacacgggctccgagcacacgctcacctccgagctggacaccgtcttgcatagcgtctcattgccatggaagagcccggcctgcaccaccagctggggaaggtgcacgcaagtgactggtggcagaggccgggccccttctccccctgcatgctcccttcccgctagggctcgaatatcctcctgaaacatccttatttcaagtgggcctgaacctccccaaccaggtgcttgaaggtggtccaataagggatgactggctgcctgagggggaaagagtgatggggaggggagggtggcgtgggcggctccccactgactgtgggaccccggggcaggttgctgctctgctttgggcctccgtttccctatcggggctcaggaattccaggggcccctcttggtcaagcacacaagaattgcatgagtccctctagacagggaaggatttaataccccagataacacccttaccctgtgtcctccatctctgctctcacccccccagtcagaaagctgcctccatg

SEQ ID NO: 41692 - DNA, 671 bp, Bovine  19866880794645
  misc_feature (1)..(1): n is a, c, g, or t
nttgtgaatcgggcccttttctgagcctggaggtggcagggggccacacaatggaagaggaatgtggattttggtggtggaaggaaggtcccgtaaggcactgcatcgagtgcaaggctgccgcgaacacattttgcattttgccctgttgtacgggcttcagggcaggagcccctgttagctttgacaggcgcctccagggaggctactgcccagggctctggtgcatttctgagcccgcctttcacccgggagaaccagcctttcctgggctcgctggcccctgagggatggacggtgtgaggagtgtccttggccccaacccggctcccttggtcctgtgagcgcagctccttggcaccagggccgccgaggctccacccccaccagctgctgcgttatttctgactcatccaggagttacaagtgtgtaacccaaacccctccacgcccggcttcctccccactggctcctcctggagggaggaaaccccaggacttctctcccgggacctcgccgctgcaggtcgggtctccaccgcacctggacgtactgccacccgcaggagccaccctgtgacaggtgggtgggctggcgagagcagcagctgcaagccccgggcgggtgtctgtgcctgcagccccaagctcgccgtccctatcgagggatt

SEQ ID NO: 41693 - DNA, 4500 bp, Bovine  19866880803698
  misc_feature (1)..(1): n is a, c, g, or t
nggacagtctattatcctcaggttcatctggggaccatcagtggagctggggtggtgagacaaacgtcagtgacgcctggactcttacaggttctgaagtaagttcagtccggttctggcctcatgccacccgcacccccgccccccaacactgtcagtgcaggatgtttatccggcccatcggatgggatgctctgtttgtagaggctgtgaccaaatttaagaactaggtatctgtaccagtatcttaactctgactttgctctcttggcctcagggcttccagcatgcatgtgatcaccatccagggacagttaaagtaaacctaacaaagcaaactcaaaacaatccatgtttaaattgttacatcagagtgttgctcttgccccaagtcttttgagtgctagtgagaagctctgaggcttgtagaatgaattttaaaattgcacaagagaagtattgtgaatattttaagaggaagtaatatggaaacaaaatgttgtaattttttactttttatttgaaaataattttacatttatagaaaaactacaatatatgtttagtaagctggtctttacaatttttgtttcatacctagcctacccacctagtttatctgtttttactgtagtaaaatatttcatttgcttaccaagtcgctgaatattcttaagttgaatttggcttatcagtctctatgcttaaggcaaaatcagaaattcagaagagcactgggcaatgtctgcattttagctcggggaccctgtgcttttaaaagagaactttaaaatgatgactgactgtgaactccacgtgttactcagagctctaaagctgacctctgggagagcgcaggttcaagagagacacagctgtgtaccagcgtgggtgtttagtggggaagcgttagaaaaagatgcaataaaatggagatgctctgtcttcataacgacaacactttgaatttggggcagagttcagtcacagtttagataaggtagaatggatttgaaagtgcttaatttatttttaggtacgttttgtttgtaaagccgacttctgggtaattcaggcaccagctgctgagggcaaggtcccaactagagaaagaggtcgctgatagccaagactcgaggcaaatcttttttttttaattgaatgctgagaaggattgtggagacacaaaatgcagaaggtcaggggcaggccaggaaaggtggggcactgagatgggaggcgtgctttgctgtcagtaaggagagagaccagctctgaagacaccctccccgttcgcctttagtaagtctagtcactggcagtgtctccagtgatgcctcgcttctgaggaacttgaagggctttggacatagtgaaacagaggtaatttgccagctttgctaacatccaaggtgaacttcctcttacatacttgccaatctcgcatgactagtagatttatttatttactgtaactggggacctcttacccggaagtcgcgggtgtcactggggccaagcccctaaggtaaataggaatgtttctctagttcaagtgtgttaggacacatcttctactaaaatgtaaaccgaaaaaaaaaccaacctctccgtcttttaaaacacacgaacagcgcccacaccgcatgcaagacagccaccttcctaactggcctggcggaagaccttgtaccctgctccatccccaagctgttctcagcaaagcagaggagatccttttgccctcactccgagtaaaagctgaggctgcccatggggcctcctggacccctcccattacctccttgactttgcccccttgaatttctccctcctgaaccgttttggctctactggcctcctttctggctctttaaaagaccagaacattggaacattccacagtagggcctctctgctggacattatctgcatggctgcctctcagctgtcccctttgcaggaaggccttgcagtgaccacgctattgaaaaccaggcccttccttcacattctctccatcctgctctatttctaatccacagcatttacctctgtccatcgtgcagtataatgtactgacttatattggttattttctctccctggcgggggcccccctgcaaacagaaattccccagaggtaggggcttcaatttgttctgacgactggaggtgtccccaatctctgagaatgccgcctgccacatggcaagaatgcaggacagagagaacgtgacgcatcagtaggatgttgactatgaagagcgtgacacccgctcctccccctgccggtgaaataaccagtattagctgctgtcataatacctgcttcctgtgctttttaaacataagatttatagctgagtttcctggtaatgaaggcaaaaaggcgggctgtcaccctgtataactctcatctggagaaagcacatgtgctccttggggtacatgtatgttgcttcttgtcacaagttctgaaagcagaatgttacccagtacttacatcagatagtgcaccagtgtaagcagcactgtcttctagggtagtttaacagaagatgactgctttttgcttcctcccccgcccctcacccgcctggattactggactgtgctttctgattcctccactaatcacccctagactagagcagtggtgaggggctactgagcaggctctttttctaggagtggtgaactgagagcagggatccaggccttttctccgccacaaagcccaccaaggtcatctgctcacaattagaagccattgggtttatcaggtggtttccctggtggcccagacagtgaagaatccgcctcgggtagaagacccaggttcgatccctgggttgggaagatcccctggagaagggaatggcagcccactccagtattctttgctggagaattccatggacagaggagcctggcctatagtcagatggttattcatttaaaactaagctgcttatttttagtcttactcttccaggaagtgctacatttaaagacttaacagaaaacagaatttgtttacaggaattttatttttcaaaatacaaatcagtgtttgcttatgtctcaggttaatctattagagaaaaggtattctccattggagcactgattacctttatattttgaatatagttatttgaagacaagatgttaacacaattaggctctctctgttaaagttgccaaagggtcataatccatttattgaagtatctgccttaaaaagttttaggacataatcttttaaaaaaatttttttccattcaaaacttttattctttaaactatttcaggtactttgttttttcaagtacctttttaatgtgaaaagtaatatgttagtgaggtagtttttcttttaaaagctgatggcttcagctcagaactttgtcttggagcttgatctgtggtatgcatagtctgatctaaaagaaggaagagaacaaaacactccagacaagacccgagtttccttctgcatttctttcctaaatgaaagcttataggactgtgggaaacttagtctgggccctaaacatgctttattttgaagctgaggagtaccatttatagtaggcacttgattgttccagaaaagttttgtaaacatccagataggttggaagtttgaattatgtaacagatttgactttttgcccactgttaatgtgcatcactatggagacagcctttttgcagctcttaaaaggactgagtcactcgaggacacaagttccccactgcattatagatgcgtggctcccagcttcctggagccagagacgcccttaattgtgtttaagtgattcctagggctggcggtacagtgaacagtcgtggggaccacagacagagcctaaacttgaagaaattctaaatgtattgaccatttgaaagctttcacatactatactatgagatgtaggtcacttcaagatgtggttatttgagagaagttttttttccagagagcgtgttttttttttgtttttttttttttttaagctaaatcctgtttggagaaagagttaacagtaaagaatttaaagttgaaaacaccaaattctgttaaggaccaagtgccttggtcctggccagtgtgaaaatgcagtgaaacatgtagttcctttagagtgttaggatgagctcagtatttttataacctatgacctatagctttttcatttttaagttttttattgtgaaatgatttccaacttaaagaaaagtgacaggaacagggcacacaccttgcttatactctacccagggctcttgtgtttgacattttgccacatttgtttatctgtttttgctctatatacatactttttttttcctgaaccatctgaaaatgtacagttttcaaatttaggaaatttagtattgatataactaatctgcagtctgtattccagttatatcatttatcttttgttaagtgatgatttagcacaagagcaaaaacataaaact

SEQ ID NO: 41694 - DNA, 741 bp, Bovine  19866880837649
  misc_feature (1)..(1): n is a, c, g, or t
ncaggttgctgggactgcagcagactgcaatggagtaatttttttttttttaaatcaccaaaccccccaccaaaaatttccccacaaacttatatttattgtagctgaattaaaacgcaaggtgcaaacatgaaaccaaattaagaaagaaatccgatttttttttaaaacaagaattcgcacctcatttaacaattgttttggaaaaatctactcttgtgagcaactgactcagctttccttacacagaaagccatgcggcgaaagacctggatgaacttcatggagccagagtttcctcaaagtgcagggagagggtttcagctttttagaaaagaaagtttttttaaacccccaaggaaaggggattgttctgcctggccatctagggagtggggtgaaatgaactgatctagcatccagaaacccacacacccctcccagaaagttacctctctctcctctgctcagcggctgccggctgctgtcctgccaggatgccggcaagttgcagactgctgctggggaggcaggacccaaaataagaagtgtcagctgggtccctgcaccgaaatgatgccaggagtcaacgctgcaggcgcggggatggtctctccccttttccctccccgacccggctttaatttaaacccctgacactgcaagatgcctgcttctacagagtcacatctccaaaaagcctcctcatcacaaggtccaaggcttttgctccaccttctg

SEQ ID NO: 41695 - DNA, 1235 bp, Bovine  19866880880153
  misc_feature (1)..(1): n is a, c, g, or t
ncggggtttgaaccttggacctgctggctaaaaccatcgttagtttttgtcactgctcagatgctggagtgtcctgccataaaaaaatgtgatataggagcaggtggatttagaagtaaaaaccatcctccccaaagaaattctcccctcgccctgggtccccagaggtacctagctggtggtggccgtctggccaaccagctggtgtgagatttccagtctgcagccaggcccctgaccactggcccgcacgcctgtttgcacagagagctgcgctgacccttgctttccccccctccactgtctttcagactgaacaacttattgttttttctttctttttatctttgtatttaatgttggagcatggccaattaacaacattgtgatagtttcagagggacagctatgggcctaagttaacaaagttagtaaccggtactttttaactttgaccagagttgtgtgtacgttcattaaaattctagttaaaaccacacagtaggagtttcctacaataacttgaaaatgattggaaactgtgtttgaaagaaaggtcaccatcagatcagaggattactgtagagaatgtggcagcacagtccccccgcccacagtagctcacagtggagtgaaggcccagaaatgagacaggttaatgggacccacgggtgaaccagaaacgaagccaagagtgcgtgagaatttagggcacctctgatcactgggagctggtggttcttctgtgagtgctgggggcccctggccagacccccatgcacagagtgggcacccggagggctgtcggtgggctctggccctgtcgctgacctgcctctccctccctcagagcttcttgcgcgtctgcggtgaaggccccagcacaggtcatcgtgctccgggccctcgccttcctggcctgtgccttcctgctgaccacagcgctttacggcaccagcaacccctttgccccgggagccccgctgcccccgaccctgccaactggtagcaatggctcggccccaccagacaacggaacagccaccggggctgagggctggcggcagctgctgggcctgctgcccgagcatgcggccgagaagctgcgcgaggcctgggccttcgggcagagccaccagatgggtgtcgtggcgctgggcctgctcacctgcctgctggccatgctgctggccggccgcatcaggtgcgtgcggggcagggacgcagtgggagga

SEQ ID NO: 41696 - DNA, 1070 bp, Bovine  19866880910187
  misc_feature (1)..(1): n is a, c, g, or t
ngcatgctgcagagtatgccccccccaaaaaaaacccaatatctgagaagtacaataaaataaggtaagcctgtattaatattttatgtataaaatacacacatgtaaaaaaaacaaagtctttcaatgtgaaggagttccatggatttaatgtgctatcctattacccacagacacagaaatcgtaaaagcttcaatacaccttgcccgtaaatagttggtcctgtgcagtttcagtgcccatttactctctctgaaaaaaaatcctatcagtgagttttccattccctcacctgactcagcttccagtggaactctgcaggtttgtatttcttctcttctgaaggatcctgacggaggaggaaaaccagccggcagccgtggacatagagtgagtaatggtgtcggttcatctctgcagagagaaattctactggtaaaccgccagcttaactcactactcaccagacagcttttgcagaaactaacacctgtgcccagccatttttattctggctggccaaaaattaattctgttatttcacgaacactttgtgggttattacattcaatagttacacctgacacatctgtaaatcttctccagcaccgttgaatttcattttcactttctacatgagaattaatcactaaggttttttgtctgttagttgaatattcacatcatctgaagtataactatattctgaagaactaccatcttatgagactccagtatacatgtcactcagacaattagagaaagtatctgcattaaaattcaccgaagaattcttcttcactcaaaatttcattatgcatcattgtaaaaaaaatttagggtaataaacttgtatttacaatatacacaaggttggaacaaaaatctaagagcgaaatgtgaataacaacaatcgttaagttgtgcagtgaatccttgatcaattttaagttctaacaacttaacacagtgatgttaatcatatcactctctaaaaatgtgcatctccagtcaataatgtgttaagacccaaaggagaaataaaagctgttatttcttcatggatttt

SEQ ID NO: 41697 - DNA, 1365 bp, Bovine  19866880996527
  misc_feature (1)..(1): n is a, c, g, or t
nccgccggggctgcagcagcgggcggcgcagaggccctgcaccactgctccgggctggcgggcggcgcgcctctgccgcgctctcgtcccgacggccacctcccggcggctgcgcgcagccagcgccgagacagcacccggcctctgattggtgcagtgagtgagtctcgggctttatttatacaaccttttctgcacgactcgacttcctcggagttgagggctggagccggaggcagccttcctccccggctgggaaggatgacaagccggggtctggtaccagcgactgtcttcgtgaatccttggatggatcattttcacctgcttctgtacggagcagccaccaagtgtggggcgcgatttgcggaaacctccatagaagaacaagactgtgtggcacctcggtagggctgggagggtgaaggctttcagacgagcccagggatgctgtgtttgggccctggctttggacctcctgctctgaatcgtggacaccggtctggaaagtgaggctgcctttccagctggggggtaagaagggattctcaactccggcatcctcttgggtgatggcagaggaaccttctcggaccatatccttgaatgctccactcaggatgtctgggaaagcccatggagacggactgaggcacaaaggtgatgggagaaaggttttttattcccagtgtcatggagttagttgaagaaggttaaagttggatgaggagggagtccagctcccctgcagagggaagctgaaccagcaggtatgggtggtgtctgaccgctgtggaccctcctggatgaagtgagggttgagggggcaggagtcagggacccggggacagagaagttccccagggggtctgggcagcactttctgctcagaatagaagcctcccgtgcaggtctttgtttataccaggggcatgaaaatgctgcccaactcgtcccctgggacctgtctcctggcaagatgggaagtgatgtcacgctgcctgctcttctggggctgagacagttcggagactgatgcctctgactgtcctgggccctggacttctgcagggagagcctgggtgctgggggccgctccctcccatggctcacttgagcgtctccaccttggagactgcccttgaagcctgcattgcgctgggaggaggaggagatggcagaagaggaagaggagggggagatgtcaggggtcgagggggagatggccagggtcgaggggcctgcagaccctgctccctgctgatgtcatcagtctgagggcctgcaccagctggaggctgccccagaactgacaccagaagccttcctgctcagtctgggacaggcgcagtgctgcggctgcca

SEQ ID NO: 41698 - DNA, 1944 bp, Bovine  19866880998866
  misc_feature (1)..(1): n is a, c, g, or t
naagagatacagaagccaagcagacattaattcactgctctgggcagtaaattaatggaggaacctacttccttgccccccacccccgcgcccaaagagaaggctcaggatcgaggttgtttatgaggccgggcaggagaactcagtgaaccaacatggtcagacagctcacccaccacaccacctgtgtttgctcagtgtgtctgactctttgcaaccccatggacaggctcctctgtccacaggatgtcccagacaggaatactggagtgggtttccatttcctactccaggggatcttcccaacccagggttagctctgtgctgtgctgtacttagccactcagttgtgtctgactctttgtgacccaatggactgtagcctgccaggctcctctgtccatggggattctccaggcaagaatactggagtgggttgccatgtcctcctcccaacccaggatcaaatccaggtctcccacattacaggcagattctttactctttgagccactagggaagacaaggattagctcaaggctggccaaataggaattataaaggagggatgtttgtggaccccagtccatccactttgctcttgtccccacatattaatggctcacttttcacctatgcccccaaaccatgcctgatccctgattcctgagttaataaccctgtcgttagaagaatcagacatgctgacaggcaaactggctggctgggcaggaaactcagcccattcaggggatttcgcatctgagtatagaataaatttgctgtttggcttaagccaaaagaatgaagctctaatttgtaaatttcagccacaaaccagctctctcaaggagactgggtcttggtggcaggcaggggggagagttccctgagattacacaccagaaccttctgctcacccttctgcaggctctcctgcctccgtgccttactggccagcctctctatcttgggcaccctctttccagcttcagcaaacgactttacatgtccttcaagtctcagtcagccctcctctcctgggggaggcatggtacctgccctggctgtaggctcccgcacccaccccaagcatcgtccatcagcaccctcagcctgctctcagagtcagagtttgcatgctccacttgttaacgaccaggctgggctgcaggtgcattggctgtacatgaggaggcacgacacaggtgacgcaggagatgggaaagtggttcaagaactttaagtgtaaggaattgtttacacgttagatcctctgagcgcacctaatcagcaagttaacggtgatttgggctcttcacaagtttgttagtttggtgcctgaaaccaggaatgctgcagcccaaaggaaccactcagtcagcccaggcaggtgcactgacccagacgggtcagaggtagcgggtgggaggctggggtggtccacttagctgagtgctcagaccagacctcaggcatccagaaacgcccccgggactgtgagagaatatattgctgttgttttaagccatccagtttgtggtcattcgttacagcagccacaggacactcatatgtccctggggtcatcagtgaactcactgcaacaggaagagggagggggccagggcttgtggtcgagaagaggcccccgagcagcctgaactcctgcccttcctcaggatgtactgtcacccccaatactgtgcactttctgttaatcaatactttctttggataaacctagttaccccaactttacagctagctgaaattcaaaatcaagtaagtgatatgactaatattaaatgaaagcagtgaatcaaagttttgttttcaaatgacacccacgcccttattctgattttggggtgggggcaggattgtccttgagatccacttattagctcattctttatcgcctacaatgcgggagactcgggt

SEQ ID NO: 41699 - DNA, 1283 bp, Bovine  19866881049528
  misc_feature (1)..(1): n is a, c, g, or t
ntcccatgatggttcgagtgtcttgcccctttcttccctcctgggcccacaacgtgcagcacttctagggcagtatacttgctgattgcttcctgcattattactcacaacaaccagctaagacactgccaaagaaacactcacagctggccccgccgatgacagagggcaggcctgtcctgcttctgcttgaaacctgcggagaaagaaatggggaggggaggaaagaggatggaggagaaagctgagatcgcaaagatcccagcagggctggcccacgacccacactgatcagaaggaaaaacaagccagcgcttccctggatgagaagttagaaaatgacagtagtttaaaattcatggggactttcctggtggcccagtggttgagactccaccttgcatcccaggggatgtgggtttgattcgcgggggcagggaactaagatcccacatgacttggggggcagctaagcccaaacgctccaataagagaagtccttgtcctgcaacaaagacccagggcagccaaaaaaaaaaaaaaaagcaagcaacaaaataaagcagcagtgactgctcccagatcccaggcacagtctagagtggatccatcagagttctgacaaaggagatacagatgaagatttatgtcaaggagtgggctcatgtgctcacaggggctgttaggccaggctgaagtctgcagggcagcctagcaagctggaaactcctgggccagagcagacactgccatccaaccacagaatttcttcctcttgggtcccagctggactcttaaggccttcaactgactagatgaggcccaccaactctcctggatgatcttcactcagagtcaactgatggtggatgacgacccacctgcaaaacgtcacagcagcacctagggtctggctgggttcctgggtcccacagcctgctcacgcagacgcctcaaactgaccatcacagagaggcagcctgaagatcgcgtgactcacggctttggatgcagaccacccaaggtgcgtgtggggggacaagcagcgggtgttctctaccccagcaagggaagtcccagaaacctgtgttccaggcaagggggtacagaggaaggcagctccccagccagaggaatctctctgcccgagaggagaaagcccctgggagggtgtcctacacacacgctgcaggaggagggcacacaggcttatcctttcttggctacaaaatgtccagtggggctgagggaatgactgcttacctcagtcttctgcccccaaa

SEQ ID NO: 41700 - DNA, 1060 bp, Bovine  19866881098301
  misc_feature (1)..(1): n is a, c, g, or t
natgaaatgaaaagataaaagtgttggcagccaccccagacatctttgcagcagcaaaagccgcatgagatccttcgagccaagtggagctgcagcctggggacagccaagcctctggagcgggcgacagatgaacctggggtctgcggaaggacaaggcacccttgctggggaaatgtgatggtcagcagaacctcacgagacagaggccagcttccggttggcttctccaggaagcagatgctgtctgcctttcccagccctgactctgcagtggcctggtctggagccaggagctgggagcctctgatgaaccagcagctcccaagtggctgcagggtcatatcaggggacaatcgctcacccctcagccccttccactcccctctccagtcctggacacacaggtaaggtaccccttgttcattcatgcatccaatacaacatgccaggctgtctaggctcggggaacctagccatgaacaaggctcctgttctcaaggagcttgtattctactccaagtcggggtgtgtggtggggagacagaagattaaccagtgaaagaataattgtgtgcattctcagtcacttcagtcatgtctgactctgtgtgacccctgggactgtagcctgccaagctcctctgtccatgggattctctaggcaagaatactggggtgggttgccatatgcttctccaaaggatcttcccaaccctgggatagaacctgtgtctcttgtgtcccctgcattggcaggcaggctctctaccactagcgctgcctaggaatcccaaaagaataattgtgctatgttgagcttagtctctcagtagtgtcggactctgtgcgactccatggactgtagcccgccaggcttctccgtccatgggattctccaagcaagaatactggagtgaattaccatacccttctccaggggatcttcccaacccagggattgaacctgcatctcttacatctcctgcatcagcaggcaggctcttcaccactagctccacctgggaagcccaaaagaataattacagaatcacaattg

SEQ ID NO: 41701 - DNA, 888 bp, Bovine  19866881113768
  misc_feature (1)..(1): n is a, c, g, or t
ntctgtccttactatgggctgaaagcctgaagtccaggtggaagcccacacatctcagtgaagagggcacaggcgggcaagacttgggtgcccctgccgacttcaccctgtgcctctgcccgctgtccgcagccttgctcctgcccggttaacctgcaaaggacccaggaccatgaggttgtatgtgggaggcagaagaagaaaagagagtgttctctgattcctggaaaaggtgtgtttagggccagcagacgtgaggccaggctaacaggctgtaaattatctgtagctgtagagtatgcgtgtgcatatctgtttccctgtgtgtgagagaaggggagagagaacttatttttccatatacaactgtaagtattccccaagcacagaaaccccatgtatgtctgagcacaaaatgggtggggcgccaaggtacctgagcctggctggtcgtgttgtcggatgggtgggacaccttcttgggcaggtacttgcccctcagctggcaggagtgattcactcaggtcctcgccgtctcccagcacggctcccagtcggccagtgactaaccccaggggagaagggtgtgtggtgacctgctttggccggaaatgacaggagtgcatagctgcagtcagcaccttgtcccaggggtgctggtgcaagttcctgggctggccagacacacaggtatttctggaccgccgcatagggcccattgccatgagcttcccgccagccagcctggatccctcagcacggggtgtggactccttcagcccctcccatgacccgttttctgtgtttccacagggcggcatcttcctatttctccccggccacagcccacctgtcacagttgagcatctggttgcctcaagttgattt

SEQ ID NO: 41702 - DNA, 1126 bp, Bovine  19866881162129
  misc_feature (1)..(1): n is a, c, g, or t
ngtaagtgtagaagcttgggggaatccaacaaggcctgtctgcttggcattcctttgtcttcatagataaggatgctccatttctctgagtttagggagggcatctgtcgtgtgaatgttttacggtctgcttcataggcttccctcgtggctcagctggtaaagaacccgcttacaatgcgggatacttgggtttgatccctgggttgggaagatcccttggagaaggcaaaggctacccactccagtatcctggtctggaaaattccatggactttcactttcagggaagaggggtggagggaggagggcagagtgaccttcttgcttctgctgtttcatcaaaatcctccagcttaaaatgtccaacaggccaaggtgccacattttatggcagtgtatcctgaaccccatcgttgctgctggttactgttcctacctgttccattcatgtagtccttggccagctcaaacagccggaggtgcatgttggtgataggattaaaggacccacaagcaaggagaactacttctgtcttctctgagttctccatgctgagaatttgaagttgttgatataaatggaaaactctgacacttctcttattgcctacaaaggaaaaagaaagtaagttcagttcaagtcttttgatgtccttccacatactcatttcaagcaaatggagggactctcctggcggtccagtgatggactctgcacttcagtgcagcgcgctcggattcaatctctggttggggagccaaaatcccacatactgcagtcaaaaagtaaaaacaaacaaaaaacatcactaacaaaaaatccacaaaccaaacagatggaaaaaatgtttggcttcagtgactacgctgggtgaattgcaaaaatggctccatttccccacccttcctttaaaatgtgaatttatagctcttttcataaaggaatggaatcttccaccccctgtgactcgctttggcccaaataacgtggcacatgggaaaacatgcccattctgatcctatgcctctgaggcattgtgcacacccattctcttttggactcctgcccttccatgaagacaagcccaggccagcacgctggaggatgacagaacctgcagga

SEQ ID NO: 41703 - DNA, 771 bp, Bovine  19866881262444
  misc_feature (1)..(1): n is a, c, g, or t
nggtgtagaatttagtacccagcaaggattaactcctcaccatcaacaaaaatgtgtctttggaatttagtggggaggatggggaaagttgggcttctcaggtcgttctagtgataaatgatatgcctgtcaatgcaggagatgcaggagacatgggctagatccctgaattgggaagatcccctgaagaagggagtggcaacccactccaggtattcttgcctggagaatcccacggacagaggagcctgacaggctacagtccttggggctgcaaaaagtcggacatgactgagtgactgaacacgtggggtaagtagatcagagataaatacaggatgcctagttgagtttgaatttcagataaacaataagtaagtttttaatgtaaatatgtcctgtgtaatatttgggacatacttatacaaatagttatactaaaaattactttaaaaaattcaaatgtagctgggcatcctgcttttctatttgctaaatctggctgccctagcggcgggtactgtcaatcagccaagtcacccctcccttcttgccctcttgggatcatctttaagaagtaaatttagggtaaattaagtccacctaatctatcagagtcttgatttcctcactcataaaataaagttgttgagaggattaaatgatgcgttgacagatgcacccagaccagcgccgcccgaaagagacaaaccagaacatgtatttatagcctgcttgcgtttgcattttaggagatgtgcacacatgttt

SEQ ID NO: 41704 - DNA, 2841 bp, Bovine  19866881346129
  misc_feature (1)..(1): n is a, c, g, or t
ngagcggagcactggccggcggcctggggcagagccatgctccctcctgtcgctgtgtgcggcttgctttgccagcagtgagcatcgagtgcttgcgtgccctgtcgcttcaggagtgtccgactctttgcgaccctatggactgtggcccaccaggttccttctgtccatggggttctccaggcacgaatcctggagtgggctattgtaccttcattaatcaagcgtctctaggggcggccatgctgagttttctcccagtttcctctctctcgggtcctggggtcgccatccccaggacaggtttggtggatgcttgtagaactgtgctctacaactctatccaggatgcttgtcctgtgtctccccgttgggctctcccaggacacaaccccagaggtggaggagccaaccccttcctctctggaaagcatgtaccagccccaggcagcccaccctactaagctggactggtagggatggatgtacctacaggcctctccggggactgtctgtcaaggagcaggaaatccagggaagggccctgctccctggtttttaagggacactgactgagtgccacccacttggagggcctttagccactcctgtctccccagtgcgtgcctgctgcgtgtgtgctcagtcgctcagttatgtctgactctttgtgaccttgtggactgtagcctgccaggctcctctgtccatgggatttcccaggcaagaatactggagtgggctaccattccctttctccaggacgtcttcctgacccagggatgaaacccgtgtctcccaagtctcctgcattggcaggcggattctttaccactgagccatctgggaagcccatctcccccagcaaccacaaataaggaaaaaaaaaaaaattggcaaagtatgtgtttcaaatttccaagttgatgggactactgtttaattcatcaaacaaagaaattaagaaaaaaaaataatgtactggtgaggtaattgattggtcattagggggaattctagattccacttaaaaaaactctattaggtaacttgtttgtaaggataaagtttttttcttttaaggtgtacctaattttatttattttttgactgcaccatgtggagtgcagggatcttatttcctcgggattgaacctgtgccccctgacttgggagttcgggatcttaaccaccagggaagactcagggataaaatatttattaataacacatttctggatgattttctggtgctgtcctcagttggcaccatgtcagtgtgccctctgtcccaggctagagcccttgaagagccaccctcgagccctctgatgagagtggacccccacccgcctgactgttggtatctaggtgcccatcctaggacagcctgagtattaatagattctagaggaaactggcaaagggcacagttctgcaggccagaagctgaatggagcccctgcaccgcgcccctgcccggctgggatagcagagtaggaaccgttggggagggagtagagaacactgtgtccgtgagtccgtgtttggggttttagtctggacctgagcaggttgtgaaataagggcatttgagccatgtttatcgaaatttcaaaggaccgtttggcccaaagtgacatatttagtttaatatcactgatgttgccttggatgtcagagtgctgccagaaaaaggctctgtgatcaggctgcccagggctggaggatggctgatggttctgcaaggagaacaggagggcctctgagctcagggaagaaggaggggtgtggggcttccgtgtagactgtgaccaagctaggaactaggcgggggcctcgcctgtccccacccgcactcagggtttcacagatccccgtgtttcttacacctctttcacaggctcagaaatctcaaaaggacgtggacaaatttgaggttcaaaaaaaaatttgacgtggaaaaaaattgatgtcatttgaaagacatcaattgtgcagtatttttcatttttctctgacagagtttcatgtgcattttctgttttaagcttcatttttctacgataaaactagtagagccacagagagctggggaacctggggatgaaaagcaagtaaaacccctgtggctcggatcataaaacacggttggcatgtggctccattccctctgttcgtgaacatggctacaatcccaggtcacttgcaaatccaagttatgtgttaagatagcaaaacatggagagagtaggtcttaagtgttcttaatacacacatacacacatacagacaggcaactatgtgaagatatggatgtgttaattagcttgattatggcaatcatttcacagtgtatacctgtatcaaatcttttctttgtatacttaatgtatataattgttgtcaattaaatataaagttggaaaaaattaaaagcagatttcttcaacaaataaattgcaagatgaacagggaacccatagataaaaagaaatttaaatgtcaggtcaaccagtcagtggatcctgattcaaacagactgctttttaaaaaaagaatatttttggcatcaaggagactattcataatacagcattaatgatttaattatgttgaagtttatttttaggtgtggtgagattaaaaagattctgtactttttgtgcatttagaaatatttacagatggaataatatactctcttggatttgctttaaaacaataacagttggagggagagggtagaggtcaagatgaaatgaggataaatgtgacaacgtgttggtggcatgtgggatcttagtgcccctactagtgactgaacctgtgccccctgca

SEQ ID NO: 41705 - DNA, 3128 bp, Bovine  19866880209237
  misc_feature (1)..(1): n is a, c, g, or t
ncgaagcttgcaaacgttatgctgggtgaaagaagttagtcctaaaaggtcacatatttatgatcccacttatatgaaacatccagaataggcaaatccacagggacagaaatagattagtgattgtctaagctggaatgggggctggggggcggcaggctggaggaaaatgggtggtaactgctgatgggtacaggggttcttttggggatgacaaaaatgttcggagattggccattgcacaacgttgagaacgtggtggggaaaaacactagtttgtaaactttacatggtaaatcaaacagtatatgaattatatctcaataagttcagttcagttcagtcgctcagtcgtgtccaactctttgcgatcccatgaatcacagcacaccaggcctccctgtccatcaccaactcccggagtttactcaaactcatgtccatcaagttggtgatgccatccagccatctcatcctctgtcgtccccttctcctcctgcccccaatccctcccagcatcagggtcttttccaatgagtcaactcttctcgtgaggcggccaaagtattggggtttcagctttagcatcagtccttccaatgaacatgcaggactgatctcctttaggatggattggttggctctccttgcagtccaaggggctctcaagagtcttctccaacaccacatttcaaaagcatcaattcttcggtgctcagctttcttcacagtccaactctcacatccatacatgaccactggaaaaaccatagccttgactagacggacctttgttggcaaatgcctctgctttttaataagctgtctaggtttgtcataactttccttccaaggagtaagcgtcttttcatttcatggctgcaatcaccatcttcggtgattttggagcccaaaaaagctgttcaaaaaaaagttgcacaaattctactgtcaaggatattcaaaaattaagtcagctcaagaaaggtacatggtatcatcaggaggaaccatggaaatccttagaatgcatataatttttttaaatagtgagtgtgcttagtcactcaatagatatagattttatttagtatcctataactagaacttaagagaatgttggaaagcatctgactttccttttgtattaatttttgttgaagcatagttgcctcacaatgttgcattggtttcctgctgcagagcacagtgaatcagccatacgaatacacgtgcccttctttctcagggtcaccacagcactgagcagagctccctgtgctctgcagtgggttctcatcagttacatattttatacagtatcaatctcccaactcaccccactccccttcctgccttggtattctcacatttattctctgcatctgcgtctctatttctggaaagcatctgaattccttacttttaaagcactggaaaatgagatgcagaagttcactgatttgtctcagatctcgcctccagcttgtagtaactgaaggtccacactcaatcacagcagcatcatttataacaatccaaagatggaagcaacccaaggatccacagacggatgactggttaaacatgtgatacatacatacaaaaggatatcattcagccttcaaaaggaaagaaccatgccacgtgctacagcaggaatggacttggagacatgacgctaggacaaagaagtcagacacaaaagaacaaatactgtgattctgcttatgtgaggaacctaggataattaaatctacagaaatagaaagtagaatggtggttattgggagctgggggaggaaaaaatgcagaactgttgtttgatgggtacagattcagttttgcaagatagaaagggttctataaactgattacacacaatacgaatgtactagggcttctccggtggctcagtggtaaagaatccgcctgcaatgaaggagctgcaggagacgtggcttccatccttgggtcgggaagatcccctggaggagggcatggcaatccactccgtgttcttgcctggagaatcccatggacagaggagtctggcgggcaacagcccatggggtcacaaagagtcggacatgactgaagccatagcaggcacgcacatattttatcacaaatttacaataaatttttataaaaagagagagatcaaacctcaagtctcccaacacttatcctaaccacaccctgcagcatggcgctctcagacccagcaaaatgaccagatgaaaagcagaaaaagcccattctgctccatcagacttcacgacggagaaatgaagtcaatctctccaagggactgcttccaaagaatttcaggaactttaacaaacctcagcaacaccaatcaatacacagatcaataaaatagagtccactccacaggtctgagtgttccccagaacaaagccctgccagaaggtgatggtgatggtggcagagcagctcaaacagctttctccaggacagggcttctcagaccaaactgagcatagaatcaaccagagaccttgtgaaaatgcaggctcaccagggtgaggcctgagaatctgcacttgtaataggtgcccagatgacgggggtatgatgctggtcccagggaccactctttcccactccaagtggccagaatggagatgaaactccacaccacatccctctccccagacgagaagctatcttcatgggctgaaggctccatggcaacattccactttcagcggaagtacgtacccccatcacaagccagtatatttcagttcatttcagtctgaattagaaaacccacatattttgtggtttctgaaaatgcaggtttgatttacactaaaactgagtcagtgggttgactgcttgattgttggcggcatgggtaagaaaccaactgtggtccactctttaaagggaatattaaatatgacttaaaattccaaagtcgatggaatgtggtctaatatctgattcataaacgtgcccttggtaaaccatactggaaaaagccacaacacacagagagctgaaacattctgttctacacagggtcatagacaatagggagtttgggtttgtttttggttttcttaagttttttaaatttttattcatttatttat

SEQ ID NO: 41706 - DNA, 1111 bp, Bovine  19866880436783
  misc_feature (1)..(1): n is a, c, g, or t
ntgtctgaaatctttgtgaccccatggactgcagcacaccaggcctccctgtccttcaccatctcccagagtttgctcaaactcaagtccattgagttgatgatgccatccacccgtctcctcctctgtcgcccccttctcctcctgccctcagtctttcccagcatgacacaggatggaggttgagttttctggtatggttgctttgtcaccaaattatcttcttgccttccgacatgctagagtaaataaacgtttgttgggggtttacgaaggcaatgacaggtccttacttaagcaaagatgctgaccagtaaatgatgatgggggtgtgtgaaactgccgggccgcagagggtccaatctgccctctgagagcatcttgccctggctctcatgggtgctccctggagaaggaaggggcttgaaagaggctttccatggaattgcaggaggaaaggttggaggctacaggcgtagagtttataaacacgtccgcagagcggttttgcaatgcctgttattctgtccttttgaagaggaactcttccggggagaggagcattgttggatgggtgacctaatttgtttcctctgtttccttctggcctgaactgggcaggtggccctgacccacaaggtcttagaccggctgaaaggaaatccatttgctgatagagaagatacactgtgagataaagaagggaatgttttgctgacagcttcctcctctgcctgactctggctatagtctaagtactaatgaactggtgactgaaccacactccttcagtttctgaaatcttacccttggaactccagctagcccataatcgttttctaattgttttatgtgcatttgttttctctccctaattctaatcctgaggacccttcgagaacagagttcaagactgttttccaccatgattggactcaataaatacctggctgaagagttaaagaggggtttagttttcatagtttatgtttttcctgtttcccaaaatgacatgataaatataaccttttctgtgtgtctgtgtgtgtgtgtgtgtagttgtggggcttatggggttctagttccccgaccagagatggaaccaatgctc

SEQ ID NO: 41707 - DNA, 1526 bp, Bovine  19866880465258
  misc_feature (1)..(1): n is a, c, g, or t
ngggatgatctgctctgctggtgcgtacattttatttcttaatgggagaaactgtatgtgattttgctgccagtttagtgaccttcacagaataaatgtattcatatacaaacttctgtggatcccaatcatttgaaaagctggtaaaaaagccattgttattcagtcgctcagtcgtgtctgactttttgcgaccccagggactgcagcacgccaggcttccctgtccttcaccaggctcaccatgagtttgctcaaactcatgtccattgagtcagcgataccatccaaccatctcatcctctgtcatccccttctcctcccgccttcaatctttcctagtgtcagggtcttttccagtgagccagttctttgcatcaggtggccaaagtattggagcttcagctttagcatcacaccttccaatgaatattcaggactgatttcctttaggattgactggttggatctccttgcagttcaaggggctctcaaatcttctccagcaccacagttcaaaagcatcagttctttggcgctcagctttttttatggtccaactcttacgtccatgcataactactggaaaaagccatagaactgctttttacacaaatgcagatgtgcttatgcacgcaattttgtctctaattccagaaggttcaaagacctttgaaagttctccagggaccctatgctgagcacctttgtattgggtcaattcctagggcctatgtgaaattgctaaagtgagcaagactgtatgacccttgccctctacaagcataaatgtttaaaaaatatacaaataacttcatgtggaaacttataatttccatctgggcagtgatttttaactgagggttgagacccttttgggatttatgaaataatgttagtattttggggccagcattatcaaaccaatggaatggaaaagaaaccaggctatatgtccgtatactgagttgaaatgagaaatatgggtccccgtttgagaaaactgatgtctgctctgcttgttttactttatatttagggcagtgggagcaatttaaagaaatgcatgctttcttttcgtggtctgttttgactgtattggccctttttcttattaaaaaacggtccaagagtccactggttccactaacattttatgtcttaacagcctatcccaagtcatcacttactcacagttgtgaaaataaacttaaatctggctcttgaaggctctcatgatttttctttatatttaattttcctcctttccagataagtaaaaatcagtgtgatccccaccaggccaccacgtctccacttttattttttatttttttttacgtctccacttttagacaacattccttaaacttggttttctcatctgtgaaatgatcctgataatgataatttccttcttctaggattgttgggaagattatgagtttacatagataggatgcatagcttaaattgttcagttcatttcagttcagttgctcagtcgtgtctgactctttgtgatg

SEQ ID NO: 41708 - DNA, 3812 bp, Bovine  19866880634057
  misc_feature (1)..(1): n is a, c, g, or t
nagcttagatatacatctaagtgattatatatatatagagagagagagagagagagaggattatatatacacacacacattcttttccagattcttttccattacaggttattacaagatactgaggatagttccctgtgtcatgcagtaggtccttgttgtttatctgttttacatacagtagtatctgttaactccaaactcctgatttatctccccccaccccctgctattccctttggtaacaacaagtttgttctctatgtctgtgagtctatttctgttttgtaaataagttcattgatgtcatatttttcaggttccacatgtaagtgatatcatatgttatttgtctctctctgtctgacttattcatttaataagataatctctaggtccagtcatgttactacaaacgacattatttctttttttttttttttttttgatgagtagtattctattgtggcggagaaggcaatggcaccccactccagtactcttgcctggaaaatccatggattgggaggagcctgaaaggctgcagtccatggggtcgctgagggttggacacgactgagcgacttcactttcacttttcactttaatgctttggagaaggaaatggcaacccactccagtgttcttgcctggggaatcccagggatgggggagcctggtgggctgccgtctatggggttgcacagagtcggacacgactcaagtgactcagcagcagcagcagtgtggagaaaagggaaccttcctacactgttggtgggaatataaattggtacagccactgtgaaaacagtatgaaggttcctcaaaaaaactggagttgccatatgatctagccttcccacccctgacaaaactctaattctaaaaagatacacgcactcttatgttcacagcagcactatttacaatagccaagacatggaaaaaacctaaatgtccatcaagagatgaatggataaagagatgtggtatatgtattcaatggagtactactcagccatcaaaaggaatgaaataatgccatttgcagcaacatggatggacctagagattaccgtatatttaaccttttcactttttaaaaatgtagctactagaaaatttaaaatcatgtgttttattgaggagccctggtggagggaacgggttctcctttatcttcccaggaccacctgctggaataggtggtggtagtggtgggtttagttgctaagtcgtgtccgactcttggaagcccgtggacctgccaggttcctctgtccacaggattttccaggcaagaataccagagtgggttgccatttccttctccaggggatcttcctgacccagggatcaaacccaggttttctgcattgcaggcagattctttaccgactgagttaccagggaagcccagagtaagtggagtctctcttatttaaggaatctcttagttctgatgggctgtctgaagtgtgttttgaagccaaggtgtggggaaaatgacagtttgaagggagagtgacttacaaacagtgcgttttcataaccagctccctggaaggacagaggaattttctctgcagcagaattcgttaaggcaaatatagatgatcaggtagacacgataccagcacctattatgaataataatagctctgcacatttaattgcctgacttccttgtaaaagcttaagagtaaagaagagtagtcacaggaaccctaaaatagtttcagaaaaactaatcaagagcctggaagcagtagaaaaggagggggtggtacagcatggggagatgagatctcatccgtcgctttgtcgtatctgtaatggtccgtcagcatcaggctgtttgtgtgggggcctcctggattgtgccttggtggtagctggtccagagagatgtttctctcatctccgctcctgctccatcgccagaataattcgttcgtccttgcatcattaaatcgcatgtagaaaatgaacttcatgcctatttacatggcttgctgttggtttcatgtttgtttcccttgctgcccgttgctgatttgtttgctctgatggatgccaaaatccttgcaagagagacctcgttttacatgtttaaatcctgtgttgttgaacagaaaaatacatattcagtttgttaatggctatagttagtggttcattaggaaaaaaaaagcagatcattcatttggcttctcgtctgtgtttccccttcttgccctgctctctccatttctttcacccttcgctccttgcttttttttttccttctaaggtataggtcacatggagaagtcctaaaaaaatgtgttcagatggcctgtctgcacctttttaaaaaaacacagaacaataaagccttgccttcactgagtatcacttcatttattttttatttgaccacctctgcccttccttctgcatagcctcctggcgctaaggcacccccagggctggaaggcactcacgtggtacccagtggctggctcacagcacagactcgccttggacaagggccagacccaggcttggagctgggcaagcagtaatgcaccagggagcagactggaaggaggcccggggtggagtccccacgggctcaatggaggcctggttttacttaagatattccaaacagtgaagggggagtaaacagtccgctaattaaatctggaggtggcagcaaacctggaggtgttgcaaagccctccgcacacagaggacgttgggaaaacacacggagccgtggaaaggggaggccaggctcggggagatgagattctgcctggaaaagtacaagccgccatctggagagaaattagccattggaagtgcactctgtggggcgtaagtcagtggcgctgtaattgactcggagccagaactgtgaagttctgtttcttgttcttgatagtcagtagtaatcgtttatttttttaacccctgaatttatgactcaggagtcaggccagtcctgctctgtttataaggctcagcgttaaaggtaaactgataagaagggtattcctccaaaatcatttgcccatctgcttccattttatttcgccctggaccccgaagggtggccaggggtccaagatcttggaggctgggtctgggaactggagtgtgtctgaccagccggtgggggcagctgcctgctcagtgtggatcaagacgtgccccgcttctgggtgtgtgtccgccaggagggagcctgcgatcggtctctgggtacccgacggttaataggttcatggttctccagccttcatggccctgccgcttcttaggagccctttaatcacacacagatgctttagtgctttgagccggcatccatttgccagtttgaaaacctgcactcattttttaaaaattgtgggatcttagttttccgaccagggattgaacccaagcccgctgcagtggaagcgcagattatattaactgccagggaagcccccccaaactacactcttatggtggaaaacaggattgcgtcgagggtaaagagcagtgatctgggaagtgagatgtctgttcgcgtctctgtgcgattttggccaagttgtttcatttctcagcctcagatttcttatctgtaaaatggccccagaaggttaaagagatgtagatggagacctttgcttgggagtggacttcagctgcgaaagtctttagcgtccctgagctaagtatagatcattttcagaacctcttcactaggagttcagaggagaccctagcagctgagggtgccctgggagatggcacgaccctagacaaga

SEQ ID NO: 41709 - DNA, 1466 bp, Bovine  19866880690939
  misc_feature (1)..(1): n is a, c, g, or t
naacagacatttatttctcatggttttggagctgggaagtccaaggccaggcttgttgttgagggctcccttcctggcttgcaggtggctgttttcagtgacctcacaggagaggaggggagttctggtttctcttccagtgacactaatgacactaatcccatcatggaggtccactctcaagacctccttctaagcctccttagctcccaaatgcctcatctctaataccccactggtggttagggctttacatatgaatttggcgggggtgggggggagcggtaaacattcagttcagttcaattcagtcgctcagtcatgtctgactctttgtgaccccatgaactgcagcacgccaggcctccctgtccatcaccaactcccagagtttacccaaactcatgtgcgttgagtcgatgatggcatccagccatctcatcctttgtcatccccttctctttccgccttcaatttttcccagcatcaggatcttttctaatgagtcagttccttgcattaggtggccaaagtactggagtttcagcttcagcattagtccttccaatgaatattcagggctgataaacattcagtccatagcaaatattgtgtattataaaatatatattataaatagtaaaaacgtattataaagtaataataatagtggtaatgataaaggcagctaaactagcatgtattgaaccagggtcgtggcgcccatacttggagggtttaacaatatatggacacatcataggcttgaggctatccagttggcttggtgccagggagatgcgggttccatccatgggtccagaagatcccctggagcagcaaatggcaacctgctcccatagtcttgcctgggaaatcccatggacagaggagcctggcgagctgcagtccgtggggtcgcaaagagtgggacatgactgagtgcacgtgagcttgacgccatgctccctcgcccttgtggcggtggctgtatgtgctgacccgtgtgtgatttcatcttgcaggccacagcctctgcagcgagcagggcagcagtgctgaggctgctccggaggaggtggaagggccggacttggaatcctcagatgatactgatcacagcagcaaggtgagagatttccattttcacatcccatgtctcaaaccaccaaagaatcacagctgacacgtcacctctgcagctgtgtgtggtgggaaggcccctccacgggacggaagtgtttctacttctgagaggtcactaaataggatatggcatcctaatgatagccgtgagaacaaacccagatgtgacaatataagccagagctcactcttaatgaactaaagtctgtgtccatcctgtttccttcttatgtcctccctttctgtatgaggaagaggcatcatgagtgtaactgggtcaggtatactttcctgctactcacggtttctataaggaaccg

SEQ ID NO: 41710 - DNA, 564 bp, Bovine  19866880749548
  misc_feature (1)..(1): n is a, c, g, or t
ntatttgaagattgaacagtacaagtacagcagcgacccccccacccaacattagtcctcccccacccctcacacatacacacaaataacgcatcctaggtacacaagcttccctggggcgacatttctgctctagccctgggtctgaaattaccaccctctcccacctctgagccaagatttcaagcacacagcagggtgggggtggggggatgtccccagcaagtcctcaattccgacgcagctgggcttaaaattgagcttgcaagcccagggacagagcggggaggcagagtgattgttcaacaccctcctacactcagctcatgactaatgcatcacattggcagagcaattcctcccagctagctggaaccgacaagtccacatttaaaccaaaccacccctcggaaggctcggcgcagccctcccaagcccgaagtgtacccctttctgaaaatattcactttgacagaaaacaaacagagagattaggcatggagttctaattctgaatgcttcccttcagcacttgttgctgttcagtcgctaagtcatgtccga

SEQ ID NO: 41711 - DNA, 1420 bp, Bovine  19866880881576
  misc_feature (1)..(1): n is a, c, g, or t
nttctgccgccgggcccttttcttcagaatagataatccccatgtgctatcagggggtctgagatcctcagagactgacttgctgctctgctaactttatttcttttcctagagggagaaagaaatggtcttacccgccgtccaccagcacaatcctgactgtgacatttgggtccatgagtatttcaccccgtcctggttctgtctaccgaacaatcagccagccctgacggtcgtccggccgggggacacggcccgggataccctggagctgatctgcaaggtatgaggccacttggggttgtttgtgttggaggactctacggacactcagatgcgggtggcagaggaggattcttgaaagaacacctttatttcataacagagcagtgttggatcctcttgtgatatatgcataatggatggatgtgatttcttccacactaggaggagagggaatctcttagtagcttcttgcaacatgtgttcttgatagatttgtgcaaagcctcttatgtgctcattgcacaagttgtagagaatttaggtaaagaacaaagccgaaaattaaggcacccttgctcacaaaattcagaagtcacctcggtgaacattttggtgtttgtccctggtctctgtttgccacaagcacacatacgtgtattcagtggcatcatattatgtgcacggagcttcccaggtgtctcagatggtaaacaatctgcctgcaacgtggagacccaggttcaatccctgggtcaggaagatcccctgggggagagaatggctaccctctccagtattcttgcctggagaatcccatggacagaggagcctggcgggctacagtccatgaggttgcaaagagttggacacgactgagcgatcaacacaacactttatcacttgcactatttgtaacctgctctttgacagtttctaatataccgttatgaccaatgtagatagcatattcaaaagcagagacattactttgccaacaaaggtccgtctagtcaaggctatggtttttcctgtggtcatgtatggatgtgagagttggactgtcaagaaagctgagcaccaaagaattgatgcttttgaactgtggtgttggagaagactctttagagtcccttggactgcaaggagatacaatcagcccattctaaaggagatcagccctgggtgttcattggaaggactgatgctaaagctgaaactccagtactttggccacctcatgcgaaaagttctcattggaaaagactctgatgctgggagggattgggggcaggaggagaaggggacgacagaggatgagatggctggatggcatcaccgacttgatggacatgagtttgggtaactctgggagttggtgaggacagggaggccggcgtgctgtattcaggggtcg

SEQ ID NO: 41712 - DNA, 1026 bp, Bovine  19866880893720
  misc_feature (1)..(1): n is a, c, g, or t
ncaggtggtgctagtggtaaagaagctgtctgccagtgctggagacataacacatgaagcttcgatccctgggtccggaagatccccaggaggaggccacggcaacccactccagtattcttgcttggagaatcccgtggacagaggagcctggcgggctacagtccatggggtcgtctgaagtacgtctgtatctagctatcccctgttggtttgcttctttggagaaccctggctaatgcccatcccagtagagtcccttacaaccatttggtgttcctctaaagcctgtctactcagagtgtggccagccaaccagcagcaacatcagaaatgcaggggctcggggggccccccaatcccacacacactgaacccgaaaatacagcccagtaaaagcttcaggtgagtcgtgtgcccacagcgtctaggaaacatcagccctgtgggaaaacgcatcccccgggaggaatgacggtatgtaaagtaacttcttagtaaaagaatttgtttaaccaagtctctcttccctgaggacagatgtagggagtggggcgaaaaggggttcagaagaggtcttaggaagccaggacattttcccagtcatgacaagccatcagttacagaaaaaacaaaaacaaggaagtctcaatgtgcaaactaaccagcccacccaacacaaagaaactcaaggtcagagaggcagggccaggcaaatctggcctcaccacagcctcccctttgtaatgtgcttgattgcattttattttctgtgttttcactgaaatggcagttcgcggagaaaccctcgcatttggctgcgaacaggctctgagcagcaagagcgcttctgcagaattggcaggagggaagggaccgtggagcgtttcagaaactccaaggcaaggggacaaccgacgggggaaaaaaagacctcctccaaatgagggcaagagctgagaattaaaaacaatgagcaggagagaagcagaatcgtgaacctagagaacgtcttactggttgcca

SEQ ID NO: 41713 - DNA, 1117 bp, Bovine  19866880897464
  misc_feature (1)..(1): n is a, c, g, or t
ntgataaggtagatggaatacgcagagtgtgagtgatggcctctggtggtggaggggaggaaggggcaaggaagacttgagagaagttgaactctgagccaggcttttattctcttttccttgcacatttattacagaaaaatagtaatatatagacagtcaaaaagagaacaatcaaaacctaccccttgacctgctttcagaggtacccacgattagcatgtagcttatttcctttgagacttcttttttcctcttctgctgagtggattttttgaaggatgtcagggagggttaatgttttcctacacttaattccatcaatttggttacatcagtgtgttatataaggagcaatttttacttgcttttaagattctgtcatgaaatatttaaaagacacagaacagcacagagaataacatggagagggcagtgtctggattgggctcgagtcacgtggagaagactgcagtcttaggaggggggcggggtgcaggcctgctgcacttacggagtgttcccgaggtctgtccctgcatcgggcccttcaggcagatagtttcctgggtgtttgtcgctaagtcgtgtccgactcttttgggaccccgtggactgtagccctccaggatcctctgtccatgggattctccaggcaagtatactggagtgggttgccattccttctccaggggatcttcctgacccagggatggaacccgtgtctcttgcatctcctgcactggcaaatggattcttcaccactagcgccacctcttcctgtatccctacagtaaccatctgaggttaattcccgccactgcctcgcctttgattgtttaactaaggaggctctgagaggctgaaggattcgcacaccataacacatggatcagggtagagctgtaagtgttacaagcttgataccacctaatctgaatgctgtttcctcttcccaagtgcctcaggaccccctggctccaccatcctcatctaaaaccacccttcttttatgtcttgactttttcttttttttccaaattattttggacacatgagatgaacaaaattgagcgattttttgtgtgtgtggtaaaatatatataacaaaatagtt

SEQ ID NO: 41714 - DNA, 1398 bp, Bovine  19866881024872
  misc_feature (1)..(1): n is a, c, g, or t
ncagaaaattggtttaagacttctttaaaaaaatgtaaatctcccctaattatctgaatgatgatgctaatctatttataaagaacacaaaggcctctgagtgaattacagctctgaatcaattgaagcgtgcagctgacacagcgcccagagccccacaggaaaggttctccaaggcggcttctggaatctgggacttgacattcagtctcacagcaagtgtgctaaggtgcagcacattttcagtgggtgttcatttggagaggcgaagaccgtgttgctcgcatagcgatgtttgagaagaaaggaacccaaagtacataaagctgtttgcaatatagcaagtacatgaaattacagattgcaaacatacaactacccaatctgccgctctggagatcagatgaaaattctcttccccaagcaactacttatgtcgggctgagaaacacagaaaggtcttgaccttcttcaaatgaatcaggtatttatggtcacccaaaactatgatgggggcttccctggtggctcagacagtagagaatctgcctgcaatgtagaagaccggggttcaatccctgggttgggaagatcccctggaggagggcatggcaacccactccagtattcttgcctggagaattccatggacagagggagtctggtgagcccatggggtcgaaaagagtcagacatgactggcgactaacactttcactttcaaaactatgatgaaaaagtgaaaaggaagatttttaaagaaatctgttcaatatatggtgtatgtgtcttcatgtgagaaactgagagagaaacacatttgtgtgtgagagaacaagctctccacttatcatatccacaagaataacagaaaaaatatatattggggttgaaagcatgacaccacccaaaaatgacatgagttacccaccagtaccccatgtgaagagctcttgaggtaatacctttcatattttcttgcacagtaatttagggcccatcaagaccagctgaagtaacaaatgtcaaaagagattcaaatgaagatttgcatccacggctgagagaggacgtatcaaagccacacagagcagtaaaactggaaaaccacttcagagatccttgtcaagtcgtgctcaggattaatagtcaagatggatatttatcaaaaacacattagcttctactcaccagggcatgaaaagatgacacggaaaaaattccaaggcggcccattgccactttggttggtcggcttgcaaaggcaagtagccttttagggttgggcagctccccgccttggaggctggctaggtaacagcggtaccgaaacaggtccatttggaactgctcaagattctgctcccagacaaagatctagagtggtgaaaacacgga

SEQ ID NO: 41715 - DNA, 721 bp, Bovine  19866881210518
  misc_feature (1)..(1): n is a, c, g, or t
ntaaggccagtctgactcatcatggccccaaattacacaataatctatcaaggatttagccttatgggtttcaaatgtacatacatgcaaacagatggatgcctggataaagaagtgagactagaatgaggaatagtctggaagctgctagaggcacagggatacagatcccccgtgctctaagcattttgcttgatctggggagaaaaagtcaaaaaatgtgtgcagtgcttacccagtttgtgacctcttggactgtagcctgctaggctcctctgtccctgggagtctccaggcaagaatattagagtgaggggccctttcctcctccaggggatcttcccgacccagggatcaaacccacacctcttgcgtctcttgcattggcaggcggattctttacctctggcgtcacccaggaagcccccatattagacagtccctgcccgcaaagaattcctagtctagttgagaagacaggcatctccaacgaacagctcagatccaggcagatagtgtcagaggctaattggattctcaacaaagtgtgatcacagaggcagaagcacttaatcacagccagccggacagttgacatttagccccagcctcatctggggctgtcatctgaaaagtaaatccactctaacagttatcatgaaattgcatccatgatctttgagttcccaccagtccatacatttttatctgattaaccaat

SEQ ID NO: 41716 - DNA, 1214 bp, Bovine  19866881217491
  misc_feature (1)..(1): n is a, c, g, or t
naccatcacacttggagaaggaagtggcaatccactccagtattcttgcctggaaaattccatgataggcttcagtccatggggtcgcaaggagtcagataagactgagcacacagtaccatcacactgggggttaggttttcaatgtttgaatctggggcagggggttggatacaaccattcaatctgttgcaacaactgagctcaagaagtacgtgagtgagctgacatggcggcctcattcccgacagcccctgggagcgagggctgggtggagtggtgtctgactgagacgccctcgttttatctgctctctgaacaaggcggtcagaaaggttagccttccccacggggtgtgtagacccttctgcttgacccccagccagggcttgcctggaaatgcacactggttcttctctgctgacctctgtggtgcccgtttcttctcgggccccaccctgcccctcacagaccaccagccagacggagctggagaactggatcaccgccatccactctgcttgcgcggctgctgtggcaagacaccaccacaaagaggacacgctccggctgctgaagtcggagatcaaaaaactggaacagaagattgacatggacgagaagatgaagaaaatgggcgagatgcagctgtcttccgtcacggattcaaagaagaagaaaactatattagatcaggtaattgttctcccgtgtacagacgtgggccaatcctcaggtcttgaaaggggtgtttctgctgccttggaaccgagaaatatccttggttatctcctccttgtcagcctgtcacccaggctgctagattctttattttgactgtcagttcttctcaccagttgttcacagttgattgttatgagctgaagggaacagtattacattggaggaaaaacagaaatctaatagaggagccctcctgctcccaccagtggcaagctgttcttggggatctgggtaattggcatgtctgtgatttcattccccgtggtatcaggttgacttggtgcccagctgtgatgggtctaacttcatccctgactcctcaataaagttaaatttctatatttagtaaaggtagagtgtgctttaaaaatatgtgtataattgctgtatatgcaggtaagtgtatttcatgctaaaaaggaaagatttagtgagataacagaggacattttgccttctattcagttgtt

SEQ ID NO: 41717 - DNA, 1553 bp, Bovine  19866880361213
  misc_feature (1)..(1): n is a, c, g, or t
ntcagctcaaccgggccctgttattccctttgacctcttgattcatgcagagtggatgggaggtgagcatgagggtctccaatttataggaaataaaccacagcatttcccaaaggacactgctcctatgaaaaaggacatgtggggtcaaatacatttgggaaaagatccgctgccccctgaattagtcacaatgcactttggcacatcaaattaatgtctaccacaggcaaaccttgttcagccaacttatttgagtcgtagcaccctcccttaccccattcccccaccaccgccacccacataacagctatctacactctacagaacacacttgggaagctgctactagtggcaaaggttcttcatgcatttattcactcagtgtttactgaacacatactttgcacccagcattgtgctagcctgtgaacaagccaggcgtgcacgtgtgcatgcccagttgctcagtcatgtctgactctttgtaaccccatggactgtagccctcccaggctcctgtgtccgtgggatttcccaggcaagaatgctggggtgggttgctgtttcgtcctctaaagccaggcatagccatgttttaattttaaggacaactgggaagggacatttgcattcctctggcatcgcccactgttctctatacagagcacgtggtcaacccccggtactgacacactaactcacccactccagtgatgagtgctgactaatactgggttctaccatcgacgtggtatcagggcagggaacagctatcacttccgcccccactgccaacaaacatctgttgcatatcttctctgtgcagcaaggacacagcatgagattccaacagggacgccaatggtgtggtactcttatataatcccaatttattgttcctaactggggacacatgcacaccctagaacgaaacagagtcgtggtgttttatatcagtttctgactctcactggctctgctcatcttggaaggtctctggaggaatgcttaggcctgactacatgctggcaaaagaggggaagaaagaattttatttatctgccactaatcctcatgtgtcaaacacacaaatctgggattttccagttcctgcctggagtctgcaagggtgcatggtttatccacaattaaaacaggctgcagtttgctcccctcaccagaaagttgcttccttaagcagccatagattacaagccccggctcctgctgccagagaaagccgggggatttggttttgttagcaaaagctgacagggacctcagcagccgctctgctttacatactgaagagttgaaatacaaataggaaagtcctgctgatgctgcaggaagaggggggtgggaaggccaagagaagggtggaaaggcagggttttacttgtggaaatccagtgcctacattctgtcctcaaatgctttatctctcaagagtgctgacatggaggaggaacagatttgttccagctctggaaccataggcaggcatatcatgcactctttaagccttaccttacttacactcttgtgaa

SEQ ID NO: 41718 - DNA, 1901 bp, Bovine  19866880367807
  misc_feature (1)..(1): n is a, c, g, or t
ncagcagtgagaactcaccctggcccaggaacgagtcctggcggccccagtgaggcctaagcaactcccttggtgacatgtcctggggctccagtgttttgcccatgctctccactgtccctggccctgatttggagagtgatggactgtgctgggcaaacaagacatgccctgggagacaataaagacctgctcccattcagacatccttttcccttcactatccagaatcccacggtgacagatggcaggaggccccagcctcgggctgatggctcacagagagggctgacagccaaagaccggccaatgacaaagggccttttgactttccaatcccaatgagaagcttggatgactccagcaagtttgtttccctaaaactcactctccttgggaacaatttaaaaatcccagaacagccaaagggaggcatggtcttggggcaattaatgacccccacaacaagctaaggccatttctattatatgtaggcttgttagtgagaaagaaaccaccagttgttgctggctcctgccagtgctcagttactgtggtgggaaggggctttggaccattgctcacaaggctgggatcaaagcagacctctgctatcatttcaggcaagtggctagagcaggcaaggccataggaagctcctctaactatggggcagaactgaggtgctaagagctgaaccctaatttctcttccagttgagttgcactgacctgggtattctgcaatctgacaatgtttaactggcttaagtaggagcagttggcacagccctaaataatagcaacaaaaacacccagacaaacaaaaccccaaattaaaaacttattgaaaacagcctcaggaacgtaagcacaggtcaacttgttgaatcaacacactgttttgatggcttgtagctcagtaaatcattagagacccaggggtcaggccaggcccactgggaaccacgttgtctccacagtcagtttccaggccctggtgacctgctgcggtcattctcggctggggaggaaatgtgatcagggtactccttgttacagagcagcacttaccttacggagaagctcacctcagagagtatacaaccaccatttgggtgtgtgtgtcatgcactacacatgtcctcaacagagattctcccagtgactacaggaggtggacacagacaagtcaggccacagtcaggatgctcggagaggctaagaaactgtctagtggtgcagggctggtcagtagtggtcttggaactgaaacccaggtctgctggctccaccatctcagagactgtcacacaccgcatggcatgcacttaagtcactcaaagagcttataagacagattctagagccaacccatagatcggggtagtcctgggtatctgcatttctccaagagctctgtgacttctgactttttgatgtcagctcaccataagaatcgcattttcattaccacccaggacacaatgacgtctatccacatatgtatctataactactgagctgatacaactgaaaaagagatgtctgtgcttagaacatgtaaagtgccctgaaattttgggagacattctactctatttaaaaagcttgttgtagccccaaaattgatttcatgacccatcaatgagtgcccactgcagtttgcaaaccctgccttggaccgttctaaggccctcaggggggagtctcttggcctcccctgagtgctgagtgactcaactgttcagtctcttgctgctttctactgggctcagaaatgggcaattggtagcttagtgatcatggaaatgtggccacatgccctgagaataatggcaaatcactttgtatttgtgttttacacataatcttgcacagtgagtcgcagcacctctggag

SEQ ID NO: 41719 - DNA, 1583 bp, Bovine  19866880498890
  misc_feature (1)..(1): n is a, c, g, or t
ncaagaataaatacatgaaaattaagcccactctgcctgcaaaagagaagagaaggcaagctggccgtaggctgtcacctggaatcacctactgggaggtgctgagtcacctctagatgaaggatggagaggaggcttgagtgacaggctcactggcagcaccttgtacaagggagctgcagttcaaggtgaaaacagattctctgccttggagccaacctatcagtgtaaaatattttactcttaatacagggatatttgtgataagtagatcaacacaggaatgcctggtttcatttttcatttacatgtgctccttggaatacctctcactttcctatcttaatggcctttccagaacttttcagagcacatccagctgactcctagtgtgtctggggataatttctggtggtggtgcactgagaaagttactcttgtttcatctgccctgctgcttttctggttgagtggagaagaggcttcactctggtgcttacgacttccttcgcctgattctttcttgtttgttttctgtttttaaagataccagggccagtccactaagcattttagcaggtaaatatctagctagacttagtaaaccctcttttgtttctaagattttatttgttttaagattttatggaaggtagtactggttttccatttacattagaggcatttatttagcaaacactcatatagcatttattctatggaaggcctgtttcaaacactttgtaaagagacagccctttgtttctcacaacctgattgtaagcctttgtgataagaattataatcaccctcatcatgcttgtgtccatgctaagtcacttcagtcatgtctgactctttgagaccttgtgtatcacagcccaccaggctcctctgcccgtgggattctccaggcaagagtactgggttgccatgccctcctccaggggatcttcccgacccaaggatcaaacccaggtctcttatgtcttctgtattgacgagcaggttctctaccactagcgccacctgggaagcccaccctcatcacatagatggggaaactgaggcacaagggagttaaatcaggttaggaagtggcagaagcagtgttgaaaccagggcagcttgactccagactgtgttcttcacctctgtgcactgctgcctctccagaaggaatgctttaaaaattgatatagtcaaggggaaaaaaaaaaatgagccgattcaaaaaacatgatatgaagaaaatgaggttcatgtactatttgtaaatggcagaaatggtgatggtgaactaaaatgagcgtcgctggtcgctcccctggcctgcaggagaaggaagtgactggccgactaagcactctacctcagacacaatgcactgcacctggaggatccctggggctgcagataaaacttcttgcaggttgactgtgttgtagagacctcctgctgcagtagacgatgtatttgtaatagtatgtacatgaattcacaggtacacgcatgtgcacagtgctgcttgcactgctgtcatggaccaggaatggagccgcacagcttgatcagcaccattc

SEQ ID NO: 41720 - DNA, 1152 bp, Bovine  19866880508753
  misc_feature (1)..(1): n is a, c, g, or t
nagactatgttaaagcaggagaagggtcagtctagggtgctggtgagaatggcttcgctgtcccaaggcctgggttccaatgctgggtctgctgctgggggtcagtcatgagatccaggcagtcgatttccagagtaccagcacctctctctgttattgcaaagactaaatggatgatgtttgtgaagtgagaagtgactggcacatagtagatgattaatataataaatggctggtgctgttggtcttaatggcagctggaaagttagactagtctttccccaagctttacccaggcttcttgtaagagatgcctggtgttagcttcatggtggccaagttaacagtcactcagtgaatatgcactgggactctgtgttaggaaccatggacctcaaggggtggaagacccatccagtctggaaatctaggctgggcagacatgtagatgagtgattatacagtgatgcaaaagaaatatcatagaaatatggaccaaacacaacagaaaacagaggtaggaatggggaacgggagagtggctggagaggcttaatagaggttgggttttgaaggaggaataggagtttgtcagactgccaagctgtcccaggttggggtgtccaagctagaggaatgagctctgcccattctgaggacagtatgggacctgagtgtgatgtgtcaaagaagcactggggagatgaggctggggatagagcccagatgcattgtgaagggtctgtccttatcctgagtcaccaaatgcttttcagtagtgacatggtcagacgtgagatctagatggttctctctgacagcttagactagatttggggtgagaggaaggagaagagagtgtgtgcataaaacattgtctttgatattaattttgatcttaaaatgtatttctaaggcaccattgaagtaaatcagaaagcactagtaaataaaatatgatttaccatagatgtaaatcagaaagtagtagttaccattggtaatactattaataatatcaataaacatagtcttagaggtcttctctgcagcctggtgtacagctgcgtctccaattctgtggactttcgggttaaaggaaaccctgtgtttcctgtgcccaggctagcgtgctcccttccctccagtcag

SEQ ID NO: 41721 - DNA, 3104 bp, Bovine  19866880679552
  misc_feature (1)..(1): n is a, c, g, or t
nttcttttttgtttgtttgtttgtattttttaaattaatttatttactttaattggaggctaattactttacaatactgtagtggtttttgccatacatcgacatgaatcagccatgggtatacatgtgttccccatcctgaacccccctcccacctccctccccatcccatccctcagggtcatcccagcgtaccagccctgagcaccctgtctcatgcatcgagcctggactggcgatctatttcacatatgataatatacatgtttcaatgctattctctcaaatcatcccaccctcgccttctcccacagagtccagaagtctgttctttacatctgtgtctcttttgctgtctcgcatatagggtcatcgttaccatctttctaaatttgactgttatgtgggttggttcatgcattcaacaaagcttgcctttctggaagactctagctgggttaaaaacttggggaaatgtaggctcagagagaggaaagacaaacagctcaaggttaaacagaaccaaaagtatggacacagtgtccatattactgtaggactccaaattctacatgaactggtgcttgttctttaaagagtcctcatctcttgtactcgagagtttatttgtagatcaatacccattaacgttgagggaggacagccaagtccccagcaaaagccaggtcttccttgatgtgtccagaataactgggaatcaccctcccaagtggtgtggtaagtcagcagaggtgctccaagcccgccctgcccacccccttaccccagccagtcctctaggacttcctggtgaatcacccaaaacaccgactgccttctgaagacaagtaacttctctctcattttactataataaaatgggcatagttgttgaacaaatgaatacatgaacctcaatttttctctaagtgagaaggttggactggaattaacaagagactccttgaagcttctagctctgacattgtcatctgttgttcagtgggtgtgcagctgggttatgtaaggtcctggcctcaccaactgtttgaaagaatcctgtcttttttccccagccagacaatgatggcctgaaggcaggggttttgccaatcctcactgctgctgctgctgctaagtcgcttcagtcgtgtccgactctgtgcaacccatagacggcagcccaccaggctcccccatccctgggattctccaggcaagaacactggagtgggttgccatttcctcctccaatgcatgaaagtgaaaaatgcaagtgaagtcgctcagtcgtgtctgacgctttgcagccccatggactgcagcctaccaggctcctccgtccatgggatgttccaggcgagagtactggagtgggttgccatttcctcctccaatgcatgaaagtgaaaagtgcaagtgaagttgctcagtagtgtctgactctttgcgactccatggactgcagcctaccaggcttctctgtccatgggatgttccaggcaagagtactggaatgggttgccattgccttctccacagtcctcaccgggtatgtgtcaatgtctgttgatggtgtggtgggggtttcagcactggcccactgggtctgtcccttgctctagtgccccatctcatactcccttcaccttcccctctgactacagcagggcctagtctgctcccagctcagaagcacaggaccgctaaggagccttggagcagtcctccatggccataaggctggaggatctgcagaatcacataaactccccagaagcttctagcaggatggacatcatgtcaagcaatgtacccttgatttggctcccccctctccatttcactcccccagccccacactcagctccctgagctctccctgcaaatacaacacatgcacactggcctgaggctctgcccaaaaatatctccagatgttgtcgtgtcccctgctggggtggtggagccgggggatgggtataattggcacagatgagaaccactgggttaatcagaaatcattcaagaaacatactgcagtttgagagctattcacaggagagaggttatgcctatgggagctctgagtgcctcagttccctcatctataaaatgggggtggtagtcacagagcccacctcatgggctgaccataagacagtgaaatcatgtatgtcagaccacatataggacagagtctggcactgtaagggccgtgtgagtgtgacgtctcattacttgtctcttaagatgaaaggacgctagagctagagtaagtgcttcttttaggggatcttggtttttccttactgatttcctatcctaaaggaaaataatgtaggcagaagttaacacacattcaacaaaggacaagaaggggttggcaaaaggcatgaccattctgcacagatggctagagagatggccttgaaacccaatggagggccacccaaaagttctggaatccaagcttcttgaatgtgcaggggctcatgttttcctagccagtccacacagtggtctgctcccagccaacagtgaagcaaacacagctccagttccacgtcctaggtgcccgacatggattcaggctgctccccttcccacaggccccagagcatgctaaccacaagcaggtgttcaagacagtcgctcatggaagtctgagaacccagggcacataactgacgtggggttgggaaactcccagcggatgtcccacagcacacttcctaacaagaagctcctagattccaccctgtttcaggaacccttatctctttagatcttccttttgcctgactcagctctggctcctcaccctctctcccaagtggcaagtggcctgaaatgcaaaattcctgttatttaaaatacaagaaaatttggacttccctggtggtgcagtggttaaaaatctgcctgccaatgcaggggatatgggttcaatccctgatcaggacgattccatgtgctgcaaggcaactaagcccatgcttcacaactactgagcccatgctccgcaacaagagaagccacagcaacgagaagcgcatgcaccacagcaaggagtaacccccactcgccacagctggagaaag

SEQ ID NO: 41722 - DNA, 1292 bp, Bovine  19866880686622
  misc_feature (1)..(1): n is a, c, g, or t
nttcaattgcagcatgaaacagagtaggctggccactgggggtctgggctctcattcagttctgccaacagggaaattcatagagatgccacatccagtacctgggtttccctggtgcatggggtagggggtgggggtgctgagctgaaccctccggctctgccacctatggccctgcattctctttctccaggaggctccactgcacccgcaactacatccacatgcacctctttgtgtccttcatcctgcgcgccctgtccaacttcatcaaggatgctgtgctcttctcttctgacgatgccacccactgcgatgcccacagggtaacatgcccacatggcccatggtgtggccaggcctgcctgcttccccccagccccattcattgaggctggatttaatgcctagaatcaaaggggccagcactggggctggaataggaggttcaaggagtcccatgtccccacatgtgcagccggggactcctatgaaggcagtttgctgagaagccaatggggctactgttcaacttccagtgtcccggagtggatcagcctctctgggtattagacacatagcaaggctcctccttcctctactcctgccaagtcccaaatgtagacagatgacagaagtctagagatggttgggattgtagaaagaaaaaggtggacaggtctgcatctgcatgcccagatgtgcagcagaacataatctcaccctcttcctcctcctgaacacgcagaggagtcttcattcattgcaatatcactctgtgtatcagttgagaatctcttctgctgtacgtaacataaaactatacatcagtggcttaaacagctgggggttgtgccccacagaagcagtccacagatgggcaacccagagctggcacagtggctccttgccacaatgaacacagtccttttccctgtctgctctgccagttttgatcccatgctttatactgtgtgttagcaatatgactgctgcaaccccacacgtcacatctatgtttcaggctaaaaggagggaagtcaaggttaaacatttttctgtttgggaggctttggcttttcatttggaaaagaatgtgcttcccaagactgtgttcacatctcactggctagaactgtgtcatgtgactatatctaactgcagaagaagctgggaagttcagttttttactatcatagtctccatagtggaggcaagcaagggtaaaggggactggaaattgagattggtttaatcagcccgcctgtcgcttcccaccattcacatcgaat

SEQ ID NO: 41723 - DNA, 1639 bp, Bovine  19866880909301
  misc_feature (1)..(1): n is a, c, g, or t
ntctctaattgctgtgcacagacttccattgtggtggcttctcttgttaaggagcaccaggctctagagcgtgggttcagtagttgtggcgcataggcttggttgctctgtggcatgtgggatcttctggaccagggattgaacccatgttctctgcgctggcaggcagattcttaaccacctggactatcaggaaaatctgcgttctttactcttgacatatcttgaagatcttacaatgttagtaaagagcttccttctccttcttttttggttgttttactggttgttgaaaaatatgtttagttgtttggacatattatagtttatttaggaagtcccctcattgaaagatacttggattttcccaggcatttgctattgcgaacagtgctacagttagtacctttgtttaagtcatttcatacacacacacacacacacacacacacacacacacgagtgtgcaaagtatatttctatggtaaattctccaagtggaattgttaggtcaaaggatatatgcatatgtaatttagatatatgttacttaattccctctgtaagggttgtagtttaattaattataaatgaacactaatactagtgtttgaaaacactgttttaagaaaaatttacagtttctttgctgagttagagtagttacattataggttgtatgaattttggtaagagtgataagattgttccagatctttggtttctactactgaccccaagggattctcagattcatgtgctaaatgaacatcaactatataataatgtttcacacatacttactatatatttcaagtgtatgtagatgctattgtataataaaatgccaattctcttaatactatgactatttgaatattttataataaaaatactctttatcttacagatatccctttgagggccagcctcccaccaccattcagaaattataaatatggtaaccaatttttcttattcttttaaaacatataatttcacattagttttattttgaagtgaatttaaatttggttttcaaaaatgagtttgcaatctgtatatacaaaccaatatggaagttatttaaaatataggaattctagtatattgttaaagtaaatactacttgtgtcatcaagtggcgtatttatgaggaatagcatgtttagaaaatgatttgaaatgaatttctttgtcaggtaatcagaaaaggagaagtgattaaagactgggaattaaaagaagagatttaacattttagatgtcaataacttgagtatgttggcttccctggtgcctcagtggtaaagaattcatctgccaacgtaggagctgctgctgctgctgctaagtcgtttcagtcatgtcggactctgtgcaaccccagagacggcacccacccaggcttcctctgtccctgggattctccaggcaagaacactggagtgggttgccatttccttctccaatgcatgaaagtgaaaagtgaaagtgaagtcactcagtcgtgtccaactctttgagactccatggactgcagcctaccagactcctttgtccatggaattttccaggcaagagtctgaagtgggttgccattgccttctccagccacacaggagaggcaggttcaatc

SEQ ID NO: 41724 - DNA, 2076 bp, Bovine  19866881153193
  misc_feature (1)..(1): n is a, c, g, or t
nctgagtctttgtcgtaggcaggcttttctcttgttgtggctagcaggtgctactctctagttgtggagtaagagcttctcattgcagtggcttcccttgtggagcacatgctccagggcacgtgcaggcttcagtcgttttggtacatgggctcagtagtttcagctcccaggctctagagcatgggctcaatagttgtggtgcacgggcttagttggctctgtggcatcttcctgcaccaggggaccatgtctcctgcattggtaggtggattctttaccactgacccaccagggaagccccgaattttttgattctacatttgacactactggaagggtcttcatatcccaagaaagaacaaggttgttagctctgttcatattcttgttagcagctatcacagttagtaattattttttgtaattattttatttacaattacttttattttaatttactcctctactgtctgaacccctgccctacctaagtcagggaggatagggattactgagtatcagttagtgctctgtctccaagtatctggcacttaaatggtgggtgaatgaacagagtgcttttctctctatgaaacattttccttctgattagccatgaacttagaaaccaaccaagtttattagaactaaatgtgaaactatgagctagagtaaagtagatgaactctggtggaagggctatgtcatctctatgttctgccctcagtcttggaaatagaacacttgaaatgttaagggaagatgagaacctgatgacgtgtcagcctacttgaccctcctagttagtggaggggccattaccattactgcagtttccccccacatccttgtctttccagttttggctgctcacaggcttcacttgctgggtgtcggtgtaaagccagccaggcaagttatattaagaggtgaaagcagttcttgcccagtgggtgtgaatagtagtttaatattatgtttcttggtataaactaaatctctaatttctaagagtaacctagtcattaaaatgtgaaaatcattaccaaaagcgttacggtaaagctttactagaaggcaagagttagtgtattcacaaatgatgaattatattcattttgtattttctggtttcttggcataagagactggggttaatcatttctgtgacattttaaaattgtagtttctattttcaggagtcagggtgctctggtttaccgttctctggccaggtagtccatggcatgggggtctattagctcatgttgtcctggagaaacaacctgagtttcttcattaatgatgatacctataatagtaattttagaaagatgttatcagtaacagtgattgtagccatctgactctggtttcttagtgctcagcacccaattgagctcagaggggataaaacagggaataaaattttagatagagagattaaccataaacttggtaagggaacttgattttagggaggcttgggttcagaggcatttgggaactgctgctgggataggagtggggagagctggatagagttgtggcttttattttgtgaaggtgaggggaactgacagctgaggtgaaaatgtaccatagctttttcttctcctgcccgccccccacccccctgccatttctcctcctttgtctcttttccttttctgatgaaaaaactggtaagaggaggcctggttaccagagatcttaaccagcccttcccctttgccattcttttcttcctttggctatttatatttggagaaattgggtgagagaagaatgggcatgggtgtaagacacatgagtgtgtgagtctcacctttcccctgtcctgtttttgcccagccaacatggagtgggggcgtggtttgggcttagctgagacatgaagaccagggtttgggtagaggtggaggtattcctggcaggaagtgaccttcactggctgggagttaagaagtaaggaaagttacttataagttggtcatgcactggtgagctgcaacctgtgttctgtttagaaatacttacgaatgtgggcaggcataatgaagtgctctacaa

SEQ ID NO: 41725 - DNA, 1465 bp, Bovine  19866881289948
  misc_feature (1)..(1): n is a, c, g, or t
ncctggagtttctggagaaggaaagggaagaggaggcatttatgcaaaatgagagggatgaaggaggtatttgccatcagatgatctccgagatctcccaaaagtcaatagagaaatccctgaggaaacacccactcgggcatgtaatgaactcagcacatcagcttacactagctgggtccataatctccaagtcagttgcctggtacactgaggcaattgtgtggaccatccaactccctgaattcacccagagctgtgtggtaaatgagatagactctcccctttgtggtgggacaccccccttagggggtcttcctgtgtgcgtggtggtatggggcacctgctctgaacctgactgcatttgtttggcccttccctttcctttccttcactgttacacacacacacacacacacacacaggttaagaaaacactccacatggtgtttttgttttttcactttttttgttctgtttttagattattgcgttccaatgaacagtacgttatctacaaaataactagttagcaacctgttagtattcatggagctccttttgaccagctgtttgcagagaaatgtgaatatgtacacagaggcaaccctggagtgtgctacctatgtcgaactggatatgcacacacacaccccacgtggatataatggtggttgttgtctctaatccatgttacacaggtgcacacacacacaaattcatagactcgtgtcagtgtggtgtgtgacatattcgtggctatatgtctgctcccaaattgcaatgtgctcaactttagttcctggaagatgctgaaatttgtgattctgatttaaaagacaattataccccctgccttgagtcttgtctctgtcgctattcctctttatgctcttattttatttgaataatgttttattgtcattcacttggaatattagcaatgattgcatctgcttcaagtctaggcataaactgctcaaagatatcgaggaggaaaacaatatccatatgcaaaccatcaccctcccagttccagcccacatgaaccggcagttccccacccaccccaccccagtgattgtggaacccaaagccagctgagcccaggaactggggagggcagagtcgatcccgtctacagtcgcgtatgtatcaatttctgatgccttgtcgattgtatcatccagaaatgcgattaaaaccaaatatatgagactcaaatgaagtctaattgctatggatctgcaatccccagtgggcccctaatcctttttgacttattcctccccttcctccgatgagatggagcttagacacaaagccctcggtttaaatttcaaaaattaaaattgacatgcagcggtggctttcctgggagcaggaggaatttctaaggaggtgccggagcccagctttatcctctgcattaagaagcaatttgtacttctaacaaaacccccac

SEQ ID NO: 41726 - DNA, 1054 bp, Bovine  19866881369105
  misc_feature (1)..(1): n is a, c, g, or t
naaactttgtccttttggtgtcaaattgctgcagaaatcacaccttgcccttcctggattttttttttttttgccaataatctggagttattattcacattacagcctgctctgatcattaattgtctgtactgcagtcaggacacttttctcagcctctttctcggatgacagttgctgtgctgcacacagctttgatatgaggctcgggatttagaagccatacagtaaatccttgttgatagacgggtttattgaaataagttagttgaggagtttaagtatattatactcaactttcctgagatttttgcatttaaaattggtttttcttcttttttaaaaaaatttgaagttattattttcccattcaaggtgtatatatgtgcattttataatggaaacattataaaattcttaataattaatttcatatccaacatttgaatgtcctggcttgtgttcatttcattaaacttgaaagtcaatattaaaatgatccacaaatgtatttggagagttcttacttggtttcacttgctagtaagacaaagggatgagctggtggtatatttattggatttgagaatgcacattcatttcccattcacatgccagggcactatgcacctgcgtgcatggccgcctgcagcacatttaatttaaaatcaggtgccctaggggaccagcatgtggtagacttcctgagggttcttctggagccattttaaatagaatttgggataatggaggaaagggtgattatgtagaggtcttgaaaatcttttgtaatttgttttcactgtaattggcaagtaaattttcagtctaaatacgtgaaatcattgtctcagacattttcaatagggttatgtagatttaataaaaaacataatattctgtttctgcttaagaaatgttactaaaatttaaaatccaccttatgtctttcttttgaatgttcaaagcagctaactcctaatttgtgtgttattctccaatttgttaaggggtgaacatttttatcaacctggaccatttgaatttaacccat

SEQ ID NO: 41727 - DNA, 688 bp, Bovine  19866881520229
  misc_feature (1)..(1): n is a, c, g, or t
nctgagtaaggagctctacttggtacactgaagctgctcccagcagacaaggccaaggcaagcttttgctctggactcgctctcctcccctctggcagtctctgggggcagggctcctagactctcctgctgctgcccagactctggaaactctggtttattcctccatacacctggaggcagcaatgctggctttgccaaggccctccaccctgcaagcctgtcactgttctggtctctcccattagagccagattatgggggctagctacttaccaggatggagaggatcacaggccctcggatgacccaccagatagacgcgttggcattgatgtcccagcacctagggagggacagccaggtatgactaggagtggggagctgggctgactagaagagacctgttctcagaggtgccctttgcaggaaggaggacgttgtggtcctgccccctgtagacagtgggcttaacacccttaggactgaccatcttctgctgccaagagcaccgccagggctggggagcgtccaggctccaggcaagcccagtgagtgtctagggagcaaaagcacacagatctgagatggaagattctggaccccagagccaagtgcatggtcaagatcactgggggagcgtggtggccaacagcagccaaggcaggtgaagtgtcaggaagtgaaa

SEQ ID NO: 41728 - DNA, 1776 bp, Bovine  19866880621784
  misc_feature (1)..(1): n is a, c, g, or t
nttcagtgacatttttaccttcaaacgtctttacatttaaaaaaagtaaaaaaatttacaaaactaaattttacagaaggtaaaaaatataaaatacatcatactgacgtgaagtaacaccacgtatcgtatatggtcccacagcaaagtattttaaaactgaaaattttagctaggtttgaagcagcgacccaactgcaaatctgttttgaagagctaaattcaattcaaatgaagactacagctatgatctttaagttcttcccagacagcaggcattctaaggagtataagaagattgcagtgctctgttgtgatctttagcattatctttggaaacaactaagataaccttctggaatacactgtaatattgcttacacactttgagaagacctaatccatttcatcaattctctacttttaactttcttaagggagacagaaccaacactccagtgtcttgcatacactcatacactcatttcctacataatactttttatggctattagtttaaatttatacttttgtttaaaagaaagaatcttttgatccaaatcatgtggagattttcgtatcccaacaatccctgctatcaaatgacaaaggctggatttagttatgttccttaactccatacagcaacagcagaatggcacaaagtcagctgtgcaatagaaaggagccaggaattcttttgcactacagcgtaaccaagaatagggaaaattcctattcacaggtttaaatatagtgctggttcctaagccaatatcccaagttattcagcaaagaatgttttcagctatatgctggttcatgctgttttctttaaaaattattcttcctaagaaaaatacttaagatattatagaacaagcattagcccattaggaaacgtttgaccttaaacttctgagaatcttaaatggctattttacaacactgaagaatcttgagctatctggcatttaagacataaatgatggtatggtatagaatgatgaaaacgagtatgtctatacgactaaattcttcatgaaaacttagccctgtatttgaaacaatgcctaaagcaacttgcataaatactgtaacaaatacaacatacaagagaaaacaataccctctaattccacctgtgaaatcaaatatttccaaactaaaaacagtagtaaaaagaaatacaaaggtctgacagaaaacaaaattctgtaaagcaattatccttcaattaaaaaataaatttaaaaaaaaacacacacaagaacacttactttgatgtttctataggtctcattcagaaccatcttattaaactcaggattcttcagcgtgtcaaggaagttagaatacaggctgtgaaagtttggctcaatactgactctcttcataaccaggtactgtgaaacccaaggcataaattcttccttcacagtttcctttagttcttcaacctagccaaccattacaacatgggaagtattcaattaaaagatgataaaatacagttttatgtttcgtttctgtgaacatgactacagtgtatgctgctgctgctgctaagtcgcttcagttgtgtccgactctgtgcgaccccacagacggcagcccaccaggctcccccgtccctgggattctccaggcaagaacactggagtgggttgccatttccttctccaatgcatgaaagtgaaaagtgaaagtgaagtcactcagtcgtgtccgacccctcagtgaccccacggactgcagccttccaggctcctcctt

SEQ ID NO: 41729 - DNA, 1613 bp, Bovine  19866880713112
  misc_feature (1)..(1): n is a, c, g, or t
ncttgttaactggttctcttataaatacttaagcatagtaacattttagttttatttcttcagaagttcgtggtatccacttacatattacacatatgggaatattcaccagaatggggcaagatataagggagatagatgaaccaaaagagtgctctgatatgatttccagtctctcagaagtgaggggagtttaattcaagtatttcagtttctgttaagaattcttatttaatgtgtttttctctttctctacccctttagtatattgagtatggacagcaatctagagatcctcctgtgaaaatgcagggctctatcacaacccctggaagtattgcactggctcaagcccaggcccaggcccaggttccagcaaaagctccccttgctggccaggttagcactatggtaaccacctcaacaaccaccactgttgctaaaacggttacagtcaccaggccaactggagtcagctttaagaaagatgtgccagtaagtaggtctatcttctttctttgttgtatttgttgttacattgcaatatatccaatagtgagcatgtactttattataaataacacatgcctattaataaagcatgaaagatcagcatttctccctttaccaccctgatttcccacatgtagcccctatgaatagttcagtacatgttcttgccagcacttcaagtgcacagttgtacataccatatgtattttatatactaaaggaatctgtgtacataccccacccctaggatttgtgtagtaaggatttcagtttgttaattttatgtattttatttctttagccttctattaatacaacaaatatagatacattgcttgtggccacagatcaaactgagagaatcgtagagcccccagaaaatatccaggagaaaattgcttttatcttcaacaacctttcccagtcaaatatgacacaaaaggtgagtctgaagtaatagtttatgtatcactacaaatgttctctgttgtttttcttgatggattgggggatttacatttgatattctctaccctttttaatctttaaaggtgaagataatagaatcaaaatgaagggaacttggatatacaactagtggttgtagattctgtagatgttaaatagcactgattttatttatttatttattaattttggccacatggcatgacatgtgggatcttagtttcctgaccagggatcgaaccaaactcacactccctgcagtggaagtgcagcctcttaaccactgaacttccagggaagtcccaaatagtattgttttgcagtgagttacaggctttttgaagtaaacttgaaaatgatttcatgatgggaatttcatttgtatttgtagtaacaattcacatcctcccagagatcattaacagcttgtgaaaagaattgatgcttgccttacaagattatgtgctaagatgatacttggaaatgtctgttttcgtcaatactaattagcctaaacaaaagggtttgaaatgtaatttataatgcaagtactgtctttgagactctcaccataattgattgggggaaaattttgaagcattttgcatgctttttggaagaagagtttcaaa

SEQ ID NO: 41730 - DNA, 1785 bp, Bovine  19866880845771
  misc_feature (1)..(1): n is a, c, g, or t
nccaagttaacgaggttcgtgaggggaatgaggtggggaggagtgagcccctcaaaccatctggagactgttctgctgcagcatctagacagatcccctcttcttttttaaacaaaagagaagtaaccccatttcctccccttcgccctcacaaaaataaactaaaggggaaatgagccgcaagagggtggccgtgggacatcaatgcgggtgagggggcgagtgggcgtcttcgtgggaccggggcttcaacaggacacctccatggtgtggttgacctggcccagcccctcgctgctctccgagtgggtgcaggcctgcgggcggctgccgtccaccgagttggcactggtgagggatgctgtgcgagagcgggcaagacgagtcatgctggctgagggcactgtggacagagagggtaccgggggtgaggaccggccagcagggcgggcacgggcacgtgggagaagggagaaggatttacgcaagcaaagcggccagcaagacccattcttccgacgaaggctcggaggcccatccgcagccagggctctacggtcatgcaacgccagtgacagggagtgcgcccaagggctgggggccacaggggccagcaggaccctcctcacaagagcgggccagagctgtggccccaacggggcagcagctgacgaccaaccaggagtccttaagcccggggaacgatggggcattctttctaattctgcttccctcaagaagacagtggggccgggagggggggagatcagttctgtaaagaagggcaaggtgtggtagcctcagacggccctcagtccattattcagagagtcacacaagtgagataaactctcagggagcaaatgcttcctttctgacctccaccggccacctgtccagctcaggcgtggcttgcccctgacacctctgagaggttctggccccaactgccagggctctggaagccacggggccccagggaacctagaagcatgactggtctgaagcccggccactccagagccctaaccgggatagagcccacggaaaagcggcacaagaagtttccacagcaagatgcggcttggctgcagcactgcacagagggaggagcagggggcccagggcgccggaggcgggcggggggatccatgcatcaggggaggggctgcggggctacctgctcctccactcagccttcggtccttcaagtatgcaactaagagagaagacagagccagggggcggggtaggggagacacagaacacgggtgaagaggaggttgggcgaggcccgggcgttgagatgggccggagaggagaggagggtacagagaggctgggggcagggccggagcctcaggggccccctcctgcacccccagaaggagccactgatgtcagtctgccccgaggagcccagagagcagggtggggcactcatccgcctctgcttctccagccctggctgcagtcctgggggctctgccgacaaggcctttgaggactataacgtgtccccgcaccctcaccactccagtgggctcagtatcctcgtggatagaagcccatgcatgcgtgctcagtcgtgtccgattcttttgtgatcctgtggaccgtagcccgccaggctccccgtccatggcattctccaggcaagaatactggagcgagttgccatatcctcctccaggggatcttcccgacccagggatcggacccaggtctcctgcattggcagcggattttttccccactgagctgctgggaagccctggatagagg

SEQ ID NO: 41731 - DNA, 1608 bp, Bovine  19866880991714
  misc_feature (1)..(1): n is a, c, g, or t
ncgtattaaacacacttcaagcaaaggcagataaatgacacaggtaaagcaatctttagcaatagctcttcaaatgcttaataaactgcaaaacatgatgatgcttaatccccaaaccaagtgtaccagtcatttttcttaatatatcacaactatatcacaggatctgtgatacagcaggtttaaagagcccctgccaaagaaccagagccacaatataagggctataaaacttcaagaataacatttcagatgaagttctctgaagctgtactactaaacatttagtagtgacatggggcgatccttataatttccaataggcccctttaatataaacaaatctcaattaaattaacttttaatacaataaaagcattagaaattagaaatctagtcaaaacaaatcttgtcaaactttgagaatcttggggttggaggagatcagctctaatttaaaaaacaaaaaacaaggtatactattcataccaaaagattttataaaatatctaataactacacttctaaacttcttagtttgtgacattatttcagacttctgtgactatagaaaataatatatgatatgccttttataaagtggtcactgaagtggttccctaagtgctctttcttaaaataaaccccaacctgccattcaatgcagctgaaaatagaagcggaatatgttgctcccagagagaagggggtggttggtgtcagggagtaacttaaatgtaccttgtttttaaaagagcagttcagttgagagctgaagagccccagttataacaagtccttatgctctagcactgttgcttggcccgtgaagctacaaacaagacacatcaggttcaaaggcagtgcttatttctcaagtctgttattcttattttaaaaagaagcccttaccatatacctaagttgttttgtatctttcctctcatagtctgtttaatgattcaaatctattctcaaccacaatgcctatttacagatctcctttaagtggatactagacatgcagttatctaaaatgtaataaattcagacaaaaatctcctttgagtagactattaatgatgatgcagaagtttattctatttcaaatctatgaccaaatggagatgtaccaaatgtagtgttcatttacctgaacgggagaaatggcgtccaagctgctagcactaggagggcgtccttttggcataactcccggtggtggctgcctggccttgttcataacgttactgcaattggccaccatggtgaggatggtttctgataactcctgagaaacactcctggagagacacgaaaagagaaaaatatcattaattattccctagaacacctaaacaaacaaatctggatttctaataaatagaaaacttgctggaacctatggctcaatttccaccatatcccatgtctctctatctgttattaatcaccaggattttctgagcactgcctttcttgtgaaaatattttttaataactctgaaattaacaagccttgggtacactgctgcccatatattttgaaataccgctctaagaaacattccatatcctcaactacttcatcaaaaattatgcacaaaa

SEQ ID NO: 41732 - DNA, 1333 bp, Bovine  19866881050161
  misc_feature (1)..(1): n is a, c, g, or t
natctacctgccttggtgcactcatttgctttcaggctacctctgggacttgcgggaggaagccgctggtggctgggctgccgacacacgggagcaggtgctgagtcccggggtgatgagcagagcctctactcaggacaggcttctctggggaggaggggacctctcggtgcacactctttctccagaggcaagtcaggctgagttctttctttggagacctaccaacactctttacccatggcgtccaggcatggagaagtcgagaagtggaggagggaaaggaggttctcctgtggcatgagacttcctcctaccatccacggcactgccaggatgggggagcaggaagggagctgagttggaactgtccacgggggtggggtctgatttcaccccagaactgtttctggaaaaggatgtgcggatgtcatcccaccagtggaggggaatgatgccgggcccagggtggtcctgaagctctatgagatgggttcctgggtctaacaacaaaggccaagaattctctgggaggcagtggttacgccaaaagatccacaaaaatggcgttggctgtggtctggccaaagatgaaggctcccagtgtgaccaagaggactccgtaactgaccatcgcccaccagctgtagagcagagggtgagagagggggcctggtcagtcaaccactcatgacgttgcagactctcatatatatataaatgtatgtactaagtcacttcagtcgtgtctgaagtcatgactctttgtgaccctaaggactgtagccaaccatgctcctttgtccctgggattctccaggcaagaatattggagtgggttgccatgtatcagttaattactgtaattacttataccacttctcttgtgggtagagcacttcctacttctcaacagctttcacacaaaggtttctggggctgggtgtatgactcctagaccatgggtaaggagaccaagacctaatgcgattagctgactggtcacaggagaccaagggcaggaccagaattagaatgtatgtctcctggtgggaaagatggtcaggaaaaagcaagtcacatgaagtgatccattttattaaaaaataagtcaaaagcatctgcaaacttatgtgtatcaaaaacagctgcaggcttataacctggattttttttttttttttttttttttaggccttaccaaatggcatatgggatcttagttccccgattccccattccccctgtattggaagaacagagtcttaaccagtggactgccagggaagtccccacaataattttctgtttgtttgtttttaaagcatgcaac

SEQ ID NO: 41733 - DNA, 851 bp, Bovine  19866881223138
  misc_feature (1)..(1): n is a, c, g, or t
nacttgatgtggcccaagacttgaaggtgagtttgaagggacagagaacgctttatttattgatgataaaaattccaagtgtcttaggaataagtcacatgtaactctaagctagaatggatgagatttagtttttccttataggtagaaagaggttggaagaagagtggttctttagaagtgtaaaaatgttttcatttacatttcactgagttttgtttggtcttctatgatatttaaagggctgttttaaaataagtgatactgacatcttcttagatgtaatctgtgagatacaatttttggagaaactgattggctatcgacttttctacagatttcattagcattaacggattcttttgacaaatagtctgattcttgatgtctttgatttgatgtacacagtactggtggtgtagttgtacttagaggaagcctgagtttagatttttttttttttaacagataaagataatttttcatgctttgtgttttgctttgctttaggtttatttgaaaaaacacagggtaaagtttattgtgaaggtaaagtcatgtgtttgtctttgaaatgtgatcgtatagttagggacaagtgttaccattgatatacactaagctgttttgtttaaaaaattatgattaagaaaatattagcaatattttatttagacttgtttgtgaaaataaaaactggaaacagaaaataggacagaaaagtcactcaattgcttgactcgtagtttctaatattctttttctttaggctttgtcaatgctgctaaatggtactccatttgcctttgttattgaccttgctgcacttgcttcacgtcgtgaatacctca

SEQ ID NO: 41734 - DNA, 1468 bp, Bovine  19866881285937
  misc_feature (1)..(1): n is a, c, g, or t
ntctgagaccccaaatgagtgagtgagttatctgaagagactatgtgcttatgtatatgtgcacgcatgcgtagtcactttaaactgttttgtactgtcctactccaaagtgctttaaatctaaattcttcatggtaaacagaatcaagagtgttaacttaggcagttttcaaaaaatccttcatttctttaaaccagtaagtatctactacttgccaaatactactgaggataaaataaacaaaaataaacaccacctcatagaattgacaaatccaagaggaagacatcaaacacatatggtgactattaagagtacgtggaatgctcactgctacaagcaaagaacaatggctttgtaagcagtaatgagttttatactacaagaaaatagtaaacttacacgaagggctgaggcaaaactgtttttcaggttggttgatatgctcatgagtaaaggttccctgcaagtaatcatagccattccagctgtcaagttccgcatcatgtgatgagctgctattcgcattcgagattcctcagaatccagggcaaaatctttcctgactatttgctcacaagtagtcatggcaatcttaattgatcgatccaccacaggatggaccagctcctggacagcccgttcgattgcttggcgcacacactgcttcagctgtggatgggcctgaaacaagggaatctagggaggaaaaaagaagtcaacaatttgtttaaataaaacaaccaaatttctatcagtaatcacgcccttgtctttgaattacttccaaattaaccatgaactacccatttctactttaaataatgaaaagctcagaaattggaaagctgggctccaaggagggcacagtaatcactgtatcttgtgatacatgattacacatcaagtttaatgggcaaactgttcattactagatgcttaaagacactaccctggttagtcaaaatttgtggcttgagtactcctaaagaaagtaacttctttagtaccatggggaaatgcaaaaataatcaagataatagaaaaaaaggctttctacaaaaactattattttcaaaatagcaagcattttattaaaaaaaaattacattgaaatctttttctttacttgaaagactatttatgggtatttactgaatttttaagaaacttaaaaaatattcatgatgaacttatactacacatagcaattcctcctctctgcaacaaaagcctacaacttaggaatccacataggaagtaaaaaagggaagggaaatttaaccagttgacctcgtcacaaagtaacagtttacttactgttgggtttagagtaatgtgtggtgccaggcctgcgagggaatagacattgatgtcatggtaactgtactgtggctgtggtggaacagtggctgtacaggtggtgctggtagctggtgttgtagaagttgctaaatgtagagaaaa

SEQ ID NO: 41735 - DNA, 1797 bp, Bovine  19866881303750
  misc_feature (1)..(1): n is a, c, g, or t
ntgacaggaaaccaacccgggcccctgcagtggtagtgaggcgtcctaccctatccgctggaccactagggaattctctgaagtgtgtgattctgatttagattcttttactataaaaagaccatattaggacactttgtaaacttgaatgaggtctgaggattagatgacattgatgtatcagtgttgactctgatttcagtggttttactatggtcacgtagaatgtctctgtaaggaaacacagactaaaggatacaagagtgactgggacatcaaggtcagcacctatgttcaaatggttcagaagaaaatgtttccccctcacattttcaacttttataacatttcaaatttttagaaaatctttttacaaagaacagggcaaaccatgaggtcaccaagtaaattcctttagtatgtcaaacatgaaggttaaagcaacctcgtgaattaaaaaaattcccaaatgccatgctgatgtgatacaaagggtagctacactccacaatgcaacagctgtgggtaattttttttccttgtaacttaagctcctgggcacaagtgacagattaactgacagaaacattcaaaattaaactgtaaattcctcaatttaatccaagacaagtacttaccttcatgggctgggctaaaaatcctgtgggctgacttaaatcatttgtaggcaagaagccaggcacattgcgtgcaaactcttcataaacagccagctgctttgggtccacaccaccaaccttggaagaagaaaacctgttttaacaggatcctcttcacaatcaagggaaacctttttatcaaagtggaaactctgcatgggagtaagcaccagggttttgagaagggacacaggagtctttacaacatttaacacacgactgaataggcatgcatgtatgcacacacagttcagggtttcctattttccctgagacctgtcagagtcaccctcatttatactttttccactggcaaatgcctcaagtaggaccatgcagccagtgcaattccccaatggagctgtaaaattgctaagatttctcaacattgtcttctcaccaacaagcaactagcaataaaaactcaagtatcagaagggaagaccaagctcagaaacaaaaactagaaggcatatgaacgtgtaacagcagcacttcaacaacagggggaggggatacatctaagctatttctgtgtcttccccacaggcagcctttaagagaaatcacatttaatcacagaaacagaatttaacccctatcttagtcctcagaaagaaaacaaagacagggcagagagagagagacagccccaagtctcactttcagcctgatttgctctggcatccgctcagcttggtatgttaacacaacaggatcacaataccttcgcccttcttgcctagcatgttttctcagctcaaattcctgcaaacaaacaaaaaaatcactgaggttcttgttatgaggcactttcttaaatggaaaaacaaatacttaaaaggcaaatgctaaacacttacagttgctaatctcttgtccatctcagggcctgctttttctactgcagtcttctgaataaaacagcaagctaattcacaattgtcctgagctaattgagcagctgcctgatccatcatttccctttgttgtgggcttgcagtctattgggaggagaagagacagaaaaaaatttaaagttttctgtgggtagacaaaacagatagatgggatactagaaaatgcaatgttgggcaaattattttagaagttccaa

SEQ ID NO: 41736 - DNA, 856 bp, Bovine  19866881368852
  misc_feature (1)..(1): n is a, c, g, or t
nagaggaaaaagtattttagaggatttacagaaaataatcgatgtagcagacctgatttctatcctgaaaggcccgcttacaaggctggccatggctgggatctggaaacctacatttcagtagagtttccacaaccactaattgatagtaatggctcaccttgtcttctctgtttgtacaaacaatgtagcttttgcttccctttgggaagtctggaattttgtgacatgccaaccagatgctacctatgggattaaccccctaataaatactcggaacattgattctctaatgagtttccctggttgtcaacatttgacacattgtcatgatgtattgctgggggaattcctgggacctgtgtgactctactgggagaggactctaggaaggttgagcctggtctcccccacacttcacttcatgcaccttttccctttgctgattatgtttgttatccttccattgtcataaatctcagctacaagtacaactctatagggtcctgtgagttctcctagtgaatcattaaacctaggcatatctttggggacttacagtgcaggtaaaaaatttacatacaggtattattaaaattaaccttaaatattaggtacaaactttcagttcagactacattaccctcattcatacaatcagatacagaaatgcttatcaatattaaatctgtgctattattaagatagaactctttttttttcacttgatgacttgtagtagattcccttgatgtgtgcatgctaagtcacttcagtcgtgttggactctttgagaccctatggactgtagcccatcaagctcctctgtccatgagattctccagggaagatactg

SEQ ID NO: 41737 - DNA, 1832 bp, Bovine  19866881439644
  misc_feature (1)..(1): n is a, c, g, or t
natgatttttgaatttgagatttgagcgatgtttgaaattttcctcaaaactttttgtctttaaggaaaatgccgattccagtaatctattaaaattaccctgcaggataaggctcatttgccaaatggactttgggcaccaggccagtaaacgctgagcaaaaccaggctgctctttgctgccaggcctttcccatacactcttgctccaccctgcctgcaggccatgctggttttcatcatcagtggcctcgtcatcctggcctactgctcccaggccagcaatgagaggacctaccaggaggtggtgtgggctgtgtgtggcaagctgacaggcgtgctgtgtgaggtcgccattgccacctacactttcgggacctgcatcgccttcctcatcatcatcggggaccagcaggacaagagtgaggtccccccctcagtatctacctcatccctcccgcctggccctggggatcctgcagtgggcggggaagagcctggaatacccacccaaggcccgggcccggcattcatctgggaatcctccctgctggctgctgggcccatgagacagttggagatcccagcagaggtggaggaccataccctgcaggagcctggcatcaccttccctccttcctccctctgcagttatagctgtgatggcaaaggagcctgaggggcccggcggcagcccctggtacacagaccgcaagttcaccatcagcctcactgccttcctcttcatcctgcccctctccatccccagggagatcggcttccagaaatatgccaggtttggaggccccaccccagcctgcgctggacagcagttctggtcacaggcagtcagagacccaagggcagcaggggaacccctctcctccatgccaccttgcctccggggcagaaagagggggcaaggcagagacagaacagggcttgcagaggttctagcagaagacgttccttctgtgtcagcagctagggagacagtggctctttgcatcagtgggagcatcagttccaaatgtccttgtccaagaagggacggatagtaatcctgaatgtgaaggcctctcctggcctgggccttgtctttctcacaaagcatgagattttttgatcatttggaattgttagcttcacagcattttccatgcagctcagtgtgaagggaagggactagcttcttggctcagagtctgaaaaacagggattctaacctgtttgctgtgatccttaattgaaggggtcatgctcagtgtctccaaggttctctttaatgttgactttctggtattagtgccttggagccttctccctccagcctttcctgcttctcaaaggccctgcttgcagctctggccatacctgggctgctctgattgaagtagcagatgtgctttgaagcccagtgccccctgctgcagtctctgagctatggagctgaaccaccttatttcccagtggccacacatgtcagtctggtcccctcttggcttcctaactgtggcttgtttctttgaaatttatttctcatgcatttcttaagtctttgtttggaatgatctcccagttggttccttagacacttttggtcactaaggtgaaggatggatgtccctggggatagaatcgaagaagaggcagctgggactagggaggaggaggcttaattcatcctttctggcagcttcctgagcgtcgtgggtacctggtatgtcactgccatcatcatcatcaaatacatctggcctgataaagagatgaccccagcagacatcctgaacaggtgagtgagggcccccaggaggcacatagggtagaag

SEQ ID NO: 41738 - DNA, 1323 bp, Bovine  19866881588950
  misc_feature (1)..(1): n is a, c, g, or t
nggcatagcatcaccatactcaaatttttcttattactttattagtttttcagcacagttcactctttctacgttgacaaggggttttgttttacattttgtcatctcaaagtctcacgacatcagccaccagaatacacaagagtaggctcttcactttgtacagagaggaaaataataaattccattaaaagttcacgttgaccaaagaagacacaacctccggtggaaagccacacgtgggggtacccaatatacatatatatatataatgtatagatatttatagatatctcatctgaaagaacacagaaaagaaatccaagtttcacagcgctatctacaataagggattaattctaccagcttttcaaacagtcacattcgatattccgaggaagcacgtgagtgaacagaactgggggcagactaacactccactgggctctagagcagtctagagtcatggcttaagagtataaaaggggagacgtgtgcagaggaaatgtgggtgcaggagtcccctcagccccacacgcacccacccccctccacagtcctgcatttttcattgccctcttctctttgctcatttgggggcttatggcaattgatttaggctcagagacgaatggcttctggtttctgggcccggagattctacctggtaaggtgggtggatagggagtatatggcacagtgctgcgcttcaggtgacaggaaggggctggggtgtgtggggagctttgctcttctgcctggcccttgttcacttcaggaaacattacctcccacccctggacccagcaagccccagcttaggcctcctccacctggctaggatggtgatgtgggacacctcggaccagttttctccacatgagcttgctcagtgatgcctacatgaaacgctggcatagcttgacgagaactctgtctagaaacatttctaatgaccttggccacgctgctgctgactgagttgtcttccatggaacctagaggcaaaaaggggggtctctgagggaactctataggaactctgagctgccactgtctgcaggcttccaaaagcagtcaccacgaagttctcagaagtgcacccaacactcaaaggctgtcccagcctttaacctcagcccgtcagctccctatggaggcagaggaccaggtgacgttctgcctcagggccttggctcagcaatgggccagggccaggaggtggccgagggtggggctggaagggacagtctgtggggttcctgccctccaggtcctaccgtgttctgtcttctcaggcaaagcagccccgttcagcccctg

SEQ ID NO: 41739 - DNA, 730 bp, Bovine  19866882008327
  misc_feature (1)..(1): n is a, c, g, or t
ncctggggtcgggggtcctgtggatgaggagggacctctgagctgagacctgaatgatgaggagatgggcagacagaagttaatgcagaagctctgagacaggaactgctgggggagttcaagattaaagaggttaacagtgtgggtgtggggaatgtgagaagtcagggaagagggcttctgagcccagccccgacacccttctaagcctcagttttagcctccagggctggtctgtcacctccccatctgctgctggactgagcaagggattgtccctctccctaaccctcccagggtcgctctgacccagccctctcgtccccgccctcaggtatctgcggcttcctgacctttggagacgccgtggaccctgacgtgctcctgtcctacccgtcagaagacatggctgtggctgtggcccgtgccttcatcatcctgagtgtgctcacctcctaccccatcctgcacttctgcggacggtgagccctccgccccaccccttgaaggtggtgcttctcaccagggcccctggatgccctttgaacacggccttgggccttgtgaaacatccattttatagagagagacattgaagcccataggaaacagtcaatgcctaggatggccctgcaagcacccccagcctggtcttggggggcagagtcaccaggacaacctgtgagtgctctgagaacctctaatccaggtcccttcctgaacaccctgt

SEQ ID NO: 41740 - DNA, 1786 bp, Bovine  19866880213914
  misc_feature (1)..(1): n is a, c, g, or t
nctaagagtcttctccacaccacagtccaaagcatcaattcttcagcgctcagctttctttatagtccaactctcacaaccacacatgactactggaaaaaccatagccttgactagacggacctttgttggcaaagtaatgtctctactttttaatatgctatctactttccttccaaggagtacgcgtcttttaatttcatggcagcaatcaccatctgcagtgattttggagcccaaaaagataaagtcagccactgtttccactgtttccccatctatttcccatgaagtgatgggactggatgccatggtcttagttttctgaatgttgaattttaagccaactttttcactctcctctttcactttcatcaagagtttagttcttaaaaaaacataaaaaaatttaaaaaagagtttagttcttcttcactttctgccataagggtgatgtcatctgcatatctgaggttattgatatttctcccggcaatcttgattccagcttgtgcttcctccagcccagcatttctcaggatgtactctgcatagaagttaaataagcagggtgacaatatacagccttgacgtactccttttctgatttggaaccagtctgttgttccaagtccagttctaactgttgcttcctgatctgcatacaggtttctaaaaaggcaggtcaggtggtctggtatttccatctccttcagaattttccacagtttattgtgaaccacacagtcaaaggctttggcatagtcaataaagcagaaacagatgtttttctgaaactctctttcttttttgatgatccagcagatgttggcaatttgatctctggttcctctgccttttctaaaaccagctgaacatctgaaatttcacggttcatgtattgctgaggcctggcttggagaattagaagttagaagtacagacaccgaaagcaatgacaatgaaatgctgctgtagtctcacatctgctgccacagtttagtacacataaggtcctggatggagagctttcaaggtcaaggctaagtccagatactggcattttcagtgtgtgcaggtcacatggcttgatttcctgggtggttcccagacaactttgagagctggtacctatcatcaaccttcgaaccatggttctttccaggagacgggaaatgaaagtctaggtccatgaatgtggttccagttgcccagggcctgtcatatccaatcgcttttgtctttagagatggcctgttttcctgatgttcctttatattttcaagttattcatgcactagaagtcctctccaagctactcctcacaataaacttactgatatttatgtaacatttgcattttccccttcaaagcttgggcaaatcatggacattctgccccagcagaagtcccatgaatcttgttctgaaaatgactggtatccatgatattttgaccatatactttttttctttgaccatgccagttgacatgtaggatcttagttcctcatcccgggatcaaacctgtgccctctgcggtgcaatcatggagtctcaatcactggatggccagggaagtccttgaccatatacttttgaaaagccaacaaattatgtgtgccatggctgattttcctctacctcaaaaaagtactgttttccatgaaaagatgctaaacatcattattcattattagagaaattcaaatcaaaactgcaatgaagtatcacctcacaccttcagaaaggccatcatcaaaaaatctacaagcaataaatgctg

SEQ ID NO: 41741 - DNA, 985 bp, Bovine  19866880759905
  misc_feature (1)..(1): n is a, c, g, or t
nataacaacatcttttaagtgctcagggaggggggaacccgaaagtcctgtcaaatcagaattatatatccagtttctgcaagtgaagatgaaataaagacatcctcagataaatgaaaactaagagaatttgcagccagcaacctgcagctagctataaaaaaatgttaaagagaagctgttcaggctgaaaattccaggctgaaatgaccctccatgaaaacttgaatcaccaggcacgaatgaaagaaagcactagagatgataatgacgggtgaccacacggcttgtactgttaacaaatctaatcacaggaccttaggcaaaaccaagctgatggacattctacaagataaatttatctttttcttaaaaataaggtaagacagacatttaaggctaaagatctaacttaaagaactaaagagacaagagaactgaatacaacatatggtcttggactaggtgctacccagggaaaaacttccacaaactttattatgctataaaataatgtattcttaaatttcccgattttagtaattgtccttgattatgtaagtagaccgccctgttgttaggaaatacatagcaggatgttcagggggtaaaggagcagctcactttccaagaggaaactgcaaatgaggcaaaatctaggtaaagggtctatggaagttctttgtactattcttataacttttagcttttctcttgagtttgaagttatctcagagttaaaaattgcagtctgttttcttttgtgaccaccaccactctatgctctgtcttacccatttggcactggtacatatttctcggactctggttgtgatctgagaaagggatgaagttggcgatcacactcagcaggctgtgagggaagagctcctggtgcgtggtgaccccagccagaacctcatcctcgaagatggcaacattcatgaagatcggaaagaggaaggaccaggaagttcaaggcaca

SEQ ID NO: 41742 - DNA, 3381 bp, Bovine  19866880791469
  misc_feature (1)..(1): n is a, c, g, or t
ntcacctacgggaggggcaggctgacccaaagggaaaagggggtgcttcctggggtgagagcaatgttctatatattgactgaagtggtggttacatgagtgtctgtacttatcatgactcattgattgtgtgcttaagttctatgcatttaattatatgtcaatttaacctacatatttcattgtatgccccacaaatcttctttacaggacttcaaaacaatcatccagagaaggtggaatgtatttttttaaagttgattttgaacaaataagtcacttgatgatcaattcctcagagaaactcaaagaaaactcagatgaaggcagagaaaatgataacattcctcgtggagtctggagtaacaaaagtgatttggagacaatacctccagctggcaatcacttgctggtccattctcaccataaacattcagtgagtattaccatgagtcaggctgtgtcttgggagagacaaagcccttgtccttactaagcatacattctctaagaagacagacaaggagactaaacaaataaacagggtaatgacagactctgaccagtgcaacgaaggaagtccacacgaatatgtgccatgcctgagagtcgataaaggagtgaggaggacccagaagaatgcccaggaaagacctctgtgcagaagtgttagctgacacgcgtcacgggaggaagggcacatggaacgacattgtaggcagacagagacgaggtgcaaaggccctgaggcagggcgaaggggggggtgtttctaagaaaacaaaagacaatccgtgtgactggcgcataattagcagggtggaaagagtgggtggagctgggattggaaagtagagtggggaccagggcacgcagatcctaagaggaggagcagaaaggcctcttgagagaaagtcaaagataacgggcagccactgaagaggtacagcaggcaggggacatgatctaccatggagaacaatagtggggataaagctagaagctaagagaccagttaggatgctactgcagagatgctggcaagaggtggcggtgacctggaccagggccctgcagcagacaggcagaaaagagatttgagatgtactgtgggaagacaactggcagtctcctgatgtagtcagtctaaacaatgagcagcaggaaggatgggcagagagtgacatgctttagtaggatggggaactctgtggcagaacaagtccgagtaccgggggacattaagagtttcattttaacacactttcatatccagtgagtggacatgccaggaaaggagcatgaagctcaggagggtagtatgagccagagatacaaagttcaaagtcatcacatggatggtcgtgaagccaggatccaaaggagatctcccaggcaggagtgcctcagagggatcagaattcagtccaggactgagccctgtggcacccagcatgttcagaactcctgttgtgggcagaggaagagcactgaggcaggaaggaagccaggaagacagtggtttcggaaggtcacctttggcgtgcagcatcctcgcagaatactccctgagtacatgcagactgggaaggctagggggtggtaaccttaccagacacccccgggagatgcaaggagaggagccaaagaggagcccatcggatttagcagcacagaaccatccatggcgctgaccctcggagcactgtgggaggaggtctgggactgaagccaggtcacacccacttagatggaaatcagatgactgctgaccttcacggcagtcacagccccacaatgactcaatcctcccacaactgcctccatgaccaaggcattttcctcgccgccacctcactgaggtcttcacatcagtggttcctgaaaggcaaggcctgccaggccagctgggccacagctgccacgggaaatgtgagcagggcttcccggctgccctggctcgaagactccggccacttgattgatataaccacagacacccgtcctgtactgtgacctctgaccccaagatttccgcctgcctccccatccatctggtccccatcctgggctgccccacctgcgtttttatcttcctctagtgcccgctgctgcacactacagcattcacccaacttctgctcccttccactgtcagaaagcaagcattaaacaaatgccacagctgagactcaccaggaacagtcagaacagagggggatctttctggaagttcattaacacggcggctgttttgaacccagtaaatgttgacgggctcgggtggacccacagcctgacaggtgaggttgaaggctgtgtttctggtgacattcatgctctcgggctgcctcgtaaagtaaggaagtcctgcagagaaagtggtaagtggaagaaggttttagattcacaggtcaaggtgcacccccccggtgagtggaaaccacaccagaactcagcaatagttctctctgtccaccaccctgcagtgcaggagacttggatttgatctctgggttgggaagatctcctggagaaggaactggcaacccactccagtagtcttgcctgggaaatcccatggacagaggtgcctggtaggctacagtccatgaggtcacagagtcagacacgactgagtgactaaacttttactttctgtccaccacccaggtctgaaatgctcagttttcaccttgatgcagttgagtaagaaagcacacagaagctaattcttaccagtccagctcgagctggctttctaggacactttcccaaaggagcaatggtgattcagaactggtttttccagaagggaggcctggcagttgtgaaactaggtgttgcttaagctcctgggaaaggctggcaggattccttaccaataaacacagagtgaaaacaaagccatgtgcgaggtctgcccctccttttttctttttaaagtttaagtagacttgatttatggcttcccagctggtgcagtggtaaagaatccacctgccaatgcaggagacgcaggggccatgggttccatctctgggctggggagatctcttggaggaggaaatgggcagcccactccagtattcttacctggagaattccatgaacagaggagcccggtgagctacatacagtccacggggttgcaaagagttggacatgacggagcaactaagcatgcacacttgacttataatgctgtattagttccaggtgtatggtgaagtgattcagttatacatgtgcaaaaatagatattctttcagattcgtttccattataggttgttacaggatatggaatagagttccctgtgctatgcttgtttattttgtacatggtgctgtgtgtctattcatccaaaacttctactcc

SEQ ID NO: 41743 - DNA, 912 bp, Bovine  19866880844939
  misc_feature (1)..(1): n is a, c, g, or t
naccaaggaagaagaagaacttttagaaagcaaaatcaaaataccagagggggtggggggtctggtgtctggaagggggtgtctcaaaaatattgatttttaattttcagagggagtcaaaaaccaatagaccaatggccgctggcatgccctcacagctatctagggactttcctggcagtccagtggcttgggcttcccaagtggcgtggtggtaaagaatccacctgtcagtgtaggagacacagagatgtgggttcaatccctgggtcgggaagatcccctggaggaggaaatggcacccactccagtatttctgcctgggaaatcccatggacagaggagcctggcgggctacagtccatggggttgcaaagagctggacgtgactgagcacacatgcacgtatggctgtcttctcttttccttgcttcccacatctgtttttccacagtcatcgacagcacagcactcagaaatcagggggcttgtgcgtatgtattcaggggcagcaggtacgacactaaggtttgagcgtgaggaagggagccctaacggtgagaaggaagcatgtggggagcccgctgagggtaaaggaggccccactgaagtgtgagatgcagtgccttccgacacatgtggattctcatacctggtcctgtgagccactgctcctcagggaagcatttcctttgtctcctgggccaggacactttcgcttcattttcttctttttaccattcttgtgaacagctttaaggtttatatttttttgcttaatagctaaaaacaacaacaacaacaacaaaaatttgacttaaagacaatataaaacaataacagcagtttactcttaagagggatattctttaataatgtaagaaaagttctccactattcaaaaagcaaaaa

SEQ ID NO: 41744 - DNA, 1786 bp, Bovine  19866880861477
  misc_feature (1)..(1): n is a, c, g, or t
nccttaaaacagactaggacattcccaggtggccctagtggtaaaagaacccacctgctaatacaggagacataagaggcgtgggttcaatccctgggtcaggaagatcccctggaggagggcatgacagcccactccagtattcttgcctggaggatcccatggacacaggagtctggcgggctgcagtccatgggttcaagagcggaacatgacagcatgcatcaccatctctgcctggtcttgagactgcatactggatttcagttgttattttgggagctctcgatcttcaaggctgctggggagagaagagtgagattagggcgagtcattgccacaagacattttacccagattcagctattttttctttttttggctgtgccacatggcatgtgggatcttggttccccaaccagcgattgaacctatatcccctgcattggaagcatggagtctcaaccactggactccagggaagtcctttcagctgtttttcttaagtaagattctctttgaattgttgtaagcctttaatttccagaattctgaaaaaaaatttaattttcactgttttggtcattgtcctctcgtactttttattaagcagtagattacagagatcttttgtctgtcctttcaggagtgatgacaacagttcactattaagtattttttgacatcttttttcccccatgtctgcactttagaaatgcttatctttgcctggtatgaagactgcaggtgtcccatcttctagtcttttatttcagaatcgccctttcctgcctggtggtccaggaactcacctttccagcctgatgttcctcatttctgagtgggtaaggtcttcactcctgctccagatatttaaactgcctttttcaggggttccacagaagtggccttatttaccattcacacaagtcttaagtaaatacaagttttgaatcccagctgtattcctgcacaaaaatattttaaatttatttgcctggatgtgttgcttggcaggtaagcttgttacataataatataaactggacttaatcttggacttcctgaacaaattcgtgattcagtccgtatctgctgacacaccagcctttctgtgtacccgaggaccgtaagccagtttcaacttcctcatgtcgcggagctcagtttggtgaatccagattcaacagaaacgctcctttttcagccaaagacatataaaacggtcactttggtgtgaaaagaaggaaaacctagtcccagtgaattcctgattgtctcgggggctgaatggctgtccttgtgtggcagtgaagggttctatgttctccccaagctgcggaggtgatgtgagctgcccctcaggaaacagaaagctgcccggcctcctgcaagactgccatcagctctgccgggctgaattcttggggatgcaccctccagctaaatctgcaccaaaaaaaaaaaaaggtagaagtgaccttgacttttgaatgggatatgcaggcccctccaggtgggggactagagggcaagatggggaagggagcaccctggaacagatgggggaggtggctgctccccatggccttggttctggcagatctcagcaagagggcttccctggtggctcagtggtaaggactctgcttgccagtgcaggagacgtgggttcaatccctgatccaggaagatcccacatgcgctggaacaacgaagcccgttcaccaccgctactgagcctgggaaccacaactactgaagcccaagtgccctacagcctgtg

SEQ ID NO: 41745 - DNA, 1320 bp, Bovine  19866880883232
  misc_feature (1)..(1): n is a, c, g, or t
ngagaattttttctgacttaatataacagaaagaaagaggagggagagggcaacgcttggattgcaaagtcatcagccggagccaaaggtgaaggcatactcatcttctcagaagctacagaactgttggatttcatagacaaccaaggccagatgcacgtgatccagaaatacctggagctcccgttgttcctggaagcctggtcatcgcaagtttgacatccgaggctgggtcttggtggactgtcagtttaatatctacctctatagtgagggtgtcctgcagactgcttcagaaccgtatcaggtggattatttccaagataaaaccagccacttgactaatcactgcattcaaaaggagtactcagagaactatgggaagtatgaagaaggggaacgcaatgttctttgaggaattcaatcagtacctaacaagtgctttgaacatcaccctggaaagtagtatcttactacaaatcaaaggtatcatagagttacccagtcctttctctttctgttaaatgtgtcttgatggagctttgggagtttatgcctttcaaggaattgttccatttcagttgtcgagtttaaggacaaaaattatttgttatatccctgtattatccttttaatatctatataatctgtaatgatgaaactttttaaaatccttatgcttaatccttctgttaccttatattggtaatttatatcttctctctttcacttgggcagattggttagaggcttatcagttttattaatctcttctaaaggtcagcttttggctttatagattttctctgtcattattgttttcaatttcttcatgttctttattatttttattcttctccttttgaggggcttgcttttcttttctttttctagtttccttaaagtataaggtcaggtcactgatttgagatatttagtttttgaaaaaaatacaagcatttaaggccttcagcttttctataagaacttcttagctgcatcccacagattttgcttttgtgtttttgttttcattttattaaaatactttctagtttcccttgtggaaaaaaaaagtttatatgtagcttaaattgttagagaaatgtaaatcagaaccatgatgaggtattacttcataccggtcagaatgactagcgaaaagtctacatataacaaatgctggagagggtgtggaggaaagggaacccttctactctgtcagtgggagtgtaaattggtgcagccactatggaaaacagtaggaagttccttaaataaaagtaggcctgccatagatccagtaaccccactcttagg

SEQ ID NO: 41746 - DNA, 1136 bp, Bovine  19866881097605
  misc_feature (1)..(1): n is a, c, g, or t
ncagagtcatcctgtcactgcaagaccaatctagaggcttatatgatcaccctcacccagagggtggctcctctttaaactcgtgcttaattttcccagtctcaagaagcagacatgggcttggtattaatgcacctgtttggtagctgtgacctcctgtggtttataattatgtgtgtggtgtgtcttttgtcttttacgtagcaattccctccccacctaccgaagtcagggtgcacaacagctccgcacacagcatcctcatctcctgggtcccgggttttgatggctactccccgctcagcgattgcagaattcaggtaacctttcttgatgaaaagaaatagctatttggggctcagtgactctgcctgacttattttccacctgaagagtggcacagacgtcaagttgacacccctgttcagaagcccttggcctcctgcctgccccgtgtccaccaggcacacgctgttttgtgatgttctgaccgcatggggcgctgtgcccttctctgtgcgtggtccagggcccaactggaggagaaacatgtttctaagatagaacatcatgagaccagggagaatgaatttttaaggtacaaaaacacatctagcttgtgaccaggagttcagaagccaggcatgctccagcctggctcctcctgggttggtggccataaaggacaacaagagacaagtcactactgaatgtgccaactcagcctgttggaaaaattgagggtaccaggaaaaactggggatgacagaccttgcagagtcatctctcactatctaaaattgatataaaatagagctatgagaaatataggttagtcatcctaaaatgcaggcttcccagatggtgcagtggtaaagaatccgcctgtcacagcagaagatgcacgagatgcaggttcatttcctggctcgggaagatcccctgacccaggagtaggaaatggcaacccactccagtattcttgcctggaaaattccatggacagaggagcctggcactcacagagtcagacacgactgagcacacatacatgtcgtgaaatgatacctcgccatgaaatagactctgctgtgagcactcactgcatgaaaaaggaagggcggcggtaacgctgt

SEQ ID NO: 41747 - DNA, 798 bp, Bovine  19866881286161
  misc_feature (1)..(1): n is a, c, g, or t
naaaacatgttgtaccgataaaagtcagaaaagactaaatagtattggacaaaacagaagtcaccaagaacagtttgggaaaaaaatcttaaccccacaaaatgtattcctgataataatgggcttgaaattatagggtgtggatatacaatcttgttatttcaggagatatatgtttgaaatttaggtcacggagccacaagctgacatttcggaattctaaatcccccagtggatatgatgaggggggtcactgggctcgagtctcacgtctgactcagacccacaggctccaccgggtaacaagatggaaacccattggcctgaggaaaacaccagaggagaacccaggagctgggtgcttatcttggtggtggctgttggcagaaattaattttttttccttctctttaaagtctgcacctacttcctggtgaccaagcactggaactaaggtggaagaaaccctggctcccacccctgctgtttccggagcagtgcaccggcctgctgccgctcacagggacactctttacagcatgctcctggacgaagccgcggtttccgtaaccgtgctgctgggtcctggggcatgaaacagtaagactacgtgggagaggtaaaaatagaaatggagtccagagcccaaaaatgggtgaagaatgaaaccaacgccaggaccaacggaagtgagaggggtgtgtcctgctagtgcctggatctgaatcttgtccaaaacattcattcgttactaagtcagagtttaaaattgcaatgaactgggaatctgctacaaaa

SEQ ID NO: 41748 - DNA, 3651 bp, Bovine  19866881386600
  misc_feature (1)..(1): n is a, c, g, or t
nacaaagggaaaaaaaaaagttaaaaatgtgttaaaatagtagactagggcctcaatgaaacaaaccaaaaaaaaaaaaaaagcatgtagctcaaatacctgtcactgaccctaaccaatgaggtcagtgtaaggcaagatgctgccaccagaaggaccatatgggcaattccagaattagcttctgacctccaaccccttcacactcaataataccctagggctacctcaacaattagaaaagacatgaaaacctaagatggagggacaaaacaattcacagagactcaagatcaccttaaaatgtcggagagaatcggcaatgccaggggcaatctccttatcggcccagccaatcatgacaccgtccagcaggacagggtagcactcactgtacggccgatgtggagttccgtcaactggagtgacccctggtgaagtgaacaaatggaatgatctcatcaggatgctttcccaacatttaaatttccctccagactcaacaacggctttacctttccagacatctaatcaccttgtctctagaccagaatgtttttatatggcttgaggaaacatttaagtctttcagcaaggacccccaggtctagggtctctggctttgagcagagtagcaggtggacaggggtataaaggaggctttttttttgtataccttttatatttttgtttctgagccaggtaaacatattttccccctccgaaatctaattacatttgctcattattcacacattacaaatttgccaacttgctaaaatgtatctgtaaccccagcatcaatactagtggctcctctcgcgtcatttgaggacatctagtgaaaattttgagtcaccagaagcatgtttccggctgaggtcacacaaggggatgcagtttcagctcatactgcaaataagggtcctttctgcactgttcagtgctgtatgtgcttttgctgtttaaaatggccttcaagcacagtgccaaagtgctggcccctaagcacagggctctgatgagcttatagttacagtgtagttagctgaaagctcagtattaatgaatcaacaatatatattaaataaggcatctttaaacagaagcatgcataaagcaaggccatggacccagcagccgatgaaaatgctgttacgagaggtatgcaggaacctaaccttttcttccctaggaccaatgactcagtgtctgctaattcagtgccagtggtgacttagagaagtactgcaaataacaagaatctactctagctaagtaaagaacactcatccatgagctgtcaacaacctctgtaaaggtgctttacaaaatggcacaggttatccacagtgtgacaccatcacccttatatgaattctctgctcaaaccccagagaagcacaactgaatagctttgcacctgtaaaacccacacaagcaaacaagacagactgctgactgctgcgaaccacctacccaagttgcagagtagagccggaatagatgctgtgtacacagactgtgtgacgacctcacagatggcggttaagtggttcatcagtccacagggctccccatcaggggtgtgcacgggacaaaggaagccccaggactccggcagcagcctgcgcacagtggtggtccgcattttagcaaaatcagcccctctgtgcacacagcggaaatgggagagatagcgtatgaagttcagcttgtcagccacgacacaaagtccagaatcttgcaggaagccaagaccttaataaaacagacatcattgacaaatagaataaactgaaaaaaaaaaaaaaaagaaaaagcctctttttatttgaggctctgaaaagataataaaaccttagaacacatttgagatcatgcatgctcagttgctaaattgtgtctaactctttgggaccctgtggacagtagcctgccaagctcctctgtccataggatttcccaggtaagaatactggagtaggttgccatttctttgtcaggggatcttcccgactcaggcatcagcaggcaggttcttcatcactgagccacctgggaagcccacactagcgatcacagagtgggttatcacaaagtttattcagctgtggggaggggaagagtttacaaaggaaaaaaatacagtaaaaatccccagatttcacaaactattagccttaattgtttccccatctcttccacatgatctctatggagaaacataagtgagttacaaaacagcaaataattaaacgggattcacccgagagagagttgtataacacacaagcacttgttagcccttaaggaatttgcatcagtatcatctcctttaaaaaaaaaaagacttctggcccttcaataaccacttagtaaagttttccaggtgttctgatatgactggtttagggatgggtatgtctaaaaaccctctcagactaccacctagttaacctatcctcagaaatctaagcagtttctggttttctagaaggaggtacgggaaatgcatttgttcattaaaatcagatttaaactatacagacaacctgtctaaagcccttcagcccaatatacacctgtcaaaattcacaacctgaaatcggtctttaatgagtgagcagctcacttttaaaaagaacctctcccgggacttccctggcagtccaggggttaagactccaagcttccactgcagagggcacaggtttgacccctggtcagggaactaagaactgatgtgtcatgtggtgtggccaaaaaaccaaaccaaaacaaaacaaaaaaacatctctcatagcaatatgcaaactgacattaagcaaataatctgaaaattgtaacaaaatgaagcccatttatttaatttcacctgttttagaacgtagatatccagtagcaagaaggtattcaaatggttttgtaaggtctattcccagactaaaaatcttcatcaaattttcactgtttaaggacacattggtcttctgagacttcttgtctatagctattttaatagacactaaccaagcttccaatttttcctgcagtaagaaaaacagtttaatttttaggtgttttaattaaccacaaatttcatatttactcagtctatggaattttccaggcaagaatactagagtgggttgccacttccttctccaggggatcttccctacccagagattgaacctctgtctcgtgtacctcctgcattggcaggcgcattctttaccactgcatcacctgggaagccctaattattgataatgaatttggagatttttacttcagtcctctccatctttcctgtcattatgttatctcttaaattctttttttttttttttaaacaatcatcattttatttagcccttgatcctgtgggtcagttggggaaattttctggtctgggtcaacctaactgaactctgcattttcagtcagctggagggtcaactgatggctgggcaatctaggatagccaccctcacctgtctgcagttagcaagctattgagggagtttctgcagttctcttcctctgcactttttcccactactcctccctctcagaatttgattttgtgcaggtatctttcccccaccatcccaactccctatatgtagcatgagcctcagggaa

SEQ ID NO: 41749 - DNA, 1555 bp, Bovine  19866881543860
  misc_feature (1)..(1): n is a, c, g, or t
natgagaggataagaattttacttacattgtcccttattgtctatctatggcttaatcttagtaatctaaaagaacatattcctgggggactcccctggtggtccagtggttaacagcctgccttgcaatgtggggaacacgggtttgacccttggtcatggaactaagaccccacatgccacgaagcaactgacacttgatgcagccaaacaaatacttataaaaaggaatatactcctgagttcagtctcatacactattatcccagtctattcttcttcaaaggaaagcaaccagaaaaggtatttcccgtccttcacatacgctgaagccagggatttagcattctcccttgcaaagttgtcatgtcctttaaatttatttatttatttatatggccttactaggccttagctgtgtacacaggagttttagatgccgcgtataggatctagttccctgaccagggatcgaacctgggcaccctgtattgggagttcagagtcttagctactggaccaccaggggagtcccaaagtagccatcctttgaaaactctgctgcactctccactcctcctgcaaactgagcatttgtacaccaagtggccagctcacatttgatgtcaagatccaagaaaatctgatcttatcatgagataaaatgcagaccccaccccccaactccatccatggacaatggtgactactcctccaggtaactttaaatgatctaacaacttgactcttacctttcttggtcccctttgctgtctctttcttcacagattcttcaggacacagtaaggactgagtaacacttgccatctctttagcttgtatgtactgctgaagctccttagcgaaattatcctctggctcctgattgcagatgtcatcatcagtatatgcatcatagtccttacttcttgatttcctatgttgcaaattcttcggagatatagagcttctagagtgcctaaactaagtaaaaattaaattttcaaatttaaaaacctagcatgatttgaaacaatctggtcatgaaggagaaataaagactggctgtgaactgatcattgttggaagttgactgatgagaacacaagggtttcatatgctgttctttccacttgtatgtatatgaaattttccggaattaaaaaacaaaaacacatgcatccatacttaaaagatgctttgagggaagactcaatctgttcactgtgtgtactttactagattgaaagactaaagccccacaactgaattatttgctataaaagaactacagtaatatagtccacattttatttctccctttgcatggaccatcctttcacatggtttaattcactaacttgtcatcgagagcaagtaaactaaaatggcccaactggaaatccacctcaccagctaccaaagtctacttcctccctttaactcgaagcattgctggtggggggatgtagcagcaatgatgacaagaaactgccaagcagtccaagcagcagacaccttccagcacttggtgcagaaacattcccaagtatgg

SEQ ID NO: 41750 - DNA, 699 bp, Bovine  19866881612215
  misc_feature (1)..(1): n is a, c, g, or t
ngagggtgggcttcatcccaaagactgaggtcctgggagaaggagggcgttctgccttcagacagcctttggatatgcaacaccagctcttcccaggtctccagcccccaacactgcaggagccaattccttaaatctctctctttctcactctctcactacaggagatgtgcatatattgagttggctcaaaaaattcattagggtttttccgtaagatgttatggaaaaatctgaatgaactttggggccaacccaatacaactggttctccttgattctgtttttcctggagaaccctaagataatggccttgggcaactgccccctaaaattcccccacttcccccagaagtgtcctttctttcctcttcagtgtggttgctgggtcaaggtcacagggatgagaaaagtcagggagttataacctgcttctgatttggtctaaagttaaaaaaaaaatctttcagagaaaaaaaacatgtgtgaattctacatgactcacatgcagagggcctcaagccttggctagcaggcacacgcttggcaagtgtgctctatcctttcatagacctaaagtcatcaaaacatctgtgttcccattaacaacatgctgacgtgacgcatagctgtggcttagaggaaaccaatgcaagacagcccatccgaggtccaagggggtcatctgcagctgcctga

SEQ ID NO: 41751 - DNA, 2195 bp, Bovine  19866880639464
  misc_feature (1)..(1): n is a, c, g, or t
ngatctcacttcactcattttccattttccatcctcaccatgcattcctataagctgggactgccaagctgtttcatgccagggactttgccaccttgacttttacaagagactccaatcataaggcactgccctccagggtctccagagctccagcggccccatacagcagacccagcctgggcttcaaggttctgcccactcctgaaaccaagtgaaagagcctttcctcaatgctggacccagaggcccttcaaaagtgcccccagccaagctgggatagcacaggcgaaccctccagccttggcagagccagacccagtggaagacaggcaggtgggtccagcctagaaggacccagcagtgattcatgaaacctggaccccagccttcccagctcccaggccatctttacgggcattgaccacaaatgtaaaaacctcaaactaagccatttggcctccagcaaaggtcgctgtcttgggcttgtgtagttttgtctgagacaggaacaggctggaattcggaacccccaattcccaaccttctcacactacagtgtgcacaggaggcactagaactatctatgctgaaatgcagatccccagacctttccccaagagactcagtggggctggtgggagcaggaagctgggcagaagtccagtcttggtgattccgatataggtggccctaggaccactcataagaaaacacatctaaatctcctgagaactgagtccctgcccctcacctccatgcaaaaagcagacccctgccttccaccagcccatactaggccctttcttagggcctccaggctcagcccatgtgagcatagctgcccctctgttctgactgcctcattccctgattctaaacactgggcgtgcagctcactgctaggaccagacactgccttgtccccgcagtgctcagccccctgaacccagaaccttccccacccatgcctgcatactcctgcctgcttaggccgacccacccacaaggccctcctcccacccccacatccacagaacaaaacagactccacggaggagagaaacagtgggtggctgctctttgggcctgtgaatttctgcaagtattatgaatgacccaaggagaaagcacttgtaaaaatgatgacaaatagcttgacagtgttttcaattacccacaattacatctcaccttctgaaaatggattctccacattgctgtttttctcaggagcacccacctggcattctcacaggctgcctctgctggaatggcaaggggaggcgggcagctgcatgcagcaggcacccagtgcctagggagctctgccagtgccccggctgggccacagaggcaagtgggtcctcttgtctgactctgatttaaggagcaggaggccaaagaacaccaaaccacacggtgtcagtttgactcatacagtctgcaagcccagcctgggcttcccaagtggaaagaaaaggctctgggtgtttggggcacctcaccccaccattggcctgcatttcagaggcataaaaagggccatggcccacctcagcacaggcaagtaccagcaatgactcagtacttgagtgctggtgccaagtgtgaccactgtgcccccagtgctgtgggccttagtgcccactaggcaagggtgaagaacccaggggcaagagagccctgaacggacacccaccggatgcttctggtggtcttagcctccttccagcctccccagcagcaaggtgcccaggcccctctcagaccatgagggacacagccttttactattcctttcatagattctgactcctcttttccagctgctcccattgttattgagtaagtgtagtgggctggttctctccaaagtgccaggacccctgttaagagtcagcccagtcaagcatccgtaggactctcagggtgagagaggcaggtgtaggggcttcaggcccaaggaatgcacatgagttaggcagtcagccccccatagtcttctcagtaacaaaacaaggctgaccccagagaccaagtctcactctggcttttattccacatattgcattgaactcagacatgctcatggccacagctgctacgcaaaagctgtgctggggctggaaaatgcccctgccatccccagtcaatctctactctgctccagtccctactcccagccccaggcc

SEQ ID NO: 41752 - DNA, 1560 bp, Bovine  19866880660371
  misc_feature (1)..(1): n is a, c, g, or t
ncacccagctctatggccacagcagacaggacgggcagcctgccaggactgtcgagagaaagagcagtcttgggtgggctgaaaaccaaaccccatcaaccctgcccagcctcatgccccacacagagactcacattgcctcctcgaccctcaccaccagctttctccagccaaagttaataattttaaagtaattaagtccagcaaaccgtaacagattaagtaaggactgctggtggctggcagagctaagcagcctcacctcagcctgagcccatgtgtggagggcagctgggtggggactggatcccaggtccagcctccagtggcctaaccatcggggggcagagataaacctctctgagcagccagctgcctaatgagactgtcaggggacttcttaacaagattaggcagaacccgggctctgccctacggtgtgtggaggatttctattcaattactggttcgggggcaagaggcagatactgcctgggaggagtggggagcctctgccgataaggtagcacccccctggcactcctagttctggcatggccagcccagactcccaggatccacagtggcctgggacagtgttcccaccggtcagaaggatgagcagagatggcccggagtgcagggcaaagccaggtctctggctgccaacccccggacacctgctcctcccttggaacctaggtgagctcccaggagtggccacaaatgggccacctggaggaaggggacagagatgcctgcacccctgcccacaacaggtgtgtggggataggaaagacccccctccttcctggggtgggaaacactgattctggggccaagaactctgcagacacccctgcacttgcagggggccacagagcagtgagttccacctcctggggatcaagccctgctccccttcaggacgtgggcgtaccaaggagttccgggtcacaccacacccccaggagccctcaggacccccagggagggctcagaccccaggacccctccctctcttcctatccccaagttcctgccctgccaggctggcccccactgttccctcactgccccaaatgccaccgcagctcagctcattctgccccatgcctgaaacacaaccttccctaactcaaagccttcctgcacggccaggcccacagcccatctccttcactgatgcccaccggtggacacaccacagagctcaaagcctggcttcttccttcctaaccctgcctgccccacagagctttcaaatcagccaagtctgaggtctcctggagctcagtgtgtagaaacagtggccccagggtgaccccagggcttccggtccaaccccagtcccgagtgccctgtgggcagagaagccccacactgagaggctgctccctcttctggagggcagctcagagaaggcacagggcacgtggtgttctgtgggcccagcctcctccctcttcctcaggtgacacccatgctctgcccctcaccctcagcttggggctgcaacagccccaggcctggctaatcagggcatcccctccactggca

SEQ ID NO: 41753 - DNA, 2556 bp, Bovine  19866881023198
  misc_feature (1)..(1): n is a, c, g, or t
ngagggcctgacaaggacatgattaagaggagggaggcgtcggcagaaaggatttctccgaataaatgctccatgtgtctcatcctcagcggccacatttggctccttgtgaagtctggcccttccctactcccagctctgcagctggggtctcaaagggggtcccagctgctcatggacccctgatgtggaccccaaaagcatctactgagccccactgaactctgcctctgtctgcttctcccagcccagaaggcacggcaggtgccaggactgcagacagaggctcccaaaggcaggaggagaaatggacaggaaactaaccctgtgcttggctctgccctgtctacgatctccactaatctccagcgatcctgcaggctacatgaactatgggctcccttttacagatgagaaaactaaggctaagaggacaaaacgtcctgtcactgccaagagcgtgagaagcagagatcagaatccagcctggtacactcaaaagtcacactttgtcaacgatcagggtgagggtgttctcagccctgaaactcacaaatttaaatatggggtgcaggagcattttaaagtcactgaatggcattgtccccatttgtgatgattgattttatgtaccaacatgtctaggctatggcagccagtgtctacatgttgctgtaattgtatttttaaaaatgattaacatttaaatcagtagactttgaataaagccagttatccgctataatgctggtgggcctcatctaatcagttgaagatctaagagagaagatcaaggtcccccagagaagaaggaattttgcctacagactgccttcagatccaagactgcaacattaattctcccctgggtctccagcctgctgtcctgctctggagatctggacttgtcagcacccacaatcatgtgagtcaatctttaaacgaataaataactatctgttgctcttgcttttgacagacggatggattggatggaggaagggagagagccagagagagagaaataagcatgcctattggttctgtttatcaggacaactccgatgaataaaatattccctggagcaagcccttgtcaagatcctgttgctggtcaggagtatgggggtgctgagaggcaagcagagaagcaggacctatgcccgccctgagatatgtcccataaaacttcctttatttctcttaaagtgactggaagcaacattgttaaggattgatcttggctttatgaggtataaaactcaaaagaaagagctattagtttataaccatgtgattccaagacctcatccctgcccctcattccttcttgcccgaggaagcaacagaatatctaacatccacagcggaggtcccaaatgctgcaggagcagaagcggaagtgccaccagagctgggagcacttctgcacagagaaactcttcagttcagcctctctgtgcagacagaagggagtggagtctttattagtcccagtatcagctcccagaaatagtgggaattgggaattccagtgaggtcctcccccaaggccagaccactaagactctcccaggacttcagaaagaaggatcacacaatatcttggatcctttgagaaggaagacctgacactcccagtgagcactttctacactttgtctctaatcttcccaacaatccaataaagtaacactgtctgcatttacagtcgaggagcctgaggctcaagagttgtcacagccctctttccaaaggccttgcaacaagatggttgggagccaggattacaaatgagtgttttgacttcaaaaatgcaagttcctggttgcagcccaaatcctcccactgaccttgagaaggtgatcagtgctccaatttacctgactacacttagaaatgcccctttctacagatgtcttctggccatggaaaatgctgactctatctgacatgtgaaagcagagaagagaaactgccttcagggatcatccccaccaagactctttaagcaaatcttcagataaactgggctccctgccttttctccaaaataagaatggatgagtcctccaccccagttggtccggctgaggtctccctcctgcttggagtcccaggccccgggtggccccagctttggccttggctcccataagagctatggtgttaatggcacaatggcttgtctagggctgtcttgagcccagccaatgtagaagtctctttccaagggtatccttccccaatcactttctctcactaatttaaaattgttcctaatcacatttggctctctcttatctgtttcaaggagacatccaaatcccagggagaaacagagatgctatgtggaaactcccaaataaagagtcgtggtgacctgggatcagaaaccacaggatctctaagatggttaaaccccccatgtttggggtcaatttcctcagttctctccctcctgcccttgccacaagtctggcttccagaagccaactgtcaaagaagaagaaaaaaagccaccttctttgcaggtcagggtaggagagttttcat

SEQ ID NO: 41754 - DNA, 1677 bp, Bovine  19866881139915
  misc_feature (1)..(1): n is a, c, g, or t
ntttgggctgggttttctgtagacatttatttacttttttctaatataacagaatctcgcagtactcccccgaagctaccttatatctaattttctgaatttctagatataaaataaatcattatacaaaaaaaatctgtatctacagtgtacggaacaaaaggagatttcaaagcccattaactcacagagatagtatgttactgggagaatatgggctgtataattaaaacaatttaaatccgattataagaagacagtgggctttactgcctgccaccatctcactaacggaaagaaaaacaatatcttgaggttttttttaagttactgtaaacttgtgaattaggacacgcatgtaccaccactccacggccttatgttactgatgagatgaaacactccttgcagagaaatattccttacagagaaggtaagccatcttcagctgagagatgctggctgagtataccgtctggtagcggaggcccccaagtcaggaaaggaagtggtccccgtgtcagccagcgtgagagtgggttctctctggagacgccaacctcacggttagtgatgcctggctctccctgcccactctctactgaactccggagtccagagtctgaggagggaaaataccagagggcctgggacagggagatggaccacatgactgttcacagcccagccaggaacagctcctactgtggaagtgtacgtttctttttgttggtcttggctgttctgggtctcattgtggccagtgggatctctgatctctgttgcggtgcgcagttcttcagctgcagtgtgcttgatcttcagctgtgggacctgagagcttttcgttgcagcatgtgggatctggttccctgaccaggggttgaacccgggcctcctgcactgagagctcagaatcttagcaactggaccaccagggaagtcccagaagtgaacatttctaaacacaatctgaactggagaagcagcccagggctgtaatgaagtaaatctatgatgatgagtgcccccacgtgctcatccactgggaagcaggatggagtcaacttccacattcctctccatcgctaggggctggagttgatgggctggttccattgcacatcagtgccatcaggaaactcttaaagaacacccatgcctcggccctaccctgacacgtgaaatcaaaatctctgggtggagcctaggccctgacccttgcctgaggtccctgaggatgcagacgggtctgcggtgttcacatacactttgcacaatggctggcacagggtcaaccatggcagagctggagatggggaacagagagtggtggcccctttgggttttcccactcctgtgagtctctcctctctcagctcaaggccccgattaggtgtatggctctgggccctgatttctcctctaagctctacagcctgcaccccatgctcacctcaggggttcaaatcccagagctggagtcacttctgccagaaccacagaaacgaagttctaagagccctgcagaccttgtcagacggtcagcaccctcctcctacatccagcaaccctggacaagtatcctgccttttcacatccctaagctttcactcaagctgttccaccaccttggagtgcctgcttccctttcaccacctaagtagccctcatccc

SEQ ID NO: 41755 - DNA, 960 bp, Bovine  19866881493771
  misc_feature (1)..(1): n is a, c, g, or t
nacccgtgctgccctctgtctcctccttgccctgcatggcccccaggcctgacctgattgtgtggacaggcttcctgttttgctgatctgtttggcagggactcaggacctggatatttaagcagcttgtttattagaagcggctccctttctttctgtgtctgacgtctccctggctgcatctcttttgcgggtcattaagaatgtcacatttggtttaggcgagcgtgtcaccacggggtttctctgagagcatcacgtacagggcggtcctgaaggcgcctcccaggaactccctcgccggctgcctgagaccgactgagagatggcgtctggcccacgaggcgtcctgatggcgccagtgccctggctctgggggtgcagagcttcaccaggccactgagtctgacgatgctggtgctgggaatggtgcttgcaggagtgccctgggccctcacctggcctgagaggggcagaggtcaaggtctctgaccgccaggagagcccccttctcatctgtcctgatgcggcctcaccaaggagggaaaactgttgacagacggagtgttggggtggacagagcccatgtggggctggctgcaggcatgggcatggccgcaccgcacctccagccacccctctgctgtgtccctcttgtgtgtcaggacactggggcctgaggatgacagggctgtcccaagccagcctacagcttggggcagagccagacccgagtgaccacagtccccttccttctgctgagccacagtgcccaccagctccattctgccacctacctgcaggcccctcactgagactctgccctttcctcagagtctgagctgggattccaggacccccagtgtattttgctctgatatttgctatgggaatctggttgagctcctggaagcaaatctcacagatcccttctattactggatccccctggagttttaa

SEQ ID NO: 41756 - DNA, 1776 bp, Bovine  19866880995094
  misc_feature (1)..(1): n is a, c, g, or t
nataaaaaatgttagaaaattcccaataaatcagacctcccaagaatgagtatgactggagattccatgcttctaagccacttccagtatgtcacaggtaatatagaacatcgtttgctgtgaaatgtggccaaattgatggtttcatagaacattacttgttcagcaagttctgtggaggcatgcaggcattccaaatattccaataaaccacaatgaggaaacaccaaagagctgagagtgttgaataaaaggaaatagcctggggtagaatagacaggtggagcgtgtgcatacttttactttgatgcaaatttccaagtccacacaccatggctgtgggtaaagttttaatgcccacagcttggacaagttgcaaatgagtcatcataaattcagtaactagatcaccataaaccaagccagaccataaaatcactctgcagacagaatactgaagcccactcccctatcccaagcactcagaaagtcataaaggagataagcagacagtacagggaatctgagcactcacctggaaaagactgagtcatcaaaagcagacaatttaaagcaactcagaaaagaactacgaatctgaattgactgtaaatttaagtgactgctcaaactggagcacatggtgagatctttattgtcaacttacttttctcagctccccaggtaagagaggacagtggaagtgaccatccacttacaggacataaaaatgttgtattttgaatagcatgagtagtttgagtgaatttgttattcaaaagtacagtaagctgacttaaatccaggagtctctttgaaaatcctgctgttctttcatttactcctggtagctagcatataatgaccatcaaaattttaaaaaaaaaagcacatcagctgagagccatactaatcagaatccacaactatctatctgttttaaagtgagtaagagaaggatcttctggaacttaataaatgtaaagcaaaattgcagaaaggtaaaaatgaatgtaaaagaaagtcatgcaatattgcaaatatctttgaagaattaatgtgtcaggaaggtgagctatttggaatcctgaatagaagaacctaaaatcaaaaactgatcttgttgatacttcattatctagcagatatgagaattcctgtcacaagaaaagagttatctactttagattaaaaggtatatttattcttttattcaatacttgaatgcttacaataattgagcccctgtgctatgcatgaggcattcaaagatgaatagggcatgagccctgtctgtaaacagttcacaatcttctgggaataaaagatagtaaaacaaagtatcccataaaggatatgaaatgccatgatagagggtatagagagagacaggaaacatctggcttggaatggtcaaggaaggcttctctgaagaggtggcgacagtgacagtgttagtcatccagtcatgtctgactctttgtgatcctacggactgcagcctgctaggcttctctgccaatggaattacaaagaaagaatactggagtgggtagccattccctttctaggggatcttcccaactctgggcttgaacccaagtctcctgcattgcaggcagattctttactatctgagccaccaagaaagcccactctaaaggtgggtaaagtcataagcaattgaacagttattggcaataataactcttagcaagaagaatagcatgtatatatcaaaggacagaattgttggtttattaataatacatttaa

SEQ ID NO: 41757 - DNA, 1209 bp, Bovine  19866881375684
  misc_feature (1)..(1): n is a, c, g, or t
ncagttaagaactattacatgagcctgttttaacaatttaaccctctatgtcaacataaaacaaatgcaacatctttgtattttagcatcacccatttccaccaactatccagtttcctgtgaacaacatgagatgctctttcaatgcctccagtaaaaatggaatcagattctctagatttagattatttctgtatatgtgtgaggtctcatactattgttaagcttcataaaatgttaaaagtgctatcaaagtctgcatttttattgacttcaattagatagtaatagttccacctaagacagtttttatcagaaactttctctttcagacactgcagagagggaaattcacatatctctataccccaggaggtgactgacagtaaatgatttaacacaagatagtcacatctaggatttaactgattttgcatgaagaagaatctaaccacaccaccaatgttttaaactttaaaacacgttctatgttgaaaactgactcttgttatttatagagaacataatgcagataaaaaatcttgaataaagggattatacatgtttgagtttgctactatgggaaataatttttcactccttggcttcttctcaaataatcgtgatgttggcagtatttatcaaccttataaaaatcacatactttaaaaatgtagtgcagtatcttacttgaatagtccctatttaaatgcaaatgttaggttccttctgtcataaaatgaatttttcaataaaaagaggtatgtattttttaatgctaacggcctgtttatctcattccatgacttggcattaatatccaagcacaggaggtttgtctttgggaggggataaaaaagatagatgtacaggaaaaaaatgcataaatctttgatggaggaatttactaacacaataccgaaaagtttttaaagagtaattttgaaaatggtctctcttagcaaacctaattctattttacaacaaaatataaaataaaatcttagtgactgcagatttctgtaggggaaaaatttgaagttctatgaatcttattacagtgtaaagaaatacagctggatttgtgagtgaaaattttaaattgtgtatttcttttatttttcttaatggcttacattttaaaaattactatttagtgttgaaaatgtattgaagaaatgttattgaatgcttcatattcacaaggca

SEQ ID NO: 41758 - DNA, 2537 bp, Bovine  19866881507939
  misc_feature (1)..(1): n is a, c, g, or t
naagaaaatgggagagtattcaagagccattctggaggtgtgatatcactagaaaactaaataatatttgaataggcagatggctattcattagtttcttgaaatgtgaatcaaattctccatcttgcatcaagggaaattcacatgacacttcccttggtttctgacttaactctttttaaaaataactattaattagctgtagccatcatggaattgtgcaaaaatagctttaataaaataaaaattgtgccttcattttaaacatcaaaattgtgggatgtttttgttcccctgactgaaaacaaagataattctctcataagtggagaacttgtattatattctgaaacatggaataacttttttttaatagcttagctataaaccattcaacattaggggtccatgatatgaaggccgacagtttgtaatgtagggtttaattaaattgggcactgctataattaaagggtttgagttgttaatgcatcactctggcaaacatttaatttttaacttgctgttgaaaccctcattaaaacaggatattagggcagctaaatagaatttgccagaggaaacatttggatttttagatgtaattcagcacgatacactgttgtgattgttttctttttaaataaaaaaatgaggattttggaagtcaagaatatgagagcagtttgagataagagagcaatttcatttaaaaaaaaaatgaaactaactttgagaagaataattgtacctgccagtgttggaaaccagtctatggtcatcccaaaccacactggcattttgggttctcacattgagtctgaagtttcagattatttcagtatcactttttctattttgacaaatatttatttcacttattccttttgcaactacaaaaggcaaaggggcagatgcaccattaatctgttgattcctgaagctaacattaatgaaaaatatctatattggtctatcgtaggctccagatgattctctcaagtagaagtggctttgctaaccagcattccagtgcagattcagtgattctttccctgattcttagatctgaatatggaatgcagaaactcagagaaaattctaagcaaccctagcttcagagttcagtctgtcatagagcaaaacaaaggttaaatgaagttgataaatgttacattctctgtctcatttgtaagattcaaatgatgcaatagtgtatttaaaaatatgaggaaacttgtacttaagaaatataggacactttgtttatttcaacgtttattaaacttaatttactacaaggcctctctcccttcccacagaccacgcactggcaaatgtcataatgaaaagaaggctgatttagcattaagggaccccaaattaattctgcttccattgtttgctaactgtgtgagcttagagaaattaattaaaatgcctggaagattcagtttctcatctctaaaataaagttgataattaccatagaaacttattgtagggattaaaagaatatatagattcagaaacacagtaaactttaaagtgtatttttaaaagttattttaatttctttgctcttacttactcagaaatttgtcaccatttccctgacactttattttctatcattctacgtattctactggacatcatttactatgcagaaggttattaggggataggaggagtgcccagagtatattaagatagagtgggtccacttcactaaatatttattccctggatatattcaggcagaacttgaagaatattgtacagaaaatactgttcaaggttaattaatctcaggttccttcttattcaaagacattgtgacttgaaaaaaagtattagagctcataatgtaaataagctattgacattatcatccaatgaataaatattggcaaagcatggaaagtgtattcaggtataatgaaaggggtacaaattcatattcttgtaagtttctactagctactaaatttaaaggaaagaatatctatctatagacagatgatagatgatggatagataaataaataagcagaaaaaagcaaagtctatgtcagacatgttacatgaattactgtttcaagaatttattcatggaataaatatggagttagtatgatatctacaaagatagaagagtataaagttttcttttgctttctttctttttgttttttaactaaaatgagggttttctatgatcaggttaaagacagaggtgggaagtaaagatttaacattaatatttaaagaacatgcatatctggagaatgggaggtaatagagactttacatgtaaagtacacttttcatgtaactgaaagaatacaaaactggaaataccccaaattcaaacaatttcttttgggaaccatgatttttgcatatattattcagaatttatctgttaatacaataccaaatatggttttaatgcaaaagaaagaaatttctttggaattgtaattgatttttacctactctttcagaatgaaatcctatatatgtgcttgatt

SEQ ID NO: 41759 - DNA, 2506 bp, Bovine  19866880368071
  misc_feature (1)..(1): n is a, c, g, or t
ntttcactttcatgcactggagaaggcaatggcaacccactccagtacttttgcctggaaaatcccatggacggaggagcctggtgggctgcagtccatggggtcgctaggggtcagacacgacttgaaggtcttcactttcacttttcactttcatgctttggagaaggaaatggcaacctactccagtgtccttgcctggagaatcccagggacggtggagcctggtgggctgccatctctggggtcacacagagtctgacatgactgaagcgacttagcagcagcagcagcaggctgataggaaaataattttaattagtatgaggcatcaagaggcaacttgatgcatcgaaaagttgaattgactttttagccaggtttttatacagtagaaaaggacttcaccccaggtggagaatgagtgagcgagactattccagtggaaggtgtaacaggtagaaaaacataaaatgaaagagtattcacagactgtgcagggcagactgatgaaaggttagttggctggataataaatatctttccatacgttgctaagaaatttgaatctgatctaaattcaccaagacatgttctacatgctagtggaaaccagacacatgagttctcggattggctttactgtcaagtatacaaattctgacctatcctttaattctgcacatcctctaaattctgggatgtcaagatgacatgaggataaatatcaattaggagtaaaggttctcatataaaaggcaaagattacactagccagtaacaactgtttctaaatatttaaaaatatgtgtttttataaagatcacatttgcttttcctatgagaaaaacatttgttttccatctattatgagagtatagttttactctgacttattttcagtctatgatagacagcaaatgtttcttttaatgtgttatatccaaggagaaacatactacagaaaaaaattaatgatggatacaagttgaagatattttagataaagtcttctattatatgctgacttttccccaacatttgttcacatttatctttaaactgacaatcctgggtctcttcttaggagccatagtaaacgtaacagcatttgtgattgagaatggattataatgtaatgcaaatatatgtgcatttctgtgcacattcatttataggatattcattttctgtggattttgttatttatacaaacagcagctcctgttttatgtaggatcatgtcaatattttgacttttttagcagtaagaaagtgattgacaagataagcaggggactggagagtaatagctgaagtgtataatgttatgatattaatacagatgtgcaaagttatacatgaagtagaacaaaggtgtgtgtgtgtgtgcgtgtgtttgtgtctatgtaggcacagacattaatctcaggacaatagaaaaagtttcaggaacattaccatttagctggtatatatttatatctcttaatgttgagattctttaataaggcttagttaaatggttacacccatcagtttatgacagaaaagtatctgttattccagagtttgacacagaatctctcagagatttgtaagagctttcattaatcagtcagccttccacccaataaaggaagccctacacattaactctgacagatgttagagtcaaagcttcttcctgtgtttataaatcagtacatcatctaaaaatgtttacattacaaatgtgatttttcccccaaatgataactattatgtaggctctcttttaccaaaaattattttcattgacagaatagaacttgacctaaataattctcaacgctcaaagtttttaagctcaaaagtatttttagataaaagaggagggttggctagtttaaagccatttagtttaattcatgtatctcagttacagccatcaagtttaaagtaggttcacaggtctttccttgttaatgactagaaaactcacttttgcaggaaacattctaagtaaaaaactcacacttagttcctgaccctgctgccctctaatatagtattttatattggggttgtacataacacctatatctaataatctctttgctttaaagttcctactttgagatcatgtgtacaaggattttggcatttctttattttcacataagagcaaagctaacttcctctcagacataacagtttagagtatctttggcactgtctcagatcctctatagcaggggttggcaaactaggaccagcgaggttcaattccagcctgattgatatttttataaattaagttttattggaacacagccacacctattcgtttgtgaattgtctgtgattactttgcactacagtagcagaattgagtagtaacaatacaccatacagcgtgcatagccccaaatatttacattctgggccttcacagaaaaagtttgcaaactactattatgtagagtataaataatagaaaacaaaaccctacaaccttattacc

SEQ ID NO: 41760 - DNA, 2084 bp, Bovine  19866880518118
  misc_feature (1)..(1): n is a, c, g, or t
ncatacagctgggcagatgttaggaccagaagcaacccaccagacaacatggtaggacttgcaaatgtaatttcaaaacagcattgttgtggagtcaataaggtgttagttgctaagttgtgtccgactcttgtgaccccacggactgcagcccaccaggctcttcggtcactgggaatctcctgacaagaataatggagtgggttgccatttccttcgccaggggatcttccctgatccagggatcgaacccaagtctcctgcattgcagtcaataatagacacaattaaatgctcactgtaattggagattagctaaacaaattatgacaaatccattaaatagaaaactaggcataattaatagacgctagagtctatgtctgatagaaacattttccaaaacatattgaaaagttaaaaaaggtaaggaatattatgtacacctatttgtgtaaaagatatttggtatacttgcttgcatgtcaaatgttttgaagcattataaatatgctcttaataatgactgtcccccccaaagcagtgcaaggggatgtgggactgtggaagatttttccctttctatatttctgtactgtgttgtttttaaatgatgagcatgcactattttactttgtaaaagcttgagtcattttacaactttgctttattgcactagcccttaatttccattttactcatttttctgtatttgactaatttgcccatcaaaaatccccatatgaattctgtggcagcaaagatgaaaacaaattacttaggcataatcttattttacctctaaggtgcttgtaataatggaaataaaaggtgtgaaacatgttaatactgtatgtttaagattaaaatcttttagacagaaatctttatgattcctttaaataggtcccttctaagtcatgtgaaagtctttgttttgacagataattttctgttcatgtttaaaatctactccatttctaaggtttttttttctctccatctgtggaaaatgagtcactaaaaaagttaacctaacattttcttcttgaacacattgaaagattaataatctttacttttgttaagtaagaaagtcaatctaatttagataacctaggatcatatttctttctatagaattaacagaccaagtgatattctataattatgtctagaatgtcctctatgtttactaatacatgtctatatggttaaaactaaatttccaggaaaaaaatatgtatgttactctagaattttatctgagcccagtggtgattttcttaggatgccatttggaggggggaaaaaagagtttatctttcattatggtatttatgcatcttatagcttttatgcttactttgctctccctgatactgctagtagtaaaaccagattttattaataatagcattaagtgattacaacatgaacagtgttagcagtaatacttagtagtagaaactggtaaacaatgcagagtatataccactaagcactaaatgttttctatctaaatgattttaaaagtgagagagtgaaaagaaagtaacaggttctgagtatctacatgtactagacattctgtctggctcttttaaaaaatctaaggtctctcttttattttattgaaatataattgctttacaatgttgctatttctgctctacaacaacatgaatcagccatacatatattccctcccttttgggcctccctctcagtcccccatgccaccccacccctctaggggatcacagagcatcaagctgagctccctgtgctggcaacttcccactagctatctgttttatgcatggtaatatatacgggcttcccaggtgactcagtgataaagaatctgccttccaatgtaggagacacaggttagatccatgggtcaggaagatcttctggagaaggaaatggcaacccactgcagtagtcttgcttgggaaatcccatggacagggggaagcctggcagactgcagtccatggggttacaaaagtatcagacacaactgaggaaatgaacaactccagcgagtgtatatacgtcagcgcgactctctcaat

SEQ ID NO: 41761 - DNA, 2212 bp, Bovine  19866880621233
  misc_feature (1)..(1): n is a, c, g, or t
naaatggaaattcaggtctgagagtctgcaagcccagttacgagctctgtttttcctttgtggctttcagctttcagtacttaaataagtcagatagaatatacatttcctgtctaaatgcctaatttacagggttgctgtgaagaaaaaaataccctaacaaatgggaaggtgctttgtaagctaaaatacaatatacaaacataataatggttactctcctatatttgcttttcaagaaagtttcactaagtccctcactcatattaggataactactctctatcagggcttaccaggtggccctagaggtaaagaaactgcttgccagtgcaggagatgtaaaagatgggggtcaatccctgggtcaggaagaatctcttggacgagggaatggcaacctgctccagtattcctgcttggagaatcccagggacaaaggagcctggtgggctacagtccatggggtcacaaagagtcggacatgactgaagcgacttagcacacatgcacacagtctctgttcaggtctgggaataagcttttgatgactagcctcttccacatgacacaaggggataatatccccgtgggtgagttctgtggttgcaggtctggattctcgggtcacacttctgagttggggaagaattcgttcctagttctggtgtgctgctcccgttgcctgtgccctgagcatgctgattcagtcgtgtttgctgtagatttctatcctgggaaggacctccgttccctagggcaggcatccatgtactgtgtgtccagctcccggccccatctccttcatctagttatgattaataagaacaaaacgctatttgtaaccatacacatcctttatactgagactgaggaaagtataatttttcagtacatgacatattttcatgcatacacctatctctgtacaatcccaagaactgctgaggatacatttcatagtttctcctttactaacattatagttttctttgctaatgagtgaatagcttaaaagcatgaattcataattacattgttgtttatttcaatctatagcatacacagactataatttgctggaaaaactcttcactgttgcccttgtttattccatgttaaagttaaccatccatgtctataaattaagtttactacaaaaactcacatttaaaaaaaaaattatacaagaaacagctggattatcacaatcagcaaggaaatggactcaacagttggaactagtatgtctgggacactttgtcttcatggtaaacagtcactttatgcaaatcccacttggcttcacttaattaaaaagctgaaaaagaaagaaaattctttgctgaaaaaaaaaacacagtgtgctttttattctatattaacttagtacaggtaaatataaaataaaaatgtaacgtcatacacagttcattaattcacttcattgtaattttatatcagggcaatttctatgaactagatcctgtaatgggatcaggtgagactaggtcaggggtgaaagcagatgctgataagaacttgaagttgtgttggttaagtttggttaacttctgtgagtcattctcaacgttagcaagactcctagttaaattggcatttaaactgacaacacaggggaagaaagggaatgagctgaaacatacacttggattgggtcatttcaatattttagacaatatattttttctggttatttaatcaatatgcatttacttaaatacttttaagaattttataatttcactatattgaagtcaaaaataattataaatcataataaaagtatcatcaggttctgatgaaatgatacaaatagacgtttatacatatagggaaaaaaagcaaaataactctttttgcctttcttgatttccctaggcaacacttttatctatgaaaagaaatgtaagttagtaatatcatggcaatttgaataacatcattaagcttttgttggctatttgtacctttctgctaacgtgcagcaactttgctttttatagtcttggcaacgtaactttaggacaaccagaaatgaaccaattgttaactaatattaaaacattaatattaaaaatattaatggttactatagttgaaaaaccatgtagttggggaaattgttcaaactgataagtttaatacttggacactcaaattacaatatcctaggcatatgttacttcgt

SEQ ID NO: 41762 - DNA, 1526 bp, Bovine  19866880891993
  misc_feature (1)..(1): n is a, c, g, or t
nttagttgaaagggtactaacttcttttatttgcttcaggtatgtatgggttactcctgtacataattgtatagttgatactttgtgactaactcaaacatttgtctgctttctgcttttccattacattgaacagaaggtttgtttgggtttatggagaaacccaaatgaaccttttggccaaccgtgtacttagactgtaaaaggaagcctttaaatatcaattgatgtttatggtagcagaatgaaagctcaattaacatgggtaagactgtgttcctctgcagtaacttaatagccctaaatttgtcaatttctggcatgtttatcaccagaaaagcttaaaagtgtatattactagactcaggaaaatggttttatttgttgggtttatatttggtttcttgtatctcttctttctaatggttcactaaattagatctgaaatatctgggattgctttcttcagtttcttagtaaagagatacataaaatcttggttattgaagaacttttgatacttactcctggtcatttctactgaaatgatctgagttgtttatcaataaaaatgaatgtagtggtaactgttcaagttggaatatattgaaatgtcttcactttctcagttacctgcctagaaagtaaagattaaattgaagtgaaatgaacaaaacttcaaagagagcagagtcagtccacagataggaaggttgtataggaacagcaaagtattatataggaacaggttagtatttcaaataacacagaaatttataaagtagaatacatatacccctataatcttctcctccagaaataaagcactatcaatttgctatatatcctttaagatatttagcatgtgcagtgtgtcagcagtaaagaatctacctgcaatgtaggagacctgggtttgatccctgggtggggaaaaattccctggagaagggagtggcaacccgctccagtattcttgcctgaagaatcccatggacagaggagccaggtggcctacagaccgtggggttgcaaagagtcggacacaactgagagtcatgactaacacctcactttacttcacagtgtataaaataagttaatgagtaagtaggcacacatgtttatttttaaaatatgaaatggttctgtacatagtgttgtgataagtaatccttttggatttacttaaaggtaagttgtgactgtccttttaggtaagtgtctcatcttgttaatgactgtgatagtgtttcatttcatactgttttatgatctaactaataccctttttatggacacacatcttatctccaagtataacatgcatatgtgaaatggaaaaaatgttttgttttcataatatttttaccaaatgaatattaccactaaacatatgggaccttatgtacacactccttccaagttttaatgatcaactttcatcttgggctgctgtctcttatcataataacaaatgtttttgaaagattaattctcctgccacaaggggatggagaaaggtg

SEQ ID NO: 41763 - DNA, 3487 bp, Bovine  19866881287845
  misc_feature (1)..(1): n is a, c, g, or t
ntacacattttaataagatactgaatcttgttggcaaggtgactttgtttccttgttatgctgggaaaacgtgaatggaagaattacagaatgtcattttttatttagcatccttctatagctcttttcttttttcaagagaaaagctagattaaaatacaaaatcagttaaaatgatgcaatttaagcaactctgtttttcctgacttgcttatttatctgaatgtgttcagcaatattttagatggaaaatattatcagaaatagaatatctgcctttagggaaatacattgatctacttagcacgaaaaataaatggtaaattgaatgctcagaaccataatttatctacagtttgcaaaggatcaaaaatcaagacgtgaagttgtacctaatttgttctcaacttgctggctgtggggaactggatgagggacagcatcttgggtattggtggtggtggtgtttagttaagcagggtccaactctcttgaggtcccatggactgtagtccaccaggctcctctgtccatgggatttcccaggcaagaatactggagtaggttgccatttccttcttggtgatcatcccaacccagagattgaacttgtgtctcctgtgttggcaggcagattctttactgctgagccaccagggaagcatcttggatattaaaatgcctcaatggaccaaagtcgctctaaaaaattagctatttaagggcaaaaaggcaagccaaccagtaacaaactctaataaaaactcttgtctttcaacaggaaagaagatgttcaggacaaacagtttcaaatctgttttggaaacacagaatgctatattcctgttttagagattcagaaagtatactcacagattaaaagctataatttatctgtttttgtttttctgtgggacagttttccagatttgctcattatatcctttttggaatatcatctatagttttgtcaaacatgaatgtttcaaaagaacttgcaaactctgtattggactttttggtgactttacgtgcattatgtagaaccagctatatgtgcttaaatcacacacatttatacaaagaatacctgctacacttggaagttctccaaagcttggtttcagctgtttctttaagtcatatcttaaaattgaaaggatttattcatacaaaaggaaaacaccctacttttcaatacagttactgagacctccttactgcttagttagggaagaccttctgcttgggtttgtgattattcgtgaacgtgccttaaggtatattgcttaaattagattttctggtggtttcttgaccatgtaatttagtttgcgtttgaagatttaaaatcaacaaatgattggaagttaaaaaaatagacctcaatattcatactgcacagctatctttaaatacaatagacatgcttatgagttgatatcacccatggaagtgaagcttctccaactgataccagaaagctgttttttattttcttactataaagggtaaggcagtgtaaacacagataataaagcttgattaaaaaaggatgcttaaatatgtatggaatagtcttgcaaaaacaaaatatattaattggtctcaggcatatgccttaatcaaggatattatagatattaataagcatgcacttaaaaaataatactgacaaatctggtattgttaatattaattttgtagaatgctttaattttcattggtaatgctaagtaacagaaaatttgaacagatgcctcattgtattcttactaggagaaaattcaactttcctggagaattagaaaaggagaattattaagtgttttctacactatgagatttcatgaatctggttaagaatctagtaagttcttttcctgcccagagcaaatgtatacttcaaccactaatctctttggatatggtctgattttatctttgttgttcaggctggtgtgttttgctgtggctgttgttaaaacaaatggacatttactcataattaaagacaaaagagtgaaaaaccattctgctgtgattatgttgcagattttttttccgtctacaagtgagactctgcaaatggttctgattgcagcatttgggaaaggactgcactggaattggtccagaaaagagtgcctaaaaagagctgatgggaagagcagcaatataaggagagtctaaaataaataggctttttcagcctgaaataaacaaagctgagaagggatttcattaatggctataaaatcaggacgtgtatagattagagaggacatggcttttgaccaaattcattgacattttaaaagaataattttttgacttattaaaagaagtacttatttatgaaatggctaatattcatattacattaataatcccaggaaattgacttgatagaaacatgtacgcaaaaagaattttggaaagaaaacgtgaatggcacatcgtgagctgattattaggaatttggaatattgtgaattctctctctctctctttttttttggtcacaggtttataaaggactttgcaatagatccgggttcaatccctggattgggaagatcccctagagaagggaacaactccccataggtaatttggcaaacactctcaaaaaaagaaagaaagaaagaaatccgtgattgttaccttttgctgatttccatagtgtaaacacttaccatgattgatttcaagctaccaagaatttagcaaccagtgtcccagatttgtgaatatttaatagttgactcccacagatcatcaaatataccactcacatcatatcatatttacaatctataaacaaagtcactctcagagagaggactattatgtttatactgttagcctgagagaccaatggggaagaaacctacaatactcccataaattaatgtaactggattaaattgataatttaaaaatataatttcacatgtcttctctccagtttatatgcattcttcctttggtttccgtttattcattcatacattcactcggtctcatttctttactacctggcatgtgatgtgagctctaagaaaaggaagacttggctagagaggagactggggtgcagacctccatagtctgatggtacatgtctacttgggtaatgcagagcagtgtgctgggtagatagatgttccatacacggtatctccaggcaagtgaaagaggagggctctgtgggtatgaggaccacagggactctggtgtctcctttcccaaatataattgctcttgagtctctttctttctttaactgcacccagtgtgcatggttcttcctaaataaatggctgtgttgaaagaaactgtatgaaaaaaaataatatcaagacaatggcttgtaattaactgagttaacagcttcatgtaagcaaaatgaacaatttccaggggcttttatgtacttcccccaatgtgcgaaagaattagattatacattcattccagaaag

SEQ ID NO: 41764 - DNA, 1653 bp, Bovine  19866881327581
  misc_feature (1)..(1): n is a, c, g, or t
ngaagcagcaagagtctgggctcactgagatcattcctttcacgtgcatctcagcaattctggaccagtatcgtgttttctcacatcttcagctcccttgggactcatggtagggagtggctggtctaatagctgttgggtggttggtattcttctccttcctgagtgctcttcgggctcaccagctcacattggagggctagagttgctgatgactgtgacatccttgtttattgatatggcaggaaatactccatttctccacaccttaactattttcctggagaaggcagtggcaccccactccagtactcttgcctggaaaatcccatgggtggagaagcctggtaggctgcagtccatggggtcgagaacagtcggacatgactgagcagcttcgctttcacttttcactttcatgcactggagaaggaaatggcaacccactccagtgttcttgcctggagaatcccagggatgggggagccggtggacggcagtctatggggtctcacggagtcagacataactgaagtgacttagcagcagtagcagaactgctttcccagatgttccaagaaattagaaaataacactgaacatttcttctatggcaatactcaaccatcagccaagagattgaagaaatcttatttgaagacctacccctaagagacctctttagtggtccaagcctaaaaatactgtgtaggagttcaccaagaaaatgaacgtgacttgctttagaaattatgtaagaggatgcaaatgtttactagaccaagacatccgagagacagatttttttcagtgactttagcccctttgctaatattgaactgcacttgctaagtgggcagtccatttcactctgaaggaagacagcccaccagaaaaaatccctcctggctattttgtacgcctaatacaatgctctctgttttcttgacatttgcttttgacacctcaaccagtttcttgtcttgtttaggatccctgtggagtcaatctgaaggagagaaggacgcttccagtggttaggtggtggccaataaggatgacctacattcctgtttacgatggttgggcttatcaacctggagcgagtctgcgtaggtcattgcaaagagtgtaagacacaggacttgtctacaagaaaggaattttcaagaggctttgggaatagtttctcctactgaaatgaaggagctctctctgaaggaaagaaaagaaaaagctttagaaataaagcctaaaactccctcctgtgtgtttagattcttaagtctgcaggtaaacaagccagcggggagtgtctacacacgaggtgaggagggaggcaagcaggggaagattactactcattatgccacttgacattaattaaagatcttttaaaataaagaaggtatcagattacttttccactgaagtaatatttacattaattatgccaaatgctgaaactgtttgctatatccaaatcatccacactggtaatcacttcatgtgttttggagaccaacaggctaggtgagtggaggatgctagcctgctttactctgcgcatgtcaaattcaaaagcccttcttgagagagctagtcttttcgtttccacatccgctacggctcctgttcctttctcccctgtgg

SEQ ID NO: 41765 - DNA, 788 bp, Bovine  19866881493981
  misc_feature (1)..(1): n is a, c, g, or t
ncacagggatttggggaaaataatgagattatataactgttttaaaaaaaaaaaaaaaaggagagttgaacctctcaagagaaagacagccagaccacattaaatctgacattccagcaaatggtaggtaggaacctccagacccttctgacatagtactttgccacattcttgactgaaaaaggaggattgtatgttgggagggggtgtttagaagcccttctaaattcctcctacaaacactttttggatagttatttctcactcatagaataaaatcattgaaaacaatgacaggaaactctgctcttgccatttttataaacaaaagaatcttacaagaaatgacaactgatgtgaaaagagctttaggtcatctagtttatccactaacagcatgcaagtctgatgcaattatattctattcttaggttcttttcccaaaatacctgacttttttgtagggataaatatttccaactgatcctgtagactcctgtcctccagcatatttttctactctgttttaaacaatacaaaacattttcccttatctaatgctttcaatgctctttgtgaagagcgtctttctgaggagggcaccgttctgatatttacggaagagtgtttatttacatatgagttggattcccagtcttcagaccaccctaagtctcaatttggaagttaatgctgttctgtatcagatacagtaaaataaacaaacctttttaaaggcttcagttttagacttttccaccttcttagtatcaccatggtagctcagt

SEQ ID NO: 41766 - DNA, 1275 bp, Bovine  19866881557832
  misc_feature (1)..(1): n is a, c, g, or t
ntttctctagtgatatgtatttccacatattagactttgatgctttcgccttgtaagagctgtttcctgatattggatcttaatacacaacaacagaaacaaaatcaatctgaccagaagaagtcgattgctactgctgattcccctttattccagattgagagtgtctgaaaatagaacccacttcccaggcttaagacggaaaacatagttcaaataataccttctcattctcccaagaattaatgcttgctaggttcaactttacccttaagccctagtatttgttaaggaaggtcactatttaccatttagagagatgaatagaattacatcgtcacaaaagatagattgctgttgctcaaatgttccttttgttttataaagagttaggaggggtgtgtaccttcagggagaacaggtccaagctccccggaactgtttggccagtccccttctgcctcccctacctgccttcacagtgatcaggacatgaacagacgatggctgcagggacctttgaaaaccagccaagagtgtgtgggagaaaattctggtttcaaagaacttagtctaaactaactccacaaaatctaaataaatcagacactaaactcgatggtaacttttacattagaatacaaacattctttcattcttgtgagagaggcaaatgcttacctaggaattaaattttaaagctggttaaaagaaaatccagtcttacccaggctgccaattcaagaactggtagtaattttcactgacgtttctactgggtgaaaggtttatttctctcagaagcctgttatttaattagtctgatttctgagagtgccgagaatgctgcaggtactcaggagatgctcagagaccaacatcctcatcattttaaagcaaacaggtaagctggaaagtcagtctcctactaaagagcgtgaggggcttgagagaagttattattggtgtttctacaattttcagccatttggggagacaagatgactctcactggcaggtgttggattattaggaaaattaagcagatggcattggcaaaccatgcctccccttttcctcagctgccaggaatgcctaccctcaggcttagctccacatatgtttgtttaataaagctcctgccattgcaaggaaacagaacctgcatcattcaagctcactcagaactatgaataggtagcatcatccacattgtcccagagtgttaggcaaacacctctctgtttcctatgtcactcgtacccaccaccacag

SEQ ID NO: 41767 - DNA, 806 bp, Bovine  19866881627231
  misc_feature (1)..(1): n is a, c, g, or t
ngaatgacagctcaaggctgcagaatctgtacaattaatgtctttgtgaaaatgttcaagagtacagtttagaaggaaaaggaaaaatttctgcaggtatcttggtactcaatacaaatactgtctatattcacagatttcttgctaaaatggttgccattctcaagacaaggattagcatcaatgctaatagaaaacagtcaaaaatagagttggttctgtaactacataatatggaaatttggagtgaagatggcatacatttcaaatttgagagatatccaagtgtaaatgcctcttatttatgctatatgaaaataccctttcaaggggaattctatgcaactggactgatcagcagtgtatgcatttaaaactgatgcacttataattattataagtgtttcatatacaaaatcaatgtctttgattatggtatcaaattcttaatgatttcaaatctgctttctcatcttgttctgtatacttctaaagatttatttgcttgaagcttggaaaaagaaggcagaaacttttacttaccaggttatactgactagaaatgctgaggcagtgaaaacagcccttaaatatcatgaccagttcgttgtccagtgagcttcatgacagcatagttttgggactatcagggtaagaaaagttcatacaaataaaattaaaaatatattgctatgttttaatattttggaaaacaatgctagttttctgccaaaagttatgtctagcactgtctaaatattctaggtaataagttgaatatttttgggtgtctcattagaataatt

SEQ ID NO: 41768 - DNA, 617 bp, Bovine  19866881855740
  misc_feature (1)..(1): n is a, c, g, or t
ntattaaagccataaatggctcaggttgagatattctccaagggtctttagacaggaatggaccagatctgcttattacttgactttccaaatgtcgccaaaaatatcctttggtaatcaatgcatgactagcattctagaacctattaagaacaaagaatttggaatctgctctgctctaggcttcattcctagtggaaactctgttaattaatttgctaagaaaccttttatataagggacctatttaacatattcatttctccttgaaattcagctcaagtaagaagtttgcccttctagataaaccaaatttctctgattagtcatgaaagtgaaagaaagtgaagtcgctcagtcgtgtccgactctttgcaaccccatggacagtagcctgcaccaagctcctccatccatgggattttctaggcaagagtactggagtgggttgccatttctttttccagggaatcttcctgacccagggatggaacccaggtctcccgcattgtagacagacgctttaccatctgagccaccagggaagtcctttagattagtcatgagttctgtacaattcaacatactttcactagttctttttcttttgatgcaat

SEQ ID NO: 41769 - DNA, 2413 bp, Bovine  19866880379248
  misc_feature (1)..(1): n is a, c, g, or t
nttttcttgtggatattatactaaaaggtaaaatctagcttccttcaatgtactcttgtccttaacatcttacgaggtaaactcacgccttttactgtttgacattttactatcattctgtccacccaggtgaaatgtccatgtccataaactgtgtaccgagaatatgtagatgtatcagttgaatgagcttttctgtgttagtgctggatggttcttcatttcacagtgaatattgaaagaactgtgttctctaaggcatattggttttagtttataatttcgtttttaacactaatgcttaggaaggactatttcccaattttcctcgattatcaatgaagatctttttctttaaattaggaaaggattcagctccttgacaatagactacagatggcatcttcattgttaataggaagtgtggtattcactatagttaacagtttcaaaaattcattcaattattttatgtaaatacatttgcttgaaaatacagctgttaccttgggatctgtgtctcatatggttacacagatgctgagcactcataggcagcaaaagataagtgtgtccttggggtgattgcttagtcctttgtcttattttccatcatagaaggagggagccgctttgcccagactctgcaaagccctctaacaatttgcaaggggagaatctcaatataatttaaaattccagatttcttccataattatagtggctgccttctgtttaattttatgtgaaggtctgtcagctgactaggttttgcagtttcagttgttcacgaaactataattttctctgagagtaggttcacctcctaatcaaatgggtgatatcctctgagtgttggctttaactcctaatacattttgattagcctccatttgacaaggagaaaagtggcccaggagataaactgccctgtcggttcatcggtttcattagtctgtcagcatgtgctgattatcctatcaagtttatcaacagccttgaatatgtttcctaattctcatatttgcatattattggtgccctttagggatcagtgatggattttaatgtctggctagatttagcctgcaagtactcatttttctcatggctcattcatttaccccttgaagatcattagcgccaagcacttgtatgtgtatacgcaagtattttttttcttttatttttagaggttaggagaaataaaggaatatgtgtgaaaaaatacagttatattttaattatattatttgtttaataacgcgattcattgcagctgcttaaagaaaacacacactctggtccttcgcatttccccttcccttgaacattttatgaaaaacatcactccctgctgcatgctagtagctgacttaccctgaacatcaaaatgagcctagtttttgaatttgtatattaatagaaaataacaagattgattagcttgctatcccaacttaaaatgttccatgttttatcataagacttttaatttttattgtggtagtttataagtaaaattaaaaatctacttgcatagacattttcattattctctttgatttcatagcatcaagatgattaagtcacaataattgaggattgtgtcccatctaaaattgagtaaatttataagcatgtaaaaatcatgttttaaaagatactgtacatcatttttataaacaaaaattaaacttttacttagacagcagttataattagtaagtatgaaaatacatgaattataaagaggccaaatcataaaaaattgctcctagccagttgtgcaacttcatttctgtatttcttcttcagaggataagggttggattcagagaccccaaggttcaacttacggctttagcactttgtagctgagtgaagttggacattacttaactgaagtctcagtttccccatccataaggtgcctgtaatggtagtgtctgtttgaggactgattgagataatgaaggtaaagaatattggaccaaatgcccaacttagtcagtggtttgtaatattatcttcctttgtaatcattatcatttctgtgggctttaatctccagaagtcactaattgtattctctggcggttctttctgtgttaacaatgtaaatctgatttctatatagatacaattttgagatagtgatggctctggagtcaccaacatggattctatttagttctgtcctatctataagtgctgtattttctctggaagtccatttttccttgtctttcaacaaccacagtcaaaatcctactgaaacagcctacttagtgtccaattagtttaattccattaatacactattccctctaaattgaaatcatcatatttagagttttttctccttttcccgtcattacatattttccccctagacttagtcaaaattatt

SEQ ID NO: 41770 - DNA, 736 bp, Bovine  19866880452511
  misc_feature (1)..(1): n is a, c, g, or t
naaaaattgaagaataaacttaaggattccctattagtcaatgatccatcatagttgatttttcttctattaccaagatataattagcccattttctcaagttcttatttccctggagaattagcatacacaacttgtaaatatttccctttgtaatgcattattcaggtatcatgttcataatgattatggttcattcaaatcttgatttaagaacacaataggtaggctggaaatgacttgagatggaaatatggggctgcccaaaagagaaagaaggatccttgcaaaagcaagaatccaagccaaaaaaaaaagaacccaagctgtaacagctggaacaaaagaggagcagctaaaagggagactataacgtattgaatactttgaacttcgtgggagagaacagggcacccatgttggaagtcacgctccccttgacgatagctcaaagtgatcaatgtgattagagcacagccaataagatgttaggttcagacgtgaacccctgccagaggggaactatgtctcaattgatcacacagcatcaagccaaaccctgaaatctgaaatgtgaattgggagggtaacttcaatataaacattgattttatagatatgatttcaacagtacacattttcctgttacttctataaagtatttcgccgatatcaaaatacctcccagccttacataatgtaagcactgcttggacacgttcacaaatcaccagat

SEQ ID NO: 41771 - DNA, 4192 bp, Bovine  19866880484397
  misc_feature (1)..(1): n is a, c, g, or t
ncaggcagatttgagcattttttccgggtatttttactttacattaaaaactggaagatatttatattcaatgattataaaaacagttgtttttattatgattgtggcatgcattgctctttgaaaaattagctaataagatgaaataatctcttaatattcaaattttaactacttaacattcacacaagcaatcatacttcagggttagcataccactatttctgttacactgatcctctgaacagtcaccaaaatcaacaagggctctcactttttacttctacctttagttgtaatttaccttagaactttaatacatgtctttagtcttatcaacaccaagttctatgtaaagatcttgcaaaaccaaaacattgaaaaatgctttaactatcatgataaattctaaattttgcttcctccaattctcagtaacttgtttgaaatcagaatgctatcacaaaaaggggttacatgttgaaatcttgccagttatataagccagatcggctgcaaaagaaaataaatacaggagtccctagtgtagctgataattgttttccttcagattacagccctatttttaggcttctatatatatgaactctttcagtcctcctaacaaagattatcatcccgttagtacttgacaaggaaactgtgccttagagaaagggatacttaaaagctaacagagataaaaattgtgtctgttggttctgaagtccttgttttaaccactatgaaacacctggacttcagatatgttccaaaaacagtgttcacatagatgtaagttaaataagtgtcattttaaaatatgaggaactgttatgttaaaatttctaatctcaatgaagaccgtaaaaaagaagcaagcaagcagaaggagaaggaaaaaagggccatgtaagtgcatgaaacttaagataaatgtgaatgtgttttgttttgttaatgctttctcgctctatccattaacaaacattgtaaggggttcaactcttgtagcctgggtttatactgatttcatgtcacttcacatgatccagggaaatcacagcacttataagcctacaaggatttatatttcctaaggtaattataccttggattattacagaaagaaacataatgttgagtgggtaaaaaaggtctggttaaaatgttaagtggaaaaaatagaaataatttaaagattatgattcatatgataccagaatacatatactacatacttttatgtaattctaattatagcaactttataatatgcaattatctctcttattcctctatctttggttacttcagatacacctgaaaatcagtatatttctaataagggaaaaagtattaaaaatgaaaaaataaaatttagtactccaatgatttgtttacattgtcttcatagcactgttaattagtataacatatatgtgcatattgtaatatccatatatacagttcagggcaggttttttggttttaacaaatctaggattattccttcgcattttaccatgtgcagtctctattctgactttgactacaagccacccccacatccacagttcagtgtctgctataagaactctcaaggatcacagctgtgtgctggcaaaagggcttgcataactcaatgaagctaagagccatgctgtgcagagccccccaaaactgatgggtcgcagtgaaaagttctgaaaaaacatggtccactgagggaggaaatgggaacccctctagtattcttgccttgggaccccgtaaacagtgaggaaaggcaaaaagatacaacactggaagataagccccttcccagatcagaatttgagcaaactccaggagacagtgaaggacagagaagcctggcatgctacagtctgtggggttccaaaaagttggacaggactgagctattgaacaacaggtcagaaggtgttctatatgctactggggaagagctggaacaatgacaaatagctccaggaagaacaaagcagtggagtcaaagcagaaataatgctcagttgtgggtgtgtctggtggtgaaagtaaagtccagtgctgtaaagaataatattgcatagaaacctggaatgttaggtccatgaatcaaggtaaattggatatggtcaagcaggagatggcaagagtgaatatcaacatgttaggaatcagtgaactacaatggacaggaatgggtgaattaaatggacaggaatgggtgaatttaatttagctgactattatatttactacggtggataagactccctcagaataaatggagtagctcttacactctacaaaagggtccagaatgcagtactggggtgcagcctcaaaaacaacagaatgatcctgattcgtttccaaggcaaaccattcaacctcagtaatctgagtctatgccccagccactgatgctgaggaaggtgaaattgaccagttctacgaagacacataacatctttttagaattaacaccaaatagagatgtccttttcatcataggggcttgggatgcaaaagtaggaagtctagagatacccagaatggcaggcaagtttgaccctggagcacaaaatgaagcagagcaaaggctaatagagttttatcaagagaatgtgttggtcaaagcaaacaaccttttccaagaacccaagagacaactatacaaaaggacatcaccagattgtcaatacagaaatcagattattttttgcagccgaagatagagaagctctatacagtcagcaaaaacaaatcctggaggtgactgtggctcagatcatgagttccttactgcaaaattcaggctaaaattgaagaaagtaggaaaaaccactaccctcgtggatcagctggtaaagaatccaccttcaatgtgggagacctgggtttgatccctggcttgggacgatccccctggagaaaggaatggctaccccacaccagtattctggcctggagaattccatgaactatatagtccaggagatcacaaagagttggacacaactgagtgactttcacttctttcaggaaaaaccactaggccactgaagtatgatctaaatcaaatcccttgtgatcatacagtagagatgacaaatagattcaagggattagatctggtagatcgagtgactgaagaactatggacagaggtttgtaactacaggaggcagtgatcaaaaccatccccaagaaaataaatgcaagaagacaaagtggttgtttgaggaggctttatgaatagctgaggaaggaagagaaggaacaaagggaaagacatacccaactgaatgcagagttccaagaatagcaagaaaagataagaaggccttcttaaatgaacaatgcaaagaaatagaggaaaacaatagaatatgaaagactagcgatctctcaaataaaactggagtgatcaagagaacattttatacaaggatgggcatgataaaagaaacaataagaaacaaagagaagcagaagagattaagaagaagcggcaaggaaaaacagaagaactatataaaaaaggtcctaaagacccagataataatgatggtgtgatcactcacctcgagtcagacatcccggagtgtgaagtcaagtgggccttaggaagcattattatgaacaaagctagtggagaagatggaattccagctgagctatttgaaatcctaacagatgatgctgttaaagtgctgcactcactgtctagaaatttggaaaactcagtagtggccacaggactggaaaaggtccattttcactccaataccaaaggacaataccaaagaatattcaaactaccatccatacaactgtgctcatttcatgtgctagcaaggttatgctcaaaattcttcaaactggtttagctgtacatgaaccaagaacttctagatgtacaagctgggttttgaagaagcagaggaaccagagatcagattcactggatcatggataaagcaagggaattccagaaaaacagctacctctgctttattgactatgctaaagcctttgactgtttggatcacaacaaattgtggaaaatttttaaagagatgggaataccagaccaccttacctgtctcctgagatacctctatgtggttcaagaagcaatagttagaaccagacatggaataactgactggttccaagt

SEQ ID NO: 41772 - DNA, 1011 bp, Bovine  19866880514974
  misc_feature (1)..(1): n is a, c, g, or t
nagcctcttgatgaaagtgaaagaggagagtgaaaaagttagcttaaagctcaacattcagaaaacgaagatcatggcatctggtcccatcacttcatggcaaatagatgggtaaacaatggaaacagtgacagacttcattaatttgggctccaaaatcactgcagatggtgactgcaaccatgaaattaaaagatgcttactccttggaagaaaagttatgaccaatttagacagtatattcaaaagcagagacattactttgccaacaaaggtccatcttgtcaaagctatgatttttccagtagtcatgtatgtacatgtgagttggactataaagaaagctgagggccaaataattgatgcttttgaactgtggtgttggagaagactcctgagagttccttggactgcaagatatccaaccagtccatcctaaaggaaatcagtcctgaatattcattggaaggactgatgttgaagttgaaactccaatactttggccacctgatacaaagaactgaaaagaccctgatactgggaaagattgaaggtgggaagagaagggaacgacagaggatgagatagttggatggcatcatcaacccaatgaacatgagtttgagtaaactctgggagttggtgatggacagggaggcccagcatgctgcagtccatggggtcgcaaagagtcagatacgactctgcaactgaactgaactgactgaagagtaacaattttttatttctataattctatctctacccactctagataaattgataccttctgtgataaattgataccttctcacaagggcttgtaaatgtagagcttcagactaagacatgtcattctgccattctggtcacttctctgattctctcaatgatgtctcctgtccctcagaagccctagtgtttgattctatctgaggagtttgtaatttcttcaattctgtctcctcacaacaaaaacatgaagcgagggaccagtgttacagcccttgg

SEQ ID NO: 41773 - DNA, 2526 bp, Bovine  19866880526502
  misc_feature (1)..(1): n is a, c, g, or t
natttaattgttattctgcctttcaaataacataaaactgtggcagtttgtgacctttgagtagctttccttgtgaattaaggtcatttcttagtaagtggataccttttgggtgtagttaaatgccagtatgaagggcccttgagatataataagagttgttcttgattctttgcttcctgatttcgttcaaaagaaaaattttgttttccttttgaaaataaaataacttcaccagatgagattccctgaaacttaccgtgataccttgaagcttcagttcacctttccttaatataatcatatatgcttagtcctaataaataaaggcttctctggtagctcagctggtaaagaatttgcctgttatgcaggagagcctggttcaattcctgggtcaggaagatacgccttttccagcctatccctggaaaagggataggctaccccactccagtattcttgaatttccctggtggcttaagaatctgcctgcaatgcaggagacctggatttgatccctgtattgggaagatcccttggagaagggaacggctacccagtccagtattctggcctggagaatgccatggactgtagaagtccatggggtcgcaaagagtcagacatgactgagcgactttcacttttcactttcctaagaaataagtcatgtgcttgttaaacaatgctttttaaatctccatcatatataaggcacctttagggtacttaggagtccttgataaatgtacttaatctccagtatctttgagcaacgaacatttatttacatagatataactatgttctctttccattgcattttctagaaaatgtaacatttaaaatgtgacattctgtggtgtggaaaatacattacgaaagatgggtaccatgtagctaaagtttgttggtaccatgggtactaaagtttgttgtttctggagtattttatcccagttctgagggaatgactcatttggataattaatcttggctccattttatactttagtccctcaattaaatatgtgtaaatattgagtactatgatatgtgatttgactttgtagttagactcagtattgagatggtgagattttgacatctggaaacagatctggttttctcttgtcattaactttgcaatttaaggagttaactttagtttatacatcaatgaaatggatatagtgatggacctcaaagtttattattatattatataaattctggacactgtcaagcatatagtaaactttaaataaatgaaagcactattatttttatcccagcatacatatatttttatttcttttccacctctccttctccctttacattttcctcctctttttctccacctaggtttgcagttgttcaagctaagcccatgagatgagcagtagtccctcaacaagaacagcttcttccaatattcattttgtcaaacaacaggaataaaattagtactctaaatatcttgaaacgctgttgggaaaaactttcaaaaattacatgaagtttttagaataaactaaatacagttttttaaaatttcaaataagtactttatcatctccagtgttttaatgtgagaattgaattcatctggacactgtctattaaaatacagactttaaaaaactggatactttttttttttagactttaatcacaatttcttgtaagaattccagggattttattccaataaaactgaatggttttaaagattagtgcatgaaatgaatgaatcaataacatatatgagcttaaaaatgtaaaatgacattaaatattcataaaaatgcaagatctttaagttctgttggtccaaagtaaactttaccatgtgcaaatttgaaggtaacctcaaacatccattttgaattgtcttaacatcaacacaagaaaaggtttagtgaatgttaaaaccctttattccttaagtaggatataggataattccatctctattttaaaagaatgtgtggcatgaccttaattttccatttcccctttctttttatcctcacctcccttctgtcccccttttcttctcccagctgcagaagttagatcaattatattccttagttcctggccagttttcaggatgatccctacaaatgtcctcttttattcatatattattcccttttacctctgttcctagcttaaatgtccctttgcatcataggcaactatcctaatgtaattgatttctgtccttagatttataatgtatccttgtaaagtatataatggtacttcgggtaggaatgagtttttaatatttttaagtaatgtgacagaatgcattaggtattttgaatatttttcggctttttcaaggtctattcctgttaaaatatttacacggaacttgttgattctcactgctgtatagtaatccataaagtttctcatgatatttccatgatggataagttgattattttctactatcagccaacactaagagacttgtattaaacatcctcttaaatgtctcccctg

SEQ ID NO: 41774 - DNA, 3369 bp, Bovine  19866880530149
  misc_feature (1)..(1): n is a, c, g, or t
naaaaaaacttatcataccatgcaccctttaccctattatcaatgatcaatgaatttaacattcagttttatccaccccacctcccacctgggtcacaccttttaagaactctctaatgcactccagaaatctggctttctatagcttatatttcacttgagaaatataagaaatcctaaattagcatttccatcgttgcaggcctttaagacaggaatctgacttctagggtttcaatgacaatgggtttcaaaatgtgcaaagcacgtcattttccgtgaaattgacagaacccagttgaatatgagtaacctgacaatcacgagatccccgtcagtcaatctgattcctctgaggcagcaggttatcaaaaagtgaaccgagtgatgtaatacgcatcccagacagtgttatgagaacagcagagatgatttcaatgagactcattatttattcatcacaaggtccaatttgcgtgttattttcactgacggtgtacgcagttaactggttgaaattcagtgctgatagagtgttttattccatactgtaaaaaggacccttttaattttttttttctgttttcctgtataagagtacaaaacagagagattttgtgtttgtggccattcatggtgatatctgaacaccatttagcaaagccggaagagcagacattggagaaagcccttaaggactccctgtttttttcattaggagtgtataataacatgtcaaatattacagagtaaaaagtaaaacaagattattattcagaaaataactacttttcctttaaatgctatagaacgagataaacactgataggaaacacagaatgagatataacctccacttctgagtcggatccttagtctcatcacccaagggaccttctctaaggttcagggaaagaacaggaaagaaagctctcccaacaggcaagaaagagctggcctgtacattcttggactcttcacatggaccagtccaagggctagcacatttgaaaaccatgcatcatctctcatcaatgttggggtcacatcatatcttaaaaggccctgacatcattagacacagtagctatctcagttcgcctttcctaattcattttactaagttcatgtgctttatgtatccgctgaaaggagtgctcagtgctcctcagtaacttcctctgagtttccctcaagaaaatgctcacccaccagtttccacgtttccccacctctctaattataaatacctacatccaaacaatccttcagggccctgctgacgtaccctgccccagaaggtgcttcccatcccctcagctgaaagtcacctccccgtcctctcagctgccctccggctccaagtgcctgacagccctcaccactcttcagcttgaattacatgtactattctcaacttcctactactctcaaatgtccttaagatcataattttattgattcatcttagattcctcacatcacctaccacagtgccttgcacaaagatgaaccttttaaaaaataatcataatttgtgataagatcgctgtcccaggtattaacactctaacgctagcatcacagaaacttgcaagaatagtcagtttcccaattttaaatgacttgacttgaatctaaacagcaagcagaatacagaatcatctcaaatcagctgagtgaagaaggcaacctgcaggaataaaataccctattaatctttgacttttagaattgaaaaatatttctgaaccttgactttatttgtagtattatctggttagcggtcttggcagctgttcaaagttttaaagtactacaggtcatgaatattaaacgctacaagtttactgggaggaaatccaaattcatttgtaagtgcatgacaaatagtcaccccctccagtttcaataatgcaaggaaatactgtgatcagaaccagagttccttgctatatctagattctcacaaagtcaagtgtaagacaaatgaagggaaagacaattttcagaaagcaagaacactccttgaagcagagtggcacagatggtgcttaaagacaatcagaatcagcaaatatatcctatttcattcaaggcaatggatatgagggtcacatcttgagtaaaaccacaatctggtctagaaagaaaagggacgaagccataaataataacagattctgctaatgccatccaagcagctaatcaagttaaaaaagcacatgtggatccaatgtgcaaatacctgcaggctatacactggtttttctgtacgtggggagccacacaacatagtctgatgtacaaaagcaccacatttaacgtcttcactgttcagacagtgatgagcccaaaaccttcaacagaatataagccccagccctgggaaaccattttcaaaatatgcccagtaaatggtttggaactatgcaactatttgctagtgtgggtcagatggctgcatcccattatagagccaagcatacttaatacccaagataaaggtaaacttgctcaccacaggcaatttccctccatcacatctggctttgcattaaaataaagttttgctagacagagacaacttgtttttcaaaagtggcaatgactccctatccctctctagtaatattgtgtctttatcttgtttacatgaaatagagccacgagatttcatttgaaaaaaaggtggctatccagataatacatcttggaaacaactacggtaaaataaatactgtcatctgtagagaaagtcttaaaataccaaacccaaagggcttcattttccaaattattttgggctataattacaattgttacactcgctttcaggtttcctttcctttttaatttttttccacctgtaactgaataagtgattatgaggctaataaagggggaaaaaaagatatttccacattaaaacagttaacagatgttaaataagcacagaaaatggccactaggcaagcaatgactgatgttgggtaagtaagaaaaatgttgcctttactgattttattacccatgtacctcctgggatcataggagacttataaagtattttgtgggcagataaaagtctagcatttatttgcaaggctagtttaagtgtctttcaagggttccccatcccccttacattttgacaacataaagccaagtaagtgaaaaccatctaagaaaggctaaaataggcatttgttgagaggtcaagaaaacttatttttcaacatttttctgacatgcatctcttccagtcccaccttccagacctccctaatcaggaatgaaatcctcattgtagaaaggagaaggtataagatttcactttagcactgcaggcacatctgtttcaaaagt

SEQ ID NO: 41775 - DNA, 2437 bp, Bovine  19866880678622
  misc_feature (1)..(1): n is a, c, g, or t
natgaacatttattgtacaccaagtactaggctaggctttaaataaagacagtaaagatgctctcgtacccttgtttccacagtctaacagatgaaatggaggtgtagatacataattacaaggtgttagagttaattttatgtgttgatttggctgggtcacagtgcctggatagttggtcaaacatgactctggatgtttctggaaaggtgtgtttttgtgggcgagattcacatttaaatttatggactttgaatggcacagattgccgtccacgatgtgggttgttgtttagtcacctaatcatgtctgactctttggcaactccaactccatggactgtagcccaccaggctcctccgtccatgggattttccaggcaagaatagtggagagggtcaccatttccttctccagggcatcttcccaccccagggatcaagcccacatctcctgtatcagcaggctcattctttaccaccgagcccccagaaaagcccccataatgtaggtgggtctcatctgtgtagtggacagtcaacagaagaatgagctcctgagcaagaaggaattcagccagtggacagccttcagcacttgctcctctcccagtcccctgcctgctggctcaccttgtagattttagacttgcagccttcatgagttgtgtaaaccggttgttcaaagtaaatctctcgctccacacacagatacacatactttctattggttctctttatctgacagtccctaactgatacaccagataatctttgtaagcagagtgttctttagtccttcagtcacctgctctcccctctatggacttcacctattcagagtgtgtctactgtggggtgctggcacacaggcaaagagctagaaatgtccgtttaattgaactgctttcaagcggctagccagaaggagcccatgtggcctggttttcatactatatggtctgattttatggtcaggaatttacaactttataaaaagtagagtacagagatgatcaaactattcctctttctgctccaattgttctggatggagggcagaggattctctgtgtgaggggatgaagagaattgtgcacgtggacacggtcagcaccactgggagggggcatgaatgttgtatagggcagggctgggccaggggtgcacactaggttctgtgtaatattatttctgaaagtattaggaggctgtgtatctccagagcaccttatttggtaactcactgatttatagtcttttctcattagcctcctaaccttgcctgaggggatcagtgataagcattattaacaccttagtggcatctgggaacactaaaatgcaaggaagagggtgacttgccatatatcacactgcagacctgggaagggatgctgctgcagagaactgtcttctcctgtgtttattctttgaagacactgctggggtctgaaaggtttttcttttgttctgtgggaaatctcattgttgtcatttgtggtatgtaagtagagggcagaaatcttcttaatgagtgtataaatggatgttctatttttcattcctgtaatggcaagtcaaccagtggagaactcttgacttgaaataaaattaaaaagggagtttgacagctcctattattgtcttatttattgttctacttagatcatcacatgcagtactgcaggttccaaggaagctgaagaaattttaagcctcagctacagatgtttattggagacaagatgcaaaaacaaaaacagaaaacacacatttgattcctttaaatgaagtgtatcatgaagtatataattgctcttcaaaatgttctctgttgcctcaccaaaagcatgagaaacatactcccttttagtattttagctttttatcacctaatcaggagggtcaccttcaaaaaaacttgaaaatgttcttttcctttttctcttttatccctgaactccagctcttgagaccatcctaccaaaccatcattaagcttatgaggaaactgattcagggagatggagtgacttgttatttatcatttttattttatgtacatgtgtatttatgactaagataaggctgttttccagcacgaagaaaagattccaaatgcaaaagcataattgtgttagccacgctttctacaactttcactcaaactttgcctgctacaaatctgctaaagtaaataaaaattaaattggtagagactagttttggacttgactactgttctgactgaactgatggtgcagttgaatcaaagccagtggtcggaatgggcattagggaatacaaagcctggagtgtgtttttcctttagtacggttctttcagtattgagggagtaaaaatggctccatagcttccatctgtcttttcaaactatgtctaggagtaagaacaaggatttgggtcaaagaaa

SEQ ID NO: 41776 - DNA, 931 bp, Bovine  19866880699152
  misc_feature (1)..(1): n is a, c, g, or t
natgatagatgtctaaggcttgtaatttttaaaaaaacctacctaatcgtactactactacttttctgtgggtgcacactactgggtgtaaactgcacaaaaatacaagcgtactcttactgtaaaaatgactggttacactctgaggagtgggattgacaatgatgtgagaggaattttaggtttttttgtaatgtttttaatgagaattttattcatgtataactgaaagaataatgatatggaaggaaaactggccactggaacagtaaaaaaaaaaaaaatgttaatctagtatggcccttataaaagaggggaaaaaaacctgattttaaatatcccaggcaattgttagaatctctgttatcactttgtattgagtgttgttttaaaaaatgccatgtggaaggacaattgtgaaatcagaatcaaagaaatgaaagcaaatttcaagtaacagaaagggttggaaggaaaggagtgataagttattggcaaatgcaaatgttaatttctaaattcttactgtacagagtaattggctagttcagttgttatcaaggggtttggaaagagaaataatattttagagtattcatgctacatcacaaaactacagatgcccttttttggtatgtataaatgaaaaatcgcaccaaaatttaattatgaaatgaaaaagagctatttgttccattttctgccagttttgacctgccatgactcatggaactatttcaacctttgaggatatattaactgcaatggcttaaaaacatagaacattattctttaaacataacctaggatagtagtagtataatcaacgctactagataagaaaacacatatagtaaaatctagtttcctagaaaagagtcaagcctttattacatgatgtatatgacaaagtaaaataccatagtccccc

SEQ ID NO: 41777 - DNA, 1177 bp, Bovine  19866880719870
  misc_feature (1)..(1): n is a, c, g, or t
nttttatggctgaaaagggatgcagacagcacaatttctgccgaatatgttttctattatattttgtaatatgaaattataggttagtttttggtttgcataaagctgcctttttcacccgtcactgggagacaagtaacaccttcctttgactcacgttttccaagagtccttagtgttaaaagaagactttctttctggaatgtagaaattaaaagaatatggcacaaaggcatttttatagccttattgagtcttgagggcagatatatggattccagacaaaatgcaataatagactaggattttactttcagatcgtcttaacaaacacttcttgtgggagatttattgtccatgtggaggaacagagctgctttgaaggttaaatggagtagtttagagaacagtgttcaaggtctttctctgcctcttattaagtatatgctctgctttaactaacttaacccatccggcttagttttctgttttatagcagtattgtgagaataaaaggagataatgtgtgtgtgctttgtaagctttgtgatctcagtgtaaatatgaagtagcacttgttttattatgtgtgtttagttagagttaatgcttcgttggcatgaacaggacatttccccctctctgataaagcatgtagacaaatcctggcagaactaagactaagatacctctgaaagtcctatttaagcttataaagcagttcaacccctgtcatcaaaaacagagcaccagacatagtgttggacagatacagcttttgtgtgaagtctagttgctctgaaactctgaaggataaacaggagagtgtatgtaattatgtatgaccgtctctatgtcatagtagggtgtatgtggacagcaataccaaaatcccacagaatacattgcttaaacaacagaaatttattttctcacagttctggaggtttgaagccagagaacaaggtgtaggaaggtttggtttcccctgaggcctcttcttggcttgcagatgtccaccttcttgttgatctgcacatgtttaattttttttttttttctgtgatcatgtgcctctcctgattctctgtgtgtccaaattttgttgatgacaccagttattagattgcattagggcccagcctaatggcctcattttaacttcgttacctcttta

SEQ ID NO: 41778 - DNA, 959 bp, Bovine  19866880733993
  misc_feature (1)..(1): n is a, c, g, or t
natttgaaatagcttaactggaattccatcacctccactagctttggtcatagtgattcttcctagggcccacttgatttcacattctaggatgtctggctctacgtgagtgatcacaccattgtgattatctgggttgtgaagatcttttttgtacagttcttctgtgtattcttgccacttcttcttaatatcttctgcttctgttaggtccataccatttctgtcctttatcaagcccgtctttgcatgaaagttcccttggtatctctaattttcttgaagagatctctagtcttttccattctattgtttttctctatttctttgcattgatcgctgaggaaagctttcttatctcttcttgctattctttggaactctgcattcaaatgggtatatctttccttttctcctttgtttttcacttcctgtcttctcacaactattagtaaggcggcctcagacagctgtgtcgcttttttgcatttctttttctttgggatgatcttgattcctgtctcctgtacaatgtcaggaacctccatccatagttcatcaggcactctgtctatcagaactagtcccttaaattgtggatagtattatatttggagggagagggtcacacacacacacacacacatacagagtctcattttctcttttttgggaaattctgagcattttatggggttgtctcccacatttgttgattgattgtttttagtgatttatttccttgaaagcataaaggaaattgataaacctagagaatttcaggatacccagttgcaaaaagagctatattgacataggcttctggctgtttttcaagttaaattttgatggcacatcaaatgttttttcagtatttaacactaggtattaggaaccttttaaactttcactgaagtttaacctctttcctcaagattagcgtttcaatttaataaaca

SEQ ID NO: 41779 - DNA, 1966 bp, Bovine  19866880768520
  misc_feature (1)..(1): n is a, c, g, or t
ngccaatgtctatttgagtggatttcctgaatttaaaataaaccacattcaaatctttctcacaatctttgaatagaattatcattttttatactataatttgcacaagtcaggctacttaaatggtagacatacctatacgttttctttatttccatcgcttctagtaacaacagttgtttgcagcctctgagataagtgaccagaaaacacaatacaatttacaatgttataagtaaatatctttaaatcttttgatacacatataatgaaatatgggtataaggaaattatctccttattagttctgttgcttgcttactttctattcatctctttcttttttctaagaccaatacagatagaagtcagcagcaactgatgtgattttcttgggaaaacatgcttaaaatataaataatctcctgtaagtgaaggtaaagtgataatatttcacaaatgaaatcactctttagcttccatttactcaagattaagacagagaataccattccagttttcaataaaattatagctataaagtgcttctttgacctctttcaccaatttcagtcgattctggtaaattctttctgaacacacaaatagcttgcagacatatacaaaagattttttccaaatgcagtaggtaagcagcatacaaagcatttactctattttgatatagcatcccagtgatgctcaaaggaaaaacatttgggctaagttctggtttgtgtttaggtttttattcagatttagagaaaacttttaaagtaaataatgttcttttcataacttaggttttacagaaaatttttaagcttctttgttaaccagttttcacaaataatgatgacacaaaacgaaagtcaaaatttcaactctagattattcttagcatttataacaattttaactttaaaatatcatctatggtctaccttaaatcttaaagttgagtatatgaataaagtgtccaatttaacattaaatttgctaattatttcaggctttagttagaaaaataaacccaaccctgtccaaaaataataaatcctcagaattcaaattccgagtacacaaagataaacatctgagtacttatgataactgcctttaaaaaaaaaaaaaacacaccccccaaattcagcatgcaatcaaaatctgtcatagaatttaagataccaaagaaccactttccaacaaatggagttgaattcagaggattccattctaacaacctgtcttgatttaacctcaagaagctgacaatcatttgctgctctggttctaatctacagaggtactcaatcaaaatgacccgttttccattgcagtgcctctgtctcccatcctgatttctccataatgatccctcctctaaatcataagaggaaagcattgtatcataaacaagaaaggggcagaatcctcttcaagtcaactcctcccaatttcaccaaaattcatttataggaatatcaaacctaagcttctccttcatagtaagataaccccttcttcccatccaatccctcaccctggagaaatccagctattggacttttctttagtcttagaaatcaactgctgaaggcatgtttaataaggccctgaattattggtttcttgtactcatttaaattactcccagagagttgagagccttcgtgcagaaaccatttgtcgtttccctttaataaattaaaacagtatgacaaaaatggttttaacccgtcagtaacagaatctggtttattaaaatactgggtgaattttcacctgaatattctaaaaatgttccaaggaacagatgtgcattagagaaaactaggctgctatccaacaagaaccaaaagtgctctcctttttaagagtttgccacttgctgttagaatttagttatcaataggaacagagtaaacattccaacgagaagaaggcaacacataagaaagaaaat

SEQ ID NO: 41780 - DNA, 1853 bp, Bovine  19866880769201
  misc_feature (1)..(1): n is a, c, g, or t
nttgctttgaggcgtagcatttccttggtgttaaccagcaaagccccgaacagcctctgggaactacacagaatatggaacactttatgaatgtatgtcactcttgtgtgagggccatgataatcctctctgcatcatctcaattttagtgtatgtgctgctgaagcaagccctggaatttctcttaactagaacagaacaccatggaggattttagatagaagcacaacatgatctcacatatttttaaaaaaaaaaaaaaaacaaaaaactgagatcttgaccggaaaactgactgcatcaggcatagaaaaaagggggaccacttagaaggttgttaatactccatggcaaagactagggtaaaagcagtggagccagtgagatgtggttagatgtggagtatcttgtagatatatgactgataagattggatataggtataacataaaaacaggagtcaaagatgactccatagctttggcttgtggcacctaggtgaatgcaggtatcatttatacacatgaaaaagatttcttgagagcaagtgttggtaggaaggtacatgtgtcatggagcaaccaattcctatttttgagatgctacagcaggagagtgtggaggactaattcagaaagcctgaccagaaaggaagtcacagatcaagccttggcaaaaacaccagctatctggtagcttccctgagaagaagttaaaagaaaacttgcaagaatgccaagaggaaagcaaaaacagaaaaaaggggaaaaaaacaaaatcaaacaaaaacaaaacaagccttctatttaaagcatggtttcagtaaaagagaagaaaaatatattaaattactgtttaaaataagtagcttgactttcacaaatattttaaatattttattagtaaaaatatatatgttgctttctatacatctttgacatttatgagtaaaaaaaagttaagattttagcatattaatacaaatagccaatttccaaaatattacataatgaaagatgtttagctttattcagatatcctgttatataacaaatttttacttcctttctacctctgttcacttgcatattttcccttcaagcttaaagaggtcatccacacgtactacaataacatttcaatacgagataattaatttgatagaatacaaccacatcttaagctctatctggggaaattgctttggctgttacattgcattgctaccctaaactcagttaagttaaaactcttctccatctataatataaatttatgagaatatttcattattaaaatgtctgaggatgctgtggtgaagtagaaattttctttaaacacatttataactaaattgcagatatatatatcctaaaattttactttagaattatgaaatcatttttaaatatcaaaatcagctatctttagacttcagaatagtacacagaatttctctttgactcataaattaaatagaaaaatatgtgtttgtagttaaaacaatgaactttcagcaatccattaagtttattcattgatttccttaatccaactactatttactgggagtcagacatgcctgaagcaacttagcagcagtagcagaagcagagttaagcactgggatgagaatggtgaattaggaacaacctttgccttcaagcctttaagccacttaaaattggcttccctggtggctcagacggtaaagcctcaaatgccggagacccgggttcaattcctggttcgggaagatctcctggagaaggaaatgacaatctactccagcactcttgccggaaaatcccatggagggaggagccgataggccacagtccatggggtcacaa

SEQ ID NO: 41781 - DNA, 1001 bp, Bovine  19866880876120
  misc_feature (1)..(1): n is a, c, g, or t
nctgatgtgaagaactgactcattggaaaagaccctgatgctgggaaagactgaaggcaggagaagaaggggatgacagaggatgagatggttggatggcatcgccgactcaatgggcatgagtttgagtaagctctaggaattggtgatggacagggaggcctggcatgctgcagtccacggggttgcaaagagtcagacacgactgagcgactgaattgaactgagcttcactgaagtatctgtaggagatagcccagagttcttgtgcaaagtggaattcattacataattcagcccatcatgtgcttagggaagttttgagtacattcttttacatgatgctaggggtataaagatgaggttggtgtagcatagttcctatcatcaaggaacgaaaaaatgaggtggctatcattgcccctctggtagtacgccattgatgccactgcttaagccaagcttctaagaatgtaggcacttggtcaatagttgtccagtaggtgactattatgcagaagctatggtagccccctctcctagggatggttaaaaaagattaatgggaattcatgacttctacccattagcatttaagccctcaagtccttttgctcttcagtcatatttgggcattctctctttctctcaggtgcagactttgtttttcttccaatggtcaatcacatttggcataaacctctctttcctcttcccttcccctctaatgctgatttggtggttgaaactcttagtcccccaaataaggtgtgcaaggaccatcaccttctttaattcctttgaataaaaaagaaacccaactggagccctcctgtgcggggttgtttgagattacaacacagccatttgtggacaactgctttcttttcctgggcaatctgaggagtcccatggctcatgtgtttgactgaaatagaaggagaacccttcatgttcaaccctcatggttattgcaggtattctcactgtctaagcccagg

SEQ ID NO: 41782 - DNA, 3050 bp, Bovine  19866880911317
  misc_feature (1)..(1): n is a, c, g, or t
naaacacacatcagtgcccttggaatagcagctgtgtggtaggtgttgaggccaaataaagtatttctttccctttgtctttgatgattgccctttatttctgtggaatttattatgatacatgtgtgattattcctcaggagcatcgagtttaaaaaaaagttcacaataggcttatgattatggtttaactaggaaacaatgtgtaaaaatattgccggtgtggggtaaagaaaaattcacaacttttgatgatgaaagtgctgttttcctacttgtcattccaaggattattgatttctttaaaagtagaaaaattcgactgttctagcctagaaattctcacttggcatcatttaggagtattttgacttcaaaggatgtgttatttgctgaaaagtggccactggggcaaaatatggctcttgacattttgaacggtgttaaatgatggcaccgaagtatttcaaacagtcatgattcaacattgtttaaaaatccagtggggaaaatggcagcccatagaaccctgcatatttggaattctttgggtattcattttaaatgcagttcacaagtttgctttttacaaaatgctgtgttttttttttttttaaagaaagatgaataaggctagtgaaatttttacagctgggtcttttggaattttgtgttctttttttcagttgcttataagtattctataaagagactgaaaagatgcaggccatagccttgatttttgtttttgctttgctttctcggctgggttatatgcctatactcagaatattattataatgcatattgctattcagcatctattataaatccaagatcacaaaagtagtctttgagcaaggcagataagtgaaaacacttggggaataagtaaacaccttgtttttgttaatttccgactagtctcatgtctaccatgctttcttttctctttgggatatcttttggattaaaaagtcagtagtctgactccacagtattcagtgcatgctgcagtgacattcctgcgaattgtggcctccacaggggtgccttggctggtgactgtagattgcaccttaggcttgactgcttttcgcagtttggagaggacacttgtcattacagagccatttgggaaaggagggtaaaggtgacagctgtgttgttccccttggggacctttctcattgttttctatactatcttttgtccatctcagccctcctatcttcaggtttttaaaggtgttataaatacggagcctcctgctttggattgtaaaagatgtcttaaggtagaatacttgggtccaaatattttgtcaagtgtacttttagaatagggtgtttctctcctcctccaagtaattaactgcaggactgctttcccaaaacaattgaaaagagctcattttgacaaagcaagcttctaatgacaaatttcccaactacaaatttgcagaggaaaagttctccgatgatgaagaagtttaatcaggcaaaaagacgtttttatttgcagaaataggccctttagagggaggtaattacttatagctgatgtgaaaaactggtatacctgaattcatttggtaaacctcatttaaaataggaaggttattcttgttattctattgaaaggaaaaaaatggtgctgttgtatcactgaatttatattaaagaaataaggttttacacttaaacccactcctatagggatatgtattgacttaaccaaagaaaatgaatttgagatttgagaagaaatctgttataaagacactagtgtccagcctgaaattaccaactgtagtttgccataggtatcttctatttaaaatatcccactgaaatgatgtcttttaggttgcttcctccacctctatatttttaaaagtctttgcatttttcttttaaaaacaatagtattttttgctaatagtattccatgttgaacagaaaatgaaatttcactgttactgatgaataagtcatcaacataaagtaaaccatttctatgagagactagtacctacttaaaaaaacaattgggatatagttgctttacaatattttattagtttctgctgtacaagtgcatcagctgctgcttactgctaagtcgccgtcagtcgcgtctgactctgtgcgaccccatagaaggcagctgggtatccatatatcccctccctgtggacctccttgctcccatccgcccctctcggtcatcacagtgcactgagctgagctccctaagctatacagcaacctcccactagctgtctgctttacacatggtgacgtatgtacgtcaatcccaatcttcacacttcctcctaccccagtgtttctgttctttaggtctgtgcagctgcttttaagttcagacctgatacgatgttaaggatgcctgtggcaggcaagggggcttagacccggtcctctctcataactacctccctctccacaccccaccttcatcatttgatatggatgattatcttttaaaaattcttctaaaatgcttttagaattttctcagtttctttgaaccacatgaaggtctttgtacctctcctaaaagcacattttcaagctgggcttcttattggatctctttccatctatgtatgtgtatatgtatatatttctagatcattgctttccaaacgtcagtctacctgcttatcacttgggcttgttaaaatgcagattctgcctggctctggtctaagagtctgcatttctgtcatcttaggtgtgatcaatgctgctgattaatgtaatgtacacgttagctttgtgtgttttacagacatttggaaaagactgcctaaattcctggattaaaaaagatttagcataatcttttatatctcaaaagcatatgagttttgcctttttatttaatctctttgttttgtctcatatttgcttaatcatgacatctttaaattgatcataagcgtttgagatattgtatatattttgaaaatgtagagagcctgctaaaatctatttgatctcaattgaaatatctgtcactat

SEQ ID NO: 41783 - DNA, 2151 bp, Bovine  19866880912556
  misc_feature (1)..(1): n is a, c, g, or t
nttaagtagggaatttggcctggcttaggatcttaagactttgctatagttcaccaatgaaacaagaccaaaactatgtcatcttttctgaacacagtatatctgatatcaacaatgcttttggcaactacaaattaatcattattattggttatacattaaccaccatgtgtctctatttgaacatcaatctacctttttgagaaagccaaagcctttctctttttggaaagagaaaggatgggcatgtggagaatgaacagttagttgccattagtaataattaagtttctgctgcagagggaagagaatttaagtggaagagtttgagactgtcctttttggtggcttaataagctgccaagattgagccactggattgtaggggagaaaaagttgaacaaagaagagcctggatagcacaaccagtgaagaggctggaaaaatgttcaacccatttgaagtttctgctggaactgtccatcaattctgatctaaaatatatttaatttctctcctatctcctttggatttgacaggtatatccctcattcaagacaaagctatcagctgttctctagtcggatggagaaaatagagttctatatttcagtaatagctcaaaactcctagaaaaacttttttcaaacaattttctatcatgtatctttttttctatcccagaagactcaaaatgaaataactcctctgagaacattctcttggcatcatctttgagcagctagagactataatgaaagcttttaagacattgagaagagaagtcaagcaatttaatttctttccaaaaatactaaaaatgtcataaaagaattaaaatgcctgttttttcagttggacactccccttgtcttgtgtgttagatcatcggttacaaagaatcagaatgtgtgaggattagaaacaagtgaatccctttgatttaatgtaggcccttttctgatctcacttaacaagtaaagaccatattgactctagcaataattagcttttaaattctttagacagcaacttatcaaattacattaagccaattaataatctcaataggctttcattttttatctttttgtgttattttaaatatgtaattatacttcacatctatatattttatgtttcctttgcagtagaatattattctgtaaatgtgcctttgcctgtactttctgatgatggctgttggggaactttcaatgaaattatgttttaaagtatctttttagaaatctgtcctatatcaccaaagatttaggtgtttctctgttgtatgctactaaacatcaattgaataatttttcattaaatgatatgaaagaatacatcagttttaggtttcatcatagcccctcagatctattttcctaattaccctgttgatgttagttttaaaatgtgcctgtactggcaaagtgttactgtttctgtaaaatgggtcaaggaatattatcttgtttttgtcacttcaatttatagcactaatttttgtttggacttgtattcattcaaaaatttttctctgtgagaaaagactagttagcctgctgctactactcagttcagttcagttcagtcgctcagtcgtgtctgactctttgtgaccccatggactgcagctgaagactagttagcctgctgctactactcagttcagttcagttcagtcgctcagtcgtgtctgactctttgtgaccccatggactgcagcacatcaggcctccctatccatcaccaactcccagagtttactcagactcatgccctttgagtcggtgataccatccaaccatctcatcctttgtcatccccttctcctcctaccgtcaatctttcccaacatcagggttttttcagttctttgcatcaggtggccaaattattggagtttcagcttcaacatgagtccttccaatgaacattcagaactgatctccttaaggatggactggttggatctccttgcagtccacgggactctcaagagtgttctccaacaccatagttcaaaaacatcaattcttcagtgttcagctatctttaaggtccaactctcacaaccatacataactcgtggaaaaaccatagctttgactagatggacctttgtgacaatgtaatgtctcttctttt

SEQ ID NO: 41784 - DNA, 1169 bp, Bovine  19866880949930
  misc_feature (1)..(1): n is a, c, g, or t
ncaatggcaatttaggaacacttgcctgattatcattttgacctggagtgtcagtgtaggaggtttcatattattcaaagtcaaatattataactcatgcagttgttttcacaaatgctataacatggactgtttcctcattttgtttccttgtgtagataactttttagccatttgcatacccataaaagcagttctctggtggcttagatggtaaagaatctgcctgcaatgtgggaaaccttggtttgatccctgggttggaaagatcccctggaggacagcatgacaacccactccagtattcttacctagagaatccatatggacagaggagcctgatgagctacagaccatgggatcgcaaagagtcagacatgactgagtgactaagcacagcacgtacacataaaaaacacaggttttcaaaatgtttatattttacagaatataaaaacaaggacagtgtcaagaactcttgtactgacatttactacttaattattaagtaggtctttttttcatatttgagcatttatgaaataagcaagctgatcttaaagttttttttaaagattccaatacatgtctacctttcatacaataaccttagcacaagctttgctaattcttaaaaaaaattgacaatataatttccattgtctccagattttataattaactatagaccttagtgattaactggagtatttttaaaggtccttctgattataagattatcttatattatttcttgtgaaataaactcaaaaatggttaaagctctccccaaaatgtttaatttttttctcatcttattatgagaatgcatttctgattaagttttgaaattctctttagttcattaactcctattaaactcctaccactgactttcagataaaatcttattttctaacacatctttctaacatataataatggtagaatatcaggcttttaaagtctgttttaagatcaaggatttattttacttggaaatcattttttagtccttgctgagaatgacttccgtacagttttaatcaagtctgacttatagaataggatctccctgatgattagctaatacagttaaggtgaatggagagtccagctgtaggaaatgtaatatgaatttcatttgcatttttcatccagccactcag

SEQ ID NO: 41785 - DNA, 1905 bp, Bovine  19866881002210
  misc_feature (1)..(1): n is a, c, g, or t
naaaaatctgccttggggaagcagagatgaatggaaacttaattacgcttgacaaagatcagatggccttgtgctgtgaaaggatatctttgttcatgtcttctttgttaggagtgtggcggaaataggaagctgaggtcaccgtaagacctcaccgacgctgctatcgggtctcctggttgcagctgatattgcagtgtgactgcaattgcaagccattgttgacttgtctgatttaagtgaatacttatgagagggaaacaagaattagggtaactatagaatatttgtccaaaccaggaagggttggctattatttttacactataacagtggacatagagtagttttaggcaaaccagaattacttctgagaatcacttacaaaatgagaagcacagtataccgtttcaatatgcatgtggtccggtttgtataagaacctttctaggacgttttggcttcccttatagctcagttggtaaagaatcctcctgcaatgcagaagaccctggtttgattcctgggtcaggaagatccactggagaagggataggctacccactccagttttctggcctggagaattccatggactgtatggtccatgggggtcctaaagagctggacactactgagccgctttcactttcaggacattttacctttgataggcatctttactttaaagtcctttcagaagaaaataagggggtcattcattccaattccatttaattttgtttgttagtaaattaaaatacagtggattttaggtcttggctactatccccagttctcagtgtcagctggctggatctaggagaaaaggaactggcattccttttctctgtcatggattgaaaaacaatggaagcaaaggagtatgatgtgaattaagagcttaactttctttaatctgaatttttaaccaatgatgacttccctgaattgaactccgttttttaagccagtagagtttaatcagtcctttgattgacaattgagaaaagcaaaacctattcaaattagtggctttccttggtgattcatcttcttggtatcagaaccagactagaattcaggttcctggtgtgctcagatggtagagaatttgcctgcaatacagaagacctgggtttgatccctgggttgggcagatgctctggagaaggagaaggctacccgttccagtattctttcctggagaattccatagacagaggagcctggtgggctacagtccatgggtcacaaagagtcagacacgactgagtgactaccactttctgtgactgaatccagtgcttttatgcagtacactgggttcagtcatcaaagagagttacatcttaataaattaaataaccctctctatccttactgctgaagatttcgaccaaaaataggtatgaaattagggaattatttacatctggctttatcttcttgtgagagcatttggattttagagtcgtggcagcctgccagggacaaatggaggtgcagagatcgcctgcccgtcatccactaccttttatggtgtcaggggattgcttgttctgctttgcgacccagctgcaatgcagctgttgttggcactcctgctctccactctcacagagcagctttcctaaccatccccatggggtttaactgctgagcacgagtgtcggttctgagctctgtgagccaaggctgcctcttggggaccaatcagcgtagcagctttccacatcatagctaaacagtttgggatggagcagtccagcaatttctcatgacaaacaagaagcacccatttgcacaaacagtgcagccggatggttgaagttgctgcaggagctaaatctgggggctttccgatgactgactcctgaaacggaggtcacgggaccgctttgt

SEQ ID NO: 41786 - DNA, 869 bp, Bovine  19866881004917
  misc_feature (1)..(1): n is a, c, g, or t
ngaatagtcatcttataggatatcgcagaattaatacattggagcatcttaaatcaatgcctaatacatagtaagcactcagtaaatatagattatcattattgcattgtaactgggggacacgacaagggctgtgttacaggctggctgttcatcactctgtgttcttctccaaggaatatattttgattcagggcacagtttggtccagccaaagttccacattgtaataagaaactgcctcaccagtttaggaggctaagacttcacaaagactgattaccaagaaaaccataagttctggaaaatagagcaagaaaaaaacatttttttatacccatcccatttttaaaattagatccactgtctatctttttctgggaccactgtatttcggccagagactattttcatggctgggttaaatagcaagcagatcttactgactataaaggctggcagacctggtaatgatttacagaaggagactgtggtgcctacttgtctgaataattttaaggacttggcagataattctcgaggactttttaattgtagtcctcagaaagccagaggacaggctaatgacctttgaagcttgctttctttcattcttgactcagtaacagcaaattcttcgtttactatagtatgatatattttacatataacgtgaatatgattcattctaattggacagagcattactgccaaggatggccgtggatagaactccttcctgtctcctatataaggcaggggccctgcctgttgtttaaattagcctttcatgcaaccactaactcaaatctagtgatgattcaagccagaaacagtaattttatttatatgatgtcttacataaaatg

SEQ ID NO: 41787 - DNA, 1943 bp, Bovine  19866881015106
  misc_feature (1)..(1): n is a, c, g, or t
ntgaagagttgactcactggaaaagaccctgatgctgggaaggactgggggcaggaggagaagggatgacagaggatgagatggctggacggcatcaccgactcagacatgagtttgggtaaactccgggagttgttgatggacagggaggcctggtatgctgcgattcatggggttgcaaagagtcggacacgactgagcgactgaactgaactgaataataagtacattttcaaagaaaaagagatcaaattcaggcatttaatacttcacagatagggctttaggcattaagcttgaaagcttcctacaggtttggtcaccaaaagagatattctaatatccagtaaacaagattgcatgttatatggccatgtaagagagaatttcaaatagctcagcaggaaggccacatatattcaaccagaggaaaaaaatcaatccatccagtaattaagaaatactttctattcccaccaaagatgtgcaatgatttgaagcaaatgttgctgtataattacatatgaacataattgaggctctccatctctgcaagtccttttatgtaagtaagtgatttgaaatggaatgcaaaatttaaaatatctttttatgctgaccattaaaattatacttcaggctctaaaacttagcagggaacaagaactctttagagatgtggaataaaaagataaaaagttagtataaacttaaaaagcagaatactacatatttagtaaagccattattgggacaacattagcatggttgtcaaggggtctaactatggaagcagaaagcatgtcagaaattcatactgacccttccttcataattacccttttagtctacaatcttcctaagaaggatggttacaccagtatatcttatgaatacaagatatacagcactgtaatcaaaattcaaaccacaatgaagcatatactcatttgccagtttctttcatgggatgcaatgatattcaaattatatttcaggatagattaatgaatttgcttaaacattttattcaaaatgaagtttggagatcaacttgatatgtataaaaccagaatcacttgctgcttcctctcaacttactatatataatacaaccatcaatctgaaataagttttttgaacccatggtaaaattttcaattacttttatgtgtactctctcactaatattgaagaaacttggttttctccagcaacctggtgagtgtttttgtttgttttttaattacagaatgaacaaactggaagacatattaaggaaagttaaatttaaagactcaggataaacaacatgtcttagtatagtaaaatttccatttcttaagtcttccccagagtatcccggtgatttgaataaactatgtttacacagcatatgcaaagatatacacctattcggtagagttctcttgtgacggtggttgtttttaaaatacataataggagtccttcatcctaaggatctccaggttggagagatagacacttggaagacaaagggttggaaaaagaagcaattaggtataaaatgcttgaaaagcagaaaaggaagcaccagtgagaagagaaacaaacagtgaagcactgaaaatgcttagttgaaatgaggaattcaaattattttaaaaacacagtattgttcccccatgtcttggttctccactgactgcaagtctctacttccatggcggacaaatctgggagtcctgcctgcccaccccattcaagttcagcaggaaaataagaaaagaggaccacgcacctcacgtatccagttgtttttgtctcattataaataccttccatttctagtgctattaataaacccaaaagtttttcaaataaactacttcagaagacaacttggaatcaatgtaatcatctgtttttgtagtttcctatctcttctgtcaaaggaaggg

SEQ ID NO: 41788 - DNA, 1226 bp, Bovine  19866881037229
  misc_feature (1)..(1): n is a, c, g, or t
ntggaaaatttgacagtgtttaaaaatatgtgacattttttttcggaagcagttttattgaaatgcttgtggctttcctgctgtgatgtcactctgttgcccttagtgcagcagagtacattacggtgtggcgtggtttcattttccatgtggcgatctagcagtgaccaaacaaatcagcttcataatccttacacagcctgggagtgagccacagtgtggaggcaggtgtgggagaaaatgctagaaaaagagaaaaggcgaatggagagcgcatcctaaaaaccttctttggaatgatggtagaagaaagtctagagtattctgagcatttttaactcttcagtgttcttttatggaactgaaattaacctgtaagagtttatcttctcccacattgttgattttggaaaatgacatgttccataaattaattctcttattactgtaatatagtgttttatattctgaaacattagcaaattggtggaaaatctttataaaatatattctgtacttaccttcataattgaagtatattggattaatcctgccccatgactcaataccatactaagtcatgagtaatatcaccatcatgtaatcattgagtattgttttttgttgtattatgtagacacattcaggaattcattatatgtttaggaaaattttccactacacaaaatgaccccagacacttagtgtgatttcagtatttaaaaaagaaatctttagtattttttccttcataattacacatccagctgttacttcttgctcttcatatgagtactataccaggctttccacatttcctgatctgttaaaaccaatttgctgtggaatgaaaaataaaagtatttcatttttttaagagtgaatggatcatcattagcatagatattttccttggctcaaagagaaatggataaaaatctacagtgggagaatgtgcagttatttgaggatttggaccttcgatagttctcatgttgactccccttcattatttccacagagaagacccatgtagcccagctcctgagaagggggatgggcagccatttctttgctctgacgttctagtccgagtatcttcttgaaccaaagaagttgttgtttagtcaccgagtctaggtgtttgcctgtgttccagtcttgagtctcttcttgtagttcccttgccctcccctctggtttctgttttccctgtattatcccaa

SEQ ID NO: 41789 - DNA, 769 bp, Bovine  19866881041780
  misc_feature (1)..(1): n is a, c, g, or t
ncactgttggtactcatcactttgttagagataataatttaacatatgctattaagttggactttataatagaagccaagatcttttagaaaaaaatcaatgcttaagttggtattttattttaaactgcctcttgtacgggtaaatgcatgaaaagggtttaataattcagcccagcaagcaactactatacaaccactgggtgccagcaagatttggggaagttgcctttaacacgataagagaagcaaatttctgtgatttctttcaatttacttggatctttccttgctatttgaattttttaaaatctttatgctcaatggaaaagtggaggaaaaggtctaacaatatgcatacttaactgtggtccaagcatggttcttatattttctctgcctggaaatggaaaaaatagacaaataattttattatttacagcaaaaaaacccctaaagattattttgtgatcaaaatacttatttgaaaacaaaatttggggtattgctaaagtcaggaaccatgtattaagtaaaacatcatgctaacaaaaaatgtttaatgtacggcttttgtggtgctatttttatttacccaacacagctgacaaaagcaatcagtcgatagtgtaatcactgagagcagtcagtctaactattctgattaaaatttctgagaaacctagaaagctcaaaataagtataagcaggatgtcttctaaaaatcaatacacaagctgtggtagcatgaagaaatatatttaaataaa

SEQ ID NO: 41790 - DNA, 1899 bp, Bovine  19866881047156
  misc_feature (1)..(1): n is a, c, g, or t
nggatgagtgagactggtgcccaggatcaacttggaatgagaagagaatgggtgttatccatatttagtagagccattcaacatgattaggcaattttctctgaagtgcgttttgaattagaagcagctgaaaacaaactatcatttgttcattatatactatatgctagccttttgttgactgatttataatatcttgacactagtgcacgaatgattaattttgcacatgaagtaacttagactcaaacaggataagctatctaatgtcaaaatgttaataaacatctgagccattattagaacacagtattgcttaggaaaagaaacaaacaacaaagcaaaaccagacaccctctggttggttttagccgaagtttttactttgtaaggtgaaaatgcctaaaagtcatgctgattaaagtgataaatctgataaagtgatcatttatacagacaaggcacagaggcaagtgtgtcaaaggtgatgggtcacccactaaaggacaatgaagaggctggagatcatggtgaaagcaagacaaagcaagttgcttattcacacaagagacttcagttgtttttcattaaaagtttcaaattttataatgctgaatatcaatatatactttgtgaattgaaatgaggtatttagaaacatgcagtcatttattttgtattgtagtatgacaaaattcatagttgtcatgaaatgtatttatgagtaattcttcctttttcactctttaccaatatattttctcactaaggtatggatatgtgaaaattcaagacattttgtgggattttttaaagacatattacagatggaaatgctttcaaaattatttacatcaaacattatctctgtgttactttctcaagcattatgttgaaaatgccattatggatctcttgtcatggctataaagcattttgaatggcactttaaaataacaccaaatgtaagtgatacaattagaaaaacaatattctgggagtttagtattttgcattcagaatgtgataaaatgtaatcattcactctttcgttggaagcaattttaattgcaatcaccaatcagatatcatttgatctataatattaatggctcagccttgaatttttatatcattatcaacatttacacatacaattcatgtggtgaagtgctgttcagttttcagagctaggtttttaatatttttatatcaacacagtggcatatcccatagagatgcttcaacaactctctagacacagtgtgaggttgataaatatgaattatcttaaatcatttgcaatgaaattgaacagctaacccaagggcttgggttaagagaggcaagtgaatatattgtacagtgtcattttttatttcttttccatttgatttttctctgtgatgtgtaatgaactagattaatgggcccaattccattactgattaaatggatttgatttggacctttaacagggaagtcacaatagcagtcagcttcagagcaaaagctttaaaataaaaatgaaagattgtttcaaagagaaagagaactactaggcagtaatatagaggcagacttgtttaaattcagagggattatttgattaatgcaaggatcaagctgctacacgttgctgatgagctggcacatataaagtaggtactgttaaattatgagaacatctcatgttaagaacaatttttttattcaaatatatttttttaagtatgttgctgttcagtcactcagtcatgtctgactctttgcaatgctatgcactgcagcatgccaggcttccttgtccatcaccaactcccagagcttgctcaaactcatgtccattgagtcattgatgccatccaaccatctcatcttctgttgtgcccttcttct

SEQ ID NO: 41791 - DNA, 995 bp, Bovine  19866881049175
  misc_feature (1)..(1): n is a, c, g, or t
nctttggtgggggaagggggtgttggcaagcattactctgcctatcaaagaaattgaggtttatgaatgacgagttagcactatcaaggtttagattaattttacaactgtagtcatatctttgctacctatcttttagctcttcattgctaattaaattcattcttgtatctcttttcactaagataaatcccttggttttggttttaaaagagtttgaatttttactgtagtcttcctatgtggctaacctgtctttgtgacccaaatttgatactatcaaccacatttctctaggcatctctttttgtggtttagtggctaagttgtgtctgtctcttgcaaccccatggactgtgtagcctgccaggctcctctgtccgtgggattcttgtagtaaattgaaactttccattcctaatagggatgcttttcacctcatataaatagaaaatatgtgcctaaatccatattcagccccagatccactctttcttttgtctgtcatgcattatttgcagaagaggctgccccccatggactacaaatcccaggcttgcttacatctggcttctagatggttcaatgaatgggagacaagggcagaaagagagagcatgtttttcccctgtaccatcccaaatttgccactaaatttacatagggctgattccacctgcctctcaactataacttgaggaggtccatatttcctcctcttttccctttggtacaaagggcaataatgttctcctgctcatactggtctctggagcatcaccatcccttgtttgtttccttcatttacccatatgtacttcaatgaagtttttcaacaaatttcttcctttgaaatgagtcctgtgttctgctgcaactctgacacaatatccccaggcaaattttttaaagtgaatttttgtcttttgttaatggtaaaacaaatagatcttcagctcaatggagctgaagttctgctttgatgatatataaaa

SEQ ID NO: 41792 - DNA, 712 bp, Bovine  19866881108531
  misc_feature (1)..(1): n is a, c, g, or t
natgagaagtttctctgggcagggccagtacctttataaaatatgagggtggaataaacagaaaagacaagagaataaaaagcaagtggtactgaaagtattcacccattttctcttcattgtgaacacctcaatccccagccttccatcattccaacaaatcttatgcttccccaccagttctttttccctgtcttcagccactaatttgcctctagctccgattgctagaacctgtaaacaatgacccctgccacaaacagatccttgctcttctgaccattgagttgagtgaaggaatatgtcttcttatcaccaaaagtaaacctgaaagattagttttaggaacattgttataaacggtgttttgttttaattcctcaagtacttcaggataagcccctgagtgaattgtttctaggttgtaaaatatattccaggccaaaagagataggctaaaactttaatttttggaactcctcttgcttattcctaagttagaaactactgctctaagtgctgctgacctaacaccaattcctgctggtctgtgagatacatgataccttttcccctttcataatttattgcttcaacatcagacttttgttagagctttgtccctgctgttaagggacaaagaaaacacccccttcgttgaacatttatatttaaagtgagtacattgtacaaaatctctgtgtgcctgtgg

SEQ ID NO: 41793 - DNA, 962 bp, Bovine  19866881158359
  misc_feature (1)..(1): n is a, c, g, or t
nctgtgaatacatgactcaatttaatgtaggaaatgaaaaatcctattaaacattaacatagagctttaaataaatttaacaaaacaaacaaacaaaaaaagacaaaacaaaactgtgttgcaatctccagttttttattaaacatgaaaaagaggttcaaggtagggattgaacccaggtctcctgtattgtaggtggattctttaccagctgagccacaagggaagcccaagaatattggagtgggtaacctatctttcccaagaatactggagtgggtaacctatccctttcagatctccctgacccaggaatcaaaccagggtctcgggcattgcagggggattctttaccaactgagctatcagggaagccaaaggttgaagcaggatattttaacaaccagatgcttctttgttcataataggtaacatttacaaaaccacagtaaaaagacttaggttctagtttgaactttttgactaactagctacatgacctgcaatctcatttactttcttgaaacctcacattccttaactttagtggtagtctattactgtcagcaatctctaaatactttaacaggttgaagattctttcattctagattaatcagagaagggtttctactgctagtttcattgtgcagtttataaaaaaaaaaaaaaatgccttctctggttagcaagcaaggaaaaaaaaaataacttccaagagactattcagaataacttcagaatcttacttcccaagccaagggactggaaatatgttgatttaattttgacaaaaacacattcttcagcatctaatggaaagaaaattttagctgattgaagagtattcaaagagctttaggacttcaaacagctcttacaaatcatctcactgattttaagtatttgatgccagcgtatggattaaattctataagagtataaacaggtcaaatattaag

SEQ ID NO: 41794 - DNA, 1708 bp, Bovine  19866881241259
  misc_feature (1)..(1): n is a, c, g, or t
nactgcagccttccaggtgcctctgtccatggggttttccaggcaagagtactggagtgggttgccattgactcctcccatcttaacccacctaaaaagtaccacctaaaaagcccatactggtatgtgtataataatagttttctacacatttattaaaatataaaatttgattttaaaaatactttatatatgaaaattatatgaaacatatagaaaaattaatataaattttcactttagagaattctgcctcacaaattttaattttagtgttttaactaatcatttatttgtcagtattagaaaaataattgcagcaatatatgattcaattcaattcagttcagtcactgagtcatgtccaactctttgtgaccccatggactgcagcaggccaggactctctgtccatcaccaactactggagcttactcaaactcatgtccattgccttcgtgatgccatccaaccatctcatcctctgttgtccccttctcctcgtgccttcaatttttcccagtatcagcgtcttttccaaagagtcagttcttcgtatcacgtggccacagtattggagtttcagcttcaacaacagtctttccaatgaacactcaggactcatctcctttacaatggactggttggatctccttgcagtccaagagactctcaagagtcttctccaacaccacagttcaaaagcattaattctttggcgctcagctttctttaggtccaactctcacactcatgcatgactattggaaaaaccatagctttgactaacggacctttgttggcaaagtaatatctctgcttttgaatatgctatctaagttggctataactttccttccaaggagtaagcgtcttttaatttcatggatgcagtcaccatctgaagtgattttggagcccaaagaaatagtctgccactgtttccactgtttctccatctatttgccaggaagtgataggactggattccatgatcttagttttctgaatgttgagctttaggccaaattttcactctcctctttcactttcatcaagaaaatctttagttctttttcactttctgccataagagtggtgtcatctgcatatctgaggtaattaatatttctcccagcaatcttgattctagcttgtgcttcatccaggatctaggaatatactggtagaaaactggagtataatctctgcccttccagcctttttggtctagtggaagagagaatctctaagcaaataattatcattgtgctgggtgttataaaggtaaagcagagagacctcgtccactcagaaatgttgggaggctttctgtaattaactttgaagctgaactttgaagggtgagtggacgtttgcagggtaaaggtggatggggtgaaaatgggaggaaacactttagagagcctttagaaggatctgaaagtgttaagagctctgtaagagaagtgataaaagtctgatataatgaaagtttggtattaagggagaaatggcctcagatgtggctgaaaaggtgagcagaggctatgtaatcctgaactatgtatacactattaaaggttttcttttttatccctagagcaatgggatgcacttaaaaagcatggagttgcggatttacagaaagaggtttgcagatatgctgcaaaagcaatctgacagctttttttttttctccctgaag

SEQ ID NO: 41795 - DNA, 1360 bp, Bovine  19866881263533
  misc_feature (1)..(1): n is a, c, g, or t
nctctaactcctctggacagtatagtcaggaacttaggaaaacatttccctattccaaatatgggacaacggtagtctctaaaatggtcacattaattatctctcaaagaaaaaaaaaaaagaaaatgttcaagtaagtattacaagaacctcttctttcttaacactgttaaaaagcaagaaggaaagatataaaaaggcagaaagagtaaaccatccaggtaaaagcataaaataaaatattacctttagctgggtttacttttatccctgacctatacagcatttcctcattctgccagtctccgttcctgatcgccgtcttgagtccatagaaaacaattaatgcagctgtagcataaaaaatcaagctcttgagaaacctcttttggactttgacataaagggctctggcacccactgtaatgaggaggcaaaagcccatactaggaatatacaatactcgctctgcaattacaaagccgacatagaaaaacaggttcgtggcaggaacaaagggtattattaataaagataaagacagaacaactatgttctccgtagaaggaagctgtgttctctgcgatgcattgtttctaatgccattttctagtttggatgcaaagctgggtttaatctctgagttcccgtactccacctctgaatggcagctatgtccatttgcattctgcttgccatttgttacaaatttcccgttgcattctctttctatgcttgggctcttcaaaccaaagtaggcaaggaggaggagtccagtatagaaggccacagtgtgtaagtttctccaatcagaaattgttttgagcagaggcacggcgtccattgaccaatcaaaactgagggtatctgggcatagcaacagccaaaggttcttggttggcaagtagaagaaggtgagcgtgcgagccaggaggctgtccgaatcagcagctgggttgtcagagttggaaaagcttggtggtttgtttcccatccagtataaacgggcacccaaaagggaagttccccagaaagttaacaaactaatgctgagaaaaagagacaagttcttcctctgaaaccaaaagagagggggaaaaaattaagatcatcatcaatacggcacaggaacagatcatttaaaaatgaaaagtatctttaaatggacaactaaaaacagagtattaggtttcaaatacatgactttgtttctatctcctttaaacatgcttatggctcctgtaagctttaaaaaattgactatggaatccaattctgtatacaatttttcatgagtatcttttcctcttgtttctcgctaaataccagtaaccagagcctcaatttctgacctctataa

SEQ ID NO: 41796 - DNA, 1471 bp, Bovine  19866881288786
  misc_feature (1)..(1): n is a, c, g, or t
ntttttctaagacaaaataagctttattttcttaaggcgattttctggtatgttttgcttttatgagatcagtaagatttctgtatatttttgcgtacattttgatatttttcttgccatttaggtttagtccatgcttggaaacttttgacctctgattctgttactttgtttaaagaattgtttaaattccccaactaccagacagagaatccaagaagaagagaatgtatacagctataagaaaaaataaattcccaatccacatttttttttttttgccacagttattaaaatgtctgtgaagctttatttatgtgaactctactgaagaagattatttcacataaaaatatttctttatgagggactttgagtggtgattgacttgattaaaatccattcaaaattgggaaggatcttatgttttaaaatcagtgtgtatgtctataggttactaaatattagagagaacacatttaaattgtatctgtaattatagacaagttttgttgttgctttttagtgggataatttagacattacatatgcaaacacagtttattaaatttattaattattaaatttattaaaaatttattaaatctgcattacttattagccaaggatttaaattacattaaatgatttttatgtaaaccaaactatttgtacacctctcttttgtgtatacacattaattttatcctcttccatcaccccattttttgtatagggtataggtacctttttttggtagaaagcaccattttatgttttaggctttgaaattctgaaaaataattttgaatataattttatgccaggaaccagcacatcaaatatgtgttttatatattccacaaagaaaatataacttttccctagtgtcttctcttttccttgctatttgtgtccccttttaattaatatacaacttaaaaatatttagctttcttattgatctgctttcaagcaggtatgtaatgagattttcatcttaaagtagaagagtctcaaaattttgatgaaaattagacttcaaggctgtttcattcttattactttctgtgctgtttgtaacagattaccacacatgtggtgacttaagacaatacgtttatcatctaacaatttctaagggtcagaagcttaggcatggcttagctggttctcatttggaaggcctactaagaaagaatcagcttctgagttttttttagttgttgtttgtagttgtaatcctttagttgtaatcatttccttgtgactataggatccatgttattaatagcttgtttttttgaaaccagtgacagagacagagagggagctgccgagatttgagcatgagttgaatagtaagactgagtcttatacagtcatggaagtgccactccatcccctttcccatacaagtgtgtgtgtgctcagacgtgtccgactttgcaaccccaggactgagcccacc

SEQ ID NO: 41797 - DNA, 971 bp, Bovine  19866881533398
  misc_feature (1)..(1): n is a, c, g, or t
ngtagcacaatatatgtgatacatgccttctcttttacagaataagttttgtaacttcaatggtatgtatccataataatcattcagtgagtcacaggaaaattttttgttccctgctccctctaatctaaacatgactgcacggtgattataataaaacaatggaacctaaatgttagtcagtgcaaagtgggaagagttttgctttagagaagacgaaatggaaaaataatctcagctctaaacagtaatcatcattacaaaaggcccaggaagcacacagggctgcacacccagataaactgcactgacaccactctagcctggggtagggaacttttccatggaacttcaagtactttcacaactggagttttatgtagcccaattaactttggctagacatagaaatctggctcagtacttccatgcagtagccaaaataaaggtttgctgtatcaagaattactgtcagagtctcccatatccttccttctctcttactaacctaaatctggaaaataacctaacggccaagttccttttactacaatttagatcaatactaattttactggctcaaaaaaactataaaatatttggctgaaataaattgaacaaggacaaaaggaggaccaaaaacaagtaaggatgtacacacaactgaagtatatacatggttttagaaacaactataaaaccatacgaaacatggtgataatggaaacttattccttcctttctcaatgcttgtccaattttaaattcatggcattagtcctaggtaacaaagttcaaataaggaataaatcacaattttaaagagaacttgtgtttagtattttaactggacatgacattggtatgaaagctctatatattctatagttgggtcacgcaggcccagctatatttaaacatggaggctaccaatgaccctaaagcagaactattttctagggcaccctgga

SEQ ID NO: 41798 - DNA, 590 bp, Bovine  19866881556375
  misc_feature (1)..(1): n is a, c, g, or t
ngatgaaatatacatccctttctctattaaggaagaaatggaccaaaagggatttaatagaatctaaacaatctgccagcaaaatgggaaccaaaggtagtcattcaacactaaacataataggctctcatctgtttgaattttcttacctgagtccaaaactgaaagagggaaacctcttctgctatttctcagctaatagaaaggcttaagtcaaaacaaaatttcatgctcttataatcctgaagttacttctgtgagtgggtactgccaattcagaaagacactaaggaattaggaaattttcactccaggaaagatgaagaatgttgaatgtagcagatgtggaaaagaaacaaatgtaggcagaattctccagagaacacaggactaggagattgtctttggaagcaaaaagatctattctctcaagtcttcaaggggggttttaacctgttttcagttttgttcatttgcggctcttggttttttgctgccttatgatttttcctttaaaaaatgttgacaaaggccagcactgttataaaactgatgaatgatgtgacaccaccagcccaactgtccttgtg

SEQ ID NO: 41799 - DNA, 1206 bp, Bovine  19866881911426
  misc_feature (1)..(1): n is a, c, g, or t
nagactttggtcagtcagttgacttactagaaatgatgagaccatcataatccataaactgtctatttcccaccactatggcaatgaaatagagaagaaaaatatgcaaattgctcatttatggttttttttattttgctttcctaaattacttctaagcttgctgagtcggatttctataacatctttaattatgatgaagtcttggcttaaaaaagaaaagttgtttagttagagcttcataactggcaatgaaacatttaaccaaagtgcccgctctcaactttgttatatgttgctttttatttggactatgggaacagcatcatggagactcatggaatttgatactgggatcttaaaatgttagtatgaacatctgtaaaataattccaaacaaaactgagcattatgtataaattgcaaaacatggacaaaattctgaatgtatttaagtaatacaatacattgtaatataataaatcataaaatatcagaacaggtaatggattatacaggttctgctctcttttaatgggagagacaatgtgatttgtgatgcaaaatcagccatttgtgaagcaaaatcaaccatttgtgaagtttccagctgttcaattaagagctttcatttctgtaaagtaggaaaactaaaggaaattcttttgaaaaaactatgaattgactagcacaataacacatgtggctttaaaacattttcaataatgaattttttttcatagtagtcttacaaatattaatgaagaattatcatgccaatgttctcacactagggtttaaaaaaacagatttttattcattttaataaattattaaacattaaaaaacaaggacttaaattctgaaaagaaatgattctgttgataggtcctattgtttcagttgggattgtagtaaaattaaaggaagaattgttcttattcaaaatttgccttccaaagatatagtaaaactaaggtttcaaaggtgacaattatactttgatttttttaaattcagatttttgagatcaaagatactataaattctttataattcctcctattttagcagaatgctttttctcactccaagatgattcataccaagctgatttctgaaaccttaatcccatttccgaggacagtcacaagtcctggatgacttagtttaatttgctacagatgattaaggcacaattcaaag

SEQ ID NO: 41800 - DNA, 750 bp, Bovine  19866882161884
  misc_feature (1)..(1): n is a, c, g, or t
nactcaatattatcacttcccatctaggtgaatgctctcttttatttacctcattaagtgtgtgagaaaaaggttcctaagttccaaacatggagacacagtttatacagatgtgaatgtaaacaatgggtttaaagcaatcatatggtactccagcacttatggaataatccatcatctgctcaccacacaagttcctcacaagaagaaaatgcctagaagttactgtgtcaatcagcataccggaaaataaaatgataatgatatattactcaatgaaaggaaaactgagcacatgtgcatgtatccagtaaagatttccaagactaatcaaagtacataatcttctctgggcagcaaaataattccctcttcaagacttgcggaatctagtgctctcagcatgagcctaagaaaactatagcaaaaagaagatattaaagtgaagaaaagtaaataaacataagtgaaaaattataactgctacatagaaatctctttctagacaagtaaattcataagcaagcacagttgcctgtgtatttgagatgtgttaagaacagcgacctacagaaatgcatttttaaagccctttgttctttcattattttcatattgacattttttcaaatatggtttttcacaatttctggtatcattttaataatgcatctaatcatggatatcaatgcatattaaagatatatttattatagtagcattgatttgctgactgttgttagtcacaaa

SEQ ID NO: 41801 - DNA, 848 bp, Bovine  19866880668127
  misc_feature (1)..(1): n is a, c, g, or t
ncataaaaatgagtatgcttaatacatacagcaggaggaacaggcttccatgtctgtggctccatctccaaccatgacgatcttcttaaagtgaaatttttcctttaacaatttaataacttttccttttccaccagattcagctgttggctgcgtctcatcaaaacctgcatattcacctataaaacagatccacagaattagatcagtagggccacttttttgcatagatgatatcctcatttacatacgactggcaaagctaaaaatggccttccacacagcctggacttccacacttatttctcagaataaacaagctatgcttttaaattacaaacttcttgtcaaggttattcctttaggtgataaacatcttgcagttaattggttttatcttctaagcttccagtacagcaagtctcaaaacttattgaaatggcagaacaccatgaaacagtaatatattaatttaaaacatgttattatataatttcttctaagaggagattctaatttacatttgatggattatttccatcttacagtaattactacacttatactctactcttttttttaatgatttctatcttaaaaactcttcaaaagtgttctagtaacacatttaaatgtttttaattaatgccatttggttttaagaatgccagccaccccctgacataactggagacatcttaagatgacgagaagattacagttgtggctctgtgatggttcagaaaggggccaggaggcacctccaaaggcagctacagtgcagtgacttgctcacaaattaactctccttccgagtcaaacacacaagccaagttggctctaataca

SEQ ID NO: 41802 - DNA, 2076 bp, Bovine  19866880912621
  misc_feature (1)..(1): n is a, c, g, or t
ngtgcggccctgaggagatacccttcctccaggtaaggagcagcggctgcgctttgctggagcagccgtgaagagataccccacgtccaaggtaagagaaacccaagtaagatggtaggtgttgcgagagggcatcagaaggcagacacactgaaaccttaatcacagaaaactagtcaatctaatcacacggaaacacctatagatgtagccagaacatcgctacgtactaaagttcatgctgaacttgctgatgtcttaacagagaccgtagtggactccattttggccattaaaaaacaagatgaacctattgacctcttcgtggttgaggtcatggagatgaaacataaatctgaaatggatacaagcttaatcagaggtcttgttctggaccatggagcacggcatcctgatatgaagaagagaatagaagatgcatacagcctcacgtgcaaagtgtcattagaatatgaaaaatcaggagtgaattctggcttttttttttttttacaagagtacaaaggagagagagaaattagtgaaagctgaaaggaaattcatcgaagacagagttaaaaaaataatcgacctgaaaaagaaagtctgtgttgattcagataaaggattttgttgttattagtcaaaagggaattgatcccttttccttagatgctcttgccaaagaaggcataatagctctgcgcagagctaaaaggagaaacatggaaaggctgactcttgcttgtggcgggatagccctaaattctcttaatgacctaaatcctgattgtttgggacatgcaggacttgtctatgaatatacattgggagaagagaagttcacctttattgagagatgtaacaatcctcgctctgtcacattattgatcaaaggaccaaatgagcacacgtttactcaaatcgaagatgtcataagagatggcttgagggctgtttaaaatgctactgatgatggctgttagtcccaggtgctggcgcagtggaagtgcaatggcagaagccctggttaaatacatgcccagtgtaaagggcagggcccagcttggagttcaagcatttgctgatgcattgctcattattcccaaggttctcgctcagaactctggttttgaccttcaggaaacactagttaaaattcaagcagaacattcagaatccagtcagcttgtgggtgtggacttgaacactgatgaaccaatggtagcagcagaagcaggcatatgggataagtactgtgtaaagaaacagcttcttcactcctgcactgtgattgccaccaacattctcctggttgatgagatcatgagagctggaatgtcttctctaaaaggttgaactggagcttcccttgtatctgaatcctgaagactacagagtgatcctaataatatagctatggaattttggtccaagcttcaaatgatcttcaaagaattttcttcacccatattaaaaaaggagagagcattggcacctattcagattctgaagtcctgaaattataattaacagtatttttaaaattgcactgcagtgtccacatacagcaggtcatgcttacccagtaaagaggacattttgttttaccctcagtgatataaaaatattagataagcatatgttatctaccttgttattaaatattccttgaaaaacaaaaaaaaataaaataaaatacaacaaaacaaagtggatgaaacaaaattgttcaaagatcttagaatagcaaccctttaccaacctagatgaaagtaatttactaaccaggacataccggttgaatataaacctggggtacatgaatataaattacattttcctctgcttctttgcatgagaagcagaaatacaattgggaaaatgtttttgactattgaatataatgtcttgagtacaggggggttcactatactgttcttatcttttgtgtatatataaaattcttttaaaaatacagtagtatcttcccatgctagctgacacacaaaaatatttttgtacactttcataaattaatcttataaatttaccatccatatttagatctccagt

SEQ ID NO: 41803 - DNA, 1195 bp, Bovine  19866881273860
  misc_feature (1)..(1): n is a, c, g, or t
ntatgcagttttatgtcatttaaatctcaacatgcacacccccctccccccattcatgatcttggaagaatctgctgtgagcttactaaaatgcaggtcacagatgactgtttacaaaataaaacctcttttcctagtgctactcgttttgttgtagaaaaatattacaaataaaaattagtgctattcaaggtgttcatttcaaagtcacatatgatacacaggttcaagccgtcttttcctcgcgtataaagacaacacaatacacaaagtggagactgaattacccatcaaccacttccccctcagtaacgacacagtttactatgctgacattaaaaatgaaagtgaagcaaaacatttccaggtattgagtacacttataatttgttcctagtctgaaactcagaaaaaaaatgctacagaaacatgatgaaatttatatttcttcctgatacaagaaatttgtcttaaaaatctgtaattataaaacagatttgctctttataaagaaatagctaactttttttttttttcccatggttagattcttacttggagatgactccaattttcaactgggctctcttttcctggggggtagggagaggtggctttggtgttaatattatacggtacattcgacaaacttaggggatgtttccgaggactacaatcagccaagctgtaatagtttcctgtcttgtgattatgtaaattttaaagaaaagaggtctcttacaagctatatacagcagtttacacttcagtgtttctctctcacttgtaacacagttcaagttgattgatgacaagcacttgtcacataaacttctgtaggcacatctccattccgtcgcttcactggaggggcgaggtcttctgtgggatcatgattcgggattccatttcctgaataagtgggactgaaaacaagggccgtaatcactggggctcactgttttctaaacagatggcaataaatacatgctaacaagtaggctgctgaggatattcattcagaagacatgctgcctgaaatcagtactggagtactaaggactggtctcgggcagaaatatacaagctaatgacagatcagctgacaccctatcatgtgtcattaaaatattctgtcaggagatgtatttcatgtgctggaaaccagcaaagtctatattgtgagaaaaatggt

SEQ ID NO: 41804 - DNA, 1051 bp, Bovine  19866881329465
  misc_feature (1)..(1): n is a, c, g, or t
natgagacgagaagaataaagcgctttatgcctattaagatattacctgtataatacactagttcttcccagccatgtttatgccatgctgcgttccgtatatcctccctggtctgaagatccttgtaagcttaaaaatagccacacagaagaattagccaaacataacgccctacattccactagtacaggggggaatgactccaggacctgccatgaacaccaaaacctgcaggtgctcaagtcccactgctggccctatgtacccatggatctgcaccctcggattcaaccagctgtgggttggctgcatcgtactgtgtgtatcaactgaaaaagatccatgcggttcaaacctgtgttgttcaagggtcaactagatgtccagtaagtgctgactcagctgctcatcttgttttctcaaatagcctacgttatcttccttgacttacgatggggttacgtcccaataaacccatcataagctgaaaatattgtaaatcgaaaatgcattcaatacatctaatccacaagaacatcccagctgagtcttccttacctcatgtgtgttatgtgtattagtcgttcagtcatgtccaactctttgtgaccccatggactgtagcccaccaggcttctttgtccatgggattctccaggcaagaatactggagtgattgccattcccttttctagaggatgttcccgaccaagggatcaaaccctgatctcttgcattgcaggcagattctttaccgtttgagctacagggaagtcctttcctaccttaaacgtgctcagaacgctcatgttaccctacagctgggcaaaatcatctgatgccaagcctattcatatcaagagtttagtgtctcatgtaactgaatactgcacagaaagcgaaaaccacaatagttgtgagcgtactggctgttcacccttgtgactgcgcagctgaccactgccacagcccagcatcatgagagactgtaccaaaagcctgggggaagagcacaattcacacttcaaagtttctactgaaaagggatca

SEQ ID NO: 41805 - DNA, 925 bp, Bovine  19866880385336
  misc_feature (1)..(1): n is a, c, g, or t
ntcatgatgtcatgttttaaaagtccttttctgctccacccttatataattattaatctgtactttccttgagtgctttttggattttgttctttacgtttaaaattttaacctattttgctgaaagtataagttaggaattcaagtgtgtagttttacaaatgaatagacagatgctccttttccagcccttctattattattatttttacaatacttgtgcatctatcttgggatacttatacgtaggatacatttctagaactagatttcagtcaaaggatatggacatttaaagttaataaatattgctgaattgcccactaaaacattgtaccaacttgtgttcctttatcattgtattttgatacctgatttttttctatgctattatccatatgagttattagtaatctttttaatttttgtcaatctcattttggtgttccattaactggttgacagttacttttgtgttttaataattgattgagaatcttttacgtttcaatgtcatttgaatttgttttgtgacttacttacttgatcgtgtttaagtatggtttgtatatgtatttcaagcccatgacaattactattgttagaagggactctttctcaacagtttgaatgattaatgttgatctctctcctttctgtttcaggataccatggccaagcgaaatacagtgataggaacacctttttggatggctccagaagtgatccaggaaattgggtacaactgtgtagcagacatctggtcattgggaataacagccatagaaatggctgaaggaaagcctccatatgctgatatccatccaatgagggtaaggaaatggacagaaaaccagtgggatggtcagttactggtataatgagaaacgagttaaatgggtgtctggttaggtaccaaacagta

SEQ ID NO: 41806 - DNA, 3428 bp, Bovine  19866880426417
  misc_feature (1)..(1): n is a, c, g, or t
ncttgccctctttctttccgtgtgcaccagacactatgttctgtacttgacaggccctctaagcctcacagctgcccttggggagatcctgttgtcctcctttgaaaaagcagacaggtgaggcacgtagcagacttgtccagggccgtccagctcgcaagggcacagctcccgtgggaccagggccacctgcctcaaagcccctgctctccccctaaacctacccactcctccagcagcctttctggatgagatggtcagagaaggcttgctcgagttctctgaggagttcacccctgagcttaaaggagttcaccccttatccttccttaaaggataaggaagaactggggacaagctatccaggcagaaggatcgttagctgcatagcctttgaggccagacaagtatatctgacaatgtgaaataaagcttagctagagggtcctgagcagcagcaggtaaggaagttggaggggacgacaggccagaggtgtagggccattgtagaccctggtgaaattgttggatttttttcctaagtgcagtaggcaacataagggcagctcatttctgtatttttaattgtttgcggctaggagatgctggtggcctgaattgaagtgttgaaggcagagatgaaaaaaatggttggctttgactcgtacgagtatttcagagatcaaaggactgggtgtgcagacaggtggtgacagaaaggggagaatcggggatgattttgagcatctgggaggatgggcaccattcctgagacggggaagactggggaggaaggagaagaggttcggagatgagggaagggtgggtctcaagacttttggtctggatgtgttgaggggctgagatagctggcaggatctgattggggtgtgtgagtcgagttcagagaattctgatctaaaggtagaattgtggagggcgcagggtagagaggagatgctaaatggtgaccctccctttggctagtgaaaaccccgcaagctgcctgtgtggtcagtgtgagcatttactctctcaggatgctggctgccacagaacttttactgcaggaaatccatttgaaatttatttatgccaccaaggaccacgatgctgaaatgctatactcggagccataaagccattctcttgagctcattttcagaaaaatctgtatctggatggtgtgactggctgactgtgttctaataggtcaggtgtaaatttaagctccaagggccttagagcaatctgaaggtggctgagataaagtcagggtgtttcttattgcccaaagattagaatcaagggcaaaagatccccaaagacattggaaacctagaagaagcctcgaccagagacacccatcaatgactctgtgagaatttcactggcaggaaaacaagaaggaagatgtaggatcgggcttatcccacttgagggcttattagaaacacttgaagagcatctttagcgtctgaagccctgcccctcccttcccagggagcctgatgaagtagctctgactggggatgcaggagtctgtattttcaacaagtgattctgatgcaggtgacccatgggttgtactttgagaaacactgaatttcaaaagacctttaagatcatctaggcagccctttcttacaagtggggaaactgaggcctagagggaggagggacggcctaaagtggcaggacaagctggcgagccagtgcagttccatcactttctttttttcttttcatttctttttaaaagaatacttgcttgtttttatttatttatttggctgctctgggtcttagttaccatatgagaaatcttcagtcttcgtttcagcctgtgggatctagttccctgaccaggggtcgaattcgggcctcctgtgttgggagctcagtcttagcccctgggccaccagggaagtcctgccactgagtttttatccgaatggatggaccagaagtaagcctcccaccccaattcccaactcccctttcttcactgtatgtttttcttttctttcttgtattaccttctaatctgagtcatttactagtttactgtgttacttggcgtatgtctgtctcacttcactaaaatgtatgcttcacaagggcaacgatttggggagtttttgtttttcttttcactgaagtatcctctgtgccttggacagtgcctagcccatagtaggtattcagtgaatgtttgataaatgaatggatgaaaactattttgttaaactataaagacttgttttaacaggcattgtgggaaagtcccaccccttaggcactgttaacgcaaaatagagtaatatagtttgattttcactcgtttgactctggtttgagtcagagattctaggaacagcttgttgataggagatttgttgtttagtcaccaagtcgtgatgggaggttagagactttctaataatattgttaataataatgataatattaacagcaacaacgatcacagttattaataacattgatagctaccatttgtgagtgctaactatccaccagatacatgcgacgatgcagtcctgcactctggcgccacacctgttatgaactcatctaattctcacttcagcccaagggtggaggaactggtattgtctgttttccagaggagaaaagtgaggcccaaagaggtcgagttatttgtccaaggcgacacagccagtgcagttaggatctgtcctgagctattaacaacatccagttttaggtttgaggtgtcctctctttggagaagggctccaaaaaaaaagccaaagactaggcaagcatcgctttctggggtgtccttgggccaagaataccaacctccgagatggtataaagccacacaggctggaagcaagatggagtttttcagctcgactttccagcattcccccaccctctcgagtctttccattctcatctcacaaagaacctttcgtcttgaactatgaggcttttctcacgtctcagaccacctccctgaaacgggccaagggacattcctgtggtgactggtcattaagccatttctgccgagcccactggagcgcttcccactccaccctctaaagggagaggggacagaaagaggttccttcacccacctttcgacccccctccgctgctgaggcctcaggaaggggccggggcagccgatgagtctataaatctcctgtgacgcttgagtgaaccttttgagttcctgaaacacggcgcctgtcaaccggccgtgagctcagaatttcccaccacctgctgtggagaatgttggcactcattcccacccctgcacgcctggcctggcctcgctcggatgcagggaacactccacacagacggccatggccacgagggcacgtgcccagcagctgcagacacaggtgggagatggtgcccccctg

SEQ ID NO: 41807 - DNA, 1759 bp, Bovine  19866880448051
  misc_feature (1)..(1): n is a, c, g, or t
ntgttcagacatttcccaaatgatcatagggtgtgtctggatgcaacatcgtacaacaggtactcttgcattgagaaagttctttttaatccttctgattacaccagcaagaatatcccagattagagatctcggtctttaacgtctctttaaccctcgttaatcttcctttatcacaacagaaacatagagcaggcttcatgctcacagttctggcaggtggcagtatctagccagaatctagtattattatttcatatcatttaattagacatgatttacttacatggaacttaattgctttcattgcatctgcttttacacttacattctgtttgtgacaagtgaccctgcttatcccatttaaagtagtgatatccagtttttcttctcaagtaaatttatttttacacaaaagtgagtcccttggaagaaaaacattaggtcaataggagtacaggcaatacacaaaatattatgatgctattttgcaggtatggcaaacactgtgaacagattgatgtttggaaaattcttctagaacagtgtttattaaaaggttggaatttccactggcagaggggcttctctctgggttgctgtgtcccagaccccacccatcttcatatcttcctgcagagaaccccatcccgaggttcagagttatggatcctaagccagaattagcctgaggagagagaaggaaaaggttaaccccctttccataataaagctctgggttctgggcccaattccctcatcgaggccccatcagcccagccacgaaggcaggatcccccgccctccttcacaagggcaaactgaagctccgagtgtttagggctgtggtccaggtgatacaagttcagcaagagaacagggacccccagttcctctgtcatcctagaggacccctcccaccccatccacttttccagtgctggccacaggaggcccaggcttctgggaaggttcctgttcagctggttgaactcgaggaatctcttagggctggggctcagagagggaaggagcttgcccgaggcacacacagccctacctcagacggggtttctgcagtcccggccgcaggcacccgggcagcaccgcttgcggccctggcagtccgagtccttggagcacaggtgctgcacggggctaacgcagcgcagacggtcgtcggggcatctgcccatcttaactgcaacacagggaccgggtgagccctgcctgtgccccggccctggggtctggggtctggctggcactcagcaaggtggagagggacccttacctgaaaccttccggacacactggaggaagcacccttggcgacagcacttcatccccgagggacactggctgtcgtgcagacactgatcaggcacggagaggaggcagggcccgtcatccggtgggcagcccccagacttctctgtaagagaactccccaaattttgctactggaggcagttcagaattcagtataagcgctgtcctggggatcgcgcgatctaaattctccattccgtacttctttgcccattgtttgcaacttttttttttttttggaatggacttgctttttttttttaattttttattgacatctaaagtgaaatgtaacattatgttagtttcaggtgtgcaatgtgatgatttatttttgtatgtcctgcaaaacgatcgccacagtgtctcattaacgtcggtcaccatacatagttaaattgtttttcttgtgataagaatgtttaaa

SEQ ID NO: 41808 - DNA, 1566 bp, Bovine  19866880462992
  misc_feature (1)..(1): n is a, c, g, or t
ngctgggatcctggctgcaggggggctccccaagaccggcccccaacagagtcccctctccaattcacagctctccttgctcttccaggagctgacatggacccaaatcctcgggcagccttggagcgccagcagctccggcttcgggagcggcagaaattcttcgaggacattttacagcctgagacggagtttgtcttccccctgtcccacctgcatcctgagtcgcacagacgtgagttctgagtcctgggaagaggcactggggcagggcagggagggagtcccatagtcctggaccttggtccctccccgctggttttcttggccctttaaacatctatctccttacctgacagatgtctctgaccatccaatcagtgctggcctggctcctcccgacttgcccccttcttgatatgcagcccccataggtagtatctcatccatggaggtgaatgtggacacacttgagcaagtggagcttatcgacctgggggatcaagatggagcggatgtgttcttgccttgtgaagaccctccaccaactccccagacgtctggtatgtccctctgctttgggcccatgggcactggtcggtcagagctggatgtcaaagctgggctggggaagtctgcacggaggggctgggcatgagcttttccacccacgaagcacctgcttgtcctgattttagggaagttgaccttgggggaagctgggttacggattcctaatccaaacctctcagaaggcccaactgccttagtcttcttcaattttttatttttgaaatcaatgtaattagttaacataataaataatgtaaaaatatgatctttagattagacaactgaagcagttttagtcatttaatatttatttagcactttattaggtttctaataccatgcttaagaattctacatgtattatctcaatccttactatgtcctattagggcaggtggggttattcccaccttataaggaaagacattagagggacttccctggtgatccagtggttaagattctgtgtgttccactgcagggggaatgggtttgaaccctggttggggaactaagatctcgcatgtcatactatatatatacatatatatatatatagtcacagagacgaaaagtggaaaagctgaattcaaaccatggctgtcttgactccaaagtccacatgcttaacctataagatattaatggatactgctgctgctaagtcgcttcagtcgtgtctgactgtgtgcgaccccatagacggcagcccatcaggctcccccgtccctgggattctccaggcaagaacactggagtgggttgccatttccttctccaatgcatgaaagtgagaagtgaaagtgaagtcgctcagtcatgtccgactcctggtgaccccatggactgcagcccaccaggcttcctcggtccatgggattttccaggcaagagtactggagtggggtgccattgccttctccgattaatggatactatcttactttaaaagtgctgctattattgatggcatattatgtgccagacatttta

SEQ ID NO: 41809 - DNA, 980 bp, Bovine  19866880480269
  misc_feature (1)..(1): n is a, c, g, or t
nctcctataagtgccccctcctcagacaccggggctctggccgcctcacccgcggggctccgacgcgccccccgccattggaggtggcgcgcaaccttcctgctccatctttgtcttggctgcatcctgagactcccagtgccagacccctgccctgcgcccagggccttgagcgccccccgtttgtctctcgtctttccccaggggcgggggcttcgggctccagggctggggtggaccttgaggggaccggccgggggacggcctttcctctcggttcctcccggctggtcccggagggaggcgtagggcggcgccgactctacacctgcgcgcccttcggagtgtgcctctgatcccgggtgctcttgggcctggagtggcctttctgggtgggctggaccgggccaccattcatcggccggaacctcaggctcccaggcctgcgcgcaacctcggccagagcccaaggggcggggaaatgtggagaaaccggctcctggaggccctgggaccagacagaggaaacagaagggcttcggatacgcttttgcggtgaggaagcgaatccaccaacaggtggggtagctagagggctttgggtgagagttccccaaagagtgccagagagggagtcggaatcatgttccggtcttgggctcgcttatctccttattagccgtgaccttgggcgagtcgtgccgcctctagcctccatatactggtctgtaaaatgggatgatggtacctcagacacaagggttaagttacaagtgttttgtatgctgatctgagagtattttagttcagtgaggggatgaaaggggaggggagtgtgtggtggggaggagcaaaatggtttcctgacattttggggaacttgatgacaatacggatgagttctcccccaaatacatacacgcaccatccaaacatttttgtccacagttttagggagttcaagggcccgcttaagactc

SEQ ID NO: 41810 - DNA, 1877 bp, Bovine  19866880550145
  misc_feature (1)..(1): n is a, c, g, or t
ncttggacacactccctcctctcaataatacaaaatgtattgcatctcgcgtatgtagtaggtgacactctatcttccctctcaagcattgccttttaatctttggacacgtccgttacaggtagagcccatttctcagctgcagaaactgaggcctagagaggggaaatggcctgccagcttgaagcagagaggattgggagaagcccaaataataggcatgataatagtccctcctttacagggctgttacagaggtgttgaaggtgttggcgcatatagcaagttctacaaaagggtcatctgttatctctctccataacccccatttcactcccagtcaagaggttttgtcttctgccttgggatgcatattagggtcagatggctccccagcccaaaggcagggggactcccaaagcactgaaaacaggaaattccctcgcagtccagtggtttggctccatgctttcaccaacatcctgcctggggacttccctgagggtccagtggttaagacaatgcgcttccactgcaggaggcatgggttccatccctggtcagggacctaagatccagcatgctgcgtgcacagccaaaaaaataagtttacaaaagcaggggggaagccttcaaaggaacaaaacactaatgatgggacatggggcatccaggtgagctgggaaggaggcatgcagatggcagatgttcagccccagtgcctgaaacatctggcagggagcagcagaagggtttgccctctggtgggggcatcagaagtggggaccaggccttacctcgtcagagtccccccaccccttctcccccacacccaggattctcacccatgctttagcagtacctgccatcatcactcacacctttctcagagaggcaagttgaggttgattgcagctcgctccttcctctgaccccacccaacccatcttaaaccctacgagctgattcactctgctggacagactcctgggctcctttccctggactctctcagtgctcccaagcctgccaagtgggcccagaccctccctgaccccaccattcccaagacaccacagctggtgggagaagggacaaggaatttatccctttgtggctagtgtccatgactcggcccagagtgaactctatgggggcccaaggcctaaggcccatccagcccctctaaagtggggagaggggttccctgctcccctccctaccctttatggcatggcccactgctctcacaggcacatccacaaaccagggttccttggtgctcacaaaatagtcacagtgttggagtataaagctgtttccattcaccctgcactcatgtgctgttcacactaggtgcctgtgggtgtagatacaggggcccatttgacagccaaggttcagagaggttaagccacctgcctaggctgctcagcacaggcattgctaggatgcccatttgacagacagtgaaactgagacccagatgggccaaatcagaggcagaagcagaacttggaggacagccaggggcgcctccagattcagaactcttcctgtctcactgcctctcattaaccggcctggaggcggccaaggacctgagctgagggaagaacgcgcctgcagctgccccatttgctcccggggcagtggatacccccaagctctccagccagacaaggagccggaccccggaacccgagcccccgcccgcgctcactttgggcttgttgaaagctggcgtctgggccatggtgccaagcgtgcgctccggcgctgctcgctctgccgaaagaagatcggtggtccccgatgggtcgatggcaggtccgcttctccgggggcccgcagtgaccgcggcccgccacgctcct

SEQ ID NO: 41811 - DNA, 1022 bp, Bovine  19866880677194
  misc_feature (1)..(1): n is a, c, g, or t
naggtgaggtaccagtaacctagctgtgcgtcaaacacccctggatggctcgttaaaaacagattccagggctgggcctctggaagctctgaattgataagtcccacaggaggccaagttttcctggcttatttgaggctcatctggaaacatattctagattgttccaaagatcaaaaacatccaatgatactgtttgatttattcagtcctcaggataaatatccacagtcctcctgctagaaaacgtatagtaccctgtcattttaatcctctgttctgttggttttgcctctgtaagttcccagaaggcagaggctaagcccgctattataattcacataccagtcatcatagctaaatgcatggagcatctcctgcatggcaggctgtgaactaaaagttttatatgcctcatttcatgtgctcctcaaaacaatcctctgagttatatattattgccccctcttcacagatgaggcagttgaggctcagagaacttaagtaacttgcccaaggctgctccgctaataagcgacagagttaagacaggaattctaatccagagcccttgctcatgaccacaatgccatgctatctcatacagagtgacgtgggggtgctaggggttcaaggccaggtctatgtcactccggggccaaggtgtgatgctacactgcacagcctggcagagaaggagtcagtcgtgagggtctcactgcccaccttgaatgaccttggctgaggggaggtctctgtctctgcaggtgtgtgcccagctgtgccccacaccatgtgcctgtccctggccaccaccccgatgcccacccgggggggtgcccctggtgctggacggctgcaactgctgccgggtatgtgcgcggcggctgggggagccctgcgaccatctccacgtctgtgaccccagccagggcctggtctgccagcccggggcgggccctggaggccggggggccgtgtgcctctgtaagcaggtttgcgggtctggtggagggggtgat

SEQ ID NO: 41812 - DNA, 2099 bp, Bovine  19866880729481
  misc_feature (1)..(1): n is a, c, g, or t
ngaattcattgtctaatggctatttatccagcacctgctataatcctgcttctgtacctctgtctggtccttttcgctgtctgggcaggaaaaacaagtagttactaaatgccctatgctgtgtgccaggcaccaaagggtgaattagatctagttttgctctggaggagttcacagtctcagagtggggactgggaataaatagaaactttcagtaggatgtagtaagggctggctgggttccagaaggctgcctggaggaggttatactcttagctggggaggacgaggtaggtaggagttgctcaggagactgtataagcaaaaggcatgtggtgtgaaatagcagtatatttctacggtttaatattgatctctttcatcctttagcacaaattcagagccaccattctgctttctgattggattttgagcacccggggagaaagcactgggccatcatccactcttcccccacagtgccaggcatactgtgggtgctcaatgtatatttcacccaagttcccatccattatcataatgatgatagctaacgttcattgtttttcagatactgttttaaatgctgaacttgagttagctcttttgcttctcaacagccttctgcagtagataatattatctttactcaagagaacaactccctcaagaccacacagctagccagcggcagagccaggattcaaacccaggccacctcgctccagaatctgcacttaaaaccatctcactatacccactaagcattccctggccctgtcctcacaccagcggccagccagcgcactgcctgaatctgagacatccttcaacgtttttaacagaaagcaaacaaggtgcggggtgggagtgggcttgagtcacatcaactcaagttcaaatgctggctggaccacttttctaggtgggcaaacctaagcaagtcatttggaaggtgatgggccccaatatttctttttttcttttccttttttctggtcccactgagtggcatacaggatcttagggttcaccaaccagggatcaagcctgagtcccctacagtggaaccacagagtcttaaccactggactgccagggaagtccaaggccggaacatttcttaaacgaatggatggatgttccgcgtctcatttttcctcacctaccactcaccttacaaggatgagcatcaaacagggtgatgaatgtacatgcctgccaagaaaggccccctttccccagcttctcccttccattttccagggagggtgatggtgttattgtcattcaggcttttcccccctgtatttttaaacccattagccccggggtttatcacttggcatccagggcttatctccaactgtctctttgatcagctatgtgtgtctctcccctgttgggctaggctgttcctccagaacagacacttgcaatgcacatcaggcactgaataaatatttttaactgaatttcctctgcctttttattatattttgtcttcggttcagcacatgccagctattttggggacccccaacctcaaattgggtacctaagccacacccattcatccagacccggccccgctttcggctcagactcccaggcctctccccctcccccttcccaaatcaagcagcttgcagacccggggcacctccccaaggccgccccgcggccaggccccgcccccgctcacggtcggtgtttttcagcgactgtttcttctgcgagggcttggagatgaccttgatgaggcggctgtggaaggtgcccagctcccggccgcctcggagcatgagccgcaacaccagtcggaagtgcttcctcttgtctgcgtccgagatgtacagagtcttggcgcaactgaattcctaccgggttcgcgaggacaggggtcgtctcatcgcagccctaagtcccgggatgagcccacctcccccagttatctgacgcccgccccgtcggacgtaacatgacaggtccaagctcttggactcagcctcaaggcagaaacctggtctctccgcatccccacctatcttttggctcctgcagggggagtgaaggagccccctcccctctccggtccc

SEQ ID NO: 41813 - DNA, 2053 bp, Bovine  19866880736322
  misc_feature (1)..(1): n is a, c, g, or t
naaatgagtaactgactacgtcctgacagttcggaaagcttagtaaaagcccaaagcaatctctacttaacaatctgttttgaaggcctgatccaggaaagaacgcttaagatagtctcataaaatcagaggttttggtcaccctccagggaaaaaagtcagggctaaaatgtatccttcactaccacagaaagccatccaaatggtttataactctgcacagaatccagtcaatcttgctcaggttctgctgatcaaattaattttgaattagcagtctggtggttttgtatcctgctggacccattatcagacaacgccagagggctgttagctctttgtgctgcactggattctatttttaatttctctgatacatcaaggagaaaaatctaacaggctgctaagtatttccagaaaaacaaaaagggggcacactgggcactaatttactgaagggcacaccactgcccccctgcccccttcctcacacacccacacccacgttccaaacaccacgacttctgacttctgtccattccacatcccttctgcctccatacacacacacttccctccctctccaagtgtctcagcctgcagggccctctccctcctccagctgcagaattcttattcatctttcaaaatacacttcaaatgagatttcttgatgctgtccttgggttctttttcctgaggttcttgctccctcttctgggctcctacagcattttttttacaagtactgtatgaacagagtcccttggactgcaaggagatccaaccagtccatcctaaaggaaatcagtcctgggtgttcattggaatgactgatgttgaagttgaaactccaatattttggccacctgatgtgaagagctgactcatttgaaaagactctgatgttgggaaagattgaaggcaggaggagaaggggacaacagaggatgagatggttggctgtcatcaccaaatcaatgggcatgagtttaagtaaactctgggagttggtgatgcacagggaggcctggtgtgctgcagtccatgcaagtcgtaaagagtcggacactactgagtgattgaactgaactgaattgctttttagacaacttccagcaagcaacgtgaaaaatgcaattaaactgccatcatcctggaggcccgttatatttttatagtggttcatatattgtcttttgaagtaataattttagtgatatattttatgcaaaaatatagcataataatacatgaatacttaatatatgcttttcttagattgaaataatgacacaaagatgtatcacacatgtcttatctataagtataccctatttgctagaatctgtgaaaacaactatgaacaagttctatcttaaatgtaagaaacaatgtgagaaatgtataaatatgtaaatatttacattaagagtacacagtgtgacatatacagtacaggaggtggtggtttttcacagagatttgcttcagaaatatgtgattcaaatattgattatatcacattctagtgttataaatttgatctctttattcttcctaaattcaaatatcatcatgtaagtggaatttttgtaattaattgcaacaatgtacataaaattcttaccacaataaattcttatttttagatctcagcaatgtattttaccagcattattaccataaaatattcacgctgcaggagggtaactcaagtaattcttatggtatcggtaaaatgcatagaaagagtagggattgagctgaaatataaacattttgcaaatattctttaacctatgaaaataagtgttggaagaacaatctaagtagaagggagagaatatgccaatctcatgggcattatgcatgtggagaactgttgactatgactggcatggagacgctgttatgaaaatgacaggagttgagcttggacacgagatagaattagaacatgaagagcttcataagtcattttaatgcattcagattttatcctgttggttgatggtggggcatgaaaacattttagattaatcagattttc

SEQ ID NO: 41814 - DNA, 1352 bp, Bovine  19866880743600
  misc_feature (1)..(1): n is a, c, g, or t
ntgtccacaaagtccgagggaagtccccgtctggacaagcttgatgaaatcacacacatggtcaggagagaggcatagggctcccagccaaggtttctggcctcagacaaaagcaaaggctacacacagggagtaagcaaggcgtgagggtaatggagatggaaggaaataaacagagataaatggaactgacagggcaggaggagagctagagcctgaggcaggaaaacagattaatggaaagaatcagcaagagtcagactgatgcctggagaaccagagactaggaaacaaggcagggagagagaggaacaagaacagcaatggactgagacctgggctgacagatggcagagtaaaagaagagttttcagatgctcagaagccctcacagagaccctggagcccaggtggacatgaacacactcctagggacatctcctgaagctaagctcagagttcacagtctagagaagggtacattcccacaccacctctgacgttgcagccaagatggtaccaaggtatctccaactcaccattttcagcaccttccacagcccaaagtgccaggcttcccagggcaagaagcatgaaggggaagaggccactgagcttcatggtgagggcaggggtgatgctgatggccagacctcccaatttataccttcactagtgggtgtggcctcaccagcatttctttggcccctcccagcttccatggcataaacaggaaggcagagaccaggaagcttgatactagagagacagtggctcattcctgtcccaggcaagatggcaaggccactgaaataactgccagggaaaaaatagaggagaggcgggcctgggagatgtcggcaggcttatgaggaaactatctcaggtgtccatctgaaccctgaacattgtgggggccccacgtcccttagccttgttagtggagatggggttaaaatagaaggtcaactgcaaagatgctatttagtcctggattcttaggtaagatgttgggaaatgcaccgctagttctcccactcttggactcccagggaattgtgaaactctctactgattgctcagtgcaatttctttctcaaatttcagataacattgagtcaagctgggatctgggaactgggacccgtttctaagtgcttgcacctggactaacggctcctagagcaacagaatacaacgtatctataagggactaaaaataactacccacatgcgtagttggggcaaattatgaacaaaaagatacaaaaagcccaaaaacccaactgccacttctgagatgtgaaatggagcaataacagggtactacacatgcactctgcacacagcac

SEQ ID NO: 41815 - DNA, 1845 bp, Bovine  19866880747421
  misc_feature (1)..(1): n is a, c, g, or t
nccctgtcctgggattcttagccagaatactggagtgggccactatgccctcctccaggggatcttcctgacccagggatggaacccaattctcttatgtctactgcattggcaaacaggttctttaccgttagcaccatctgggaagcctatgaagatatatatgaaacaataaactcattatcccaaagtgaaataaataaaccaatgaacgaagagctgtgttctctctcttgggatgttgagacactagctgggaggctctgaatgggaaccaataataatagaatggagaagagctgtgctgggctttcagggacaacgtggtccagcccacctgttttacagacagggaagctgaggtctccaaaggtccctttttagtgcaaggtcacagggactcaagtctgcagtagatgaggctggggaacaccttctagatgctacagaagcaccatcctagaggacttgcccaatgcccaggaagaatctatccaaggacattggtactgcctccaggtaagaagttcagttcttgcagccaacacctctggcccagggtgcttcttattccaagtaatgaaaagcacaatgcttcccttaaccctggggaacagggcgccttctctttcagctgcagctataaattccagcttcccagcctcaccccagaacatgaagctactcacaccatgaagctcagctgcctacttgccctttgcctcacgctctgcctggtgggcttggcgagctcaggagagacctcaggtgagctaaggtgctggacacagggtccctgatcatagcctggtgggggagtattgggtccaaccagccatctggtcacttccacctcaggagaaaacaaggacctagacatgggaagaggttccctgtggtcagcattcagactcagaaaaatctggggctagacctcccagatgtctctttgacatcagcagattttaatttttcttaaaaagcaagacatatgtttttttaaaaaagacaaaccatatgtaaatgtgtgaagtttaaaaagtgggttccttgttttacacagccccaacaatcctgctctccagaatcctactccctagaattcttaagcaagaaaagaatattgatgatgctttggacaggaggccagattctcaaacttggctgcacacgcaagtcctctgaggtctctctgggtcccacattcaaaaattctgatttaatgggtctgggacaaagcctgggcatcaggatttttttttaactccctcaagaggttctattctaaccaagattgagaatttgctgcctaaatagaaggtctcgagttcctttctacaatgcctcttccctattccaggttaaacttctaggaaatccagcatggtcaaagtcactctcattggggattcacaaaatggtttggtggagctgagttgacatttgtgcttataagtttgaggaatgctgtccttattagggaaagtgtcattctcaaagtgctgtgtgctatattcataaaaagatacactgaggtcctgagtgtccaaggcagatggtgtgggatgtgtgtgtgtgtgtgtgtgtgtgtgtgtgtgtgtgtgtgcatgtttgataaatcactgagtttgatacccagagctagatgtgaaaggagttaaaatcacaagtgattcagtaaaagaagcctgtttctttatttgctgattacccatgatattaaagattatttaatatgaatatcttttttctggcagtgaaaaatgaaacttgcccattgtcattcaactgacactaaaaataattttagaaaataaaaatcatttgaaattccaccacccagag

SEQ ID NO: 41816 - DNA, 3452 bp, Bovine  19866880792513
  misc_feature (1)..(1): n is a, c, g, or t
ntgaccctctctctctcatctcagggacttttctcctcctctgcctccccctaatatctcttcccgggggccttaacaaccatcgcttcaacatttcttttaagagttgttggaaaggcaccagttttggagaatgtgctcagagggtgtagatgccccccccccccaatgtcatctgtgtacccccccttgacagtcaagcccactgtcttcctgtcaaagctcaaattcccaccctcacccccagtcccctggaatgactgactggaattccctcccgaccctccccatttactcgatggggcttggatttgactctactttggtgttagggcctcaggcaagtcccgggcctcagtttcctgctcttgaaaaaggggttaattatccttgtctgagcatgtctcagcattgtaaaaataaaactgcttgaaaggcttgttctcctgtgcacagtgtcgtagtcttcctgcatcttacagcagccggaagggatagctactgttgtcgatgtacccattttgcagatgaggaaaagccaggcagcgtggtgtagttttgtgactttcttgggttgcacagtagtgattcaaacccaggcgtgtttgactccagagaccaccctctgccccccggcctgaaatgagattccaggtgggaaagggcagtgtcaggcctggcggctgtgcttgggctggccaagcagccactgacaaaggcgagggtatgagggcctgttcagcttcagatgcgcccctctgggatctgccatcccactccattcaccccagctctctggagtgccttcctgcccatcggttcctggatgatccccgtcacagggctgcctggcctccttgaagaatccagttgtctgcctcagccctgggggccgatctatcacctgcctctccagaccgatgtaggccaatgctggattatatttaacgctgtgctatttccacttgacagctccggagcgccatcccccctccccttttctccttcctcccccctccccttctgattcactcggaaactgacaaggctgatgtcagcgccttattcttagcccccgtaattgtaactgcatttagcagtgcgcacttcattaacagtttctgcgacgggggagtgagatgactgcgtggctgggcagggatgcgggtgggggtgggggaagggggcagctgctgcagggaccctggccaggtgcctcttctggatggaccagctgggtggcttccaggtctggctttcctagactagcgatcttcgaaggccccttggagagcgtctagtccatgctgttctttaggcaaggagggaaactgaggctcagtgaggcagagcaccttgccaaggtcaccgttaaggatccaggcctctggcctttgagtctaggttttcttctttggtgttattatttcttcaactcatatttaattagctgctcagtgccaaacatctctttaggtgctggggctatatctggggaacaagtcagacagtttctgctctcgtggagctatgttctggagtggaagagacagataataaacagggaagcaattaagcaataaatttcagtctgtgttaagtgaaatgaaaagacaggttgatggagtaggacatgaaataaggtagtccggaaaggctcactgaagaggtgacagatgaggcctaaatgatgaagagccagccatgggagtatgaagggcgagagggatttaggcgtatggaacaggtggtgcaaaggccctgaggtcagcatgaatttgggtgtttagggaatagaaagcagaccagtgtgattaagctgcatgaggggaggtgaggtcagagaagcaagctgggggcacaagtgagccttgtagacactgataaggaatatgaatgcgggtaactgaggttcagagtgggaaggagaaagacccccagctgggtaaagtcagagagaagccaagagctaccgcctcctgaatcccagtcttttgagttccttagacacaggtgactttaaatgcgtcatgtggcttcctttgccattgtagctggaaggtagtgtggagtctgggcttcttctgcccaggcaggttctctctgcttgccccttctctcctcctcagctctcatctgacccagctgtattgcttctcggggtgatatagctgggaaactctggggagcttccagggtgggacagaaagaacgtggctttggaatccaacacacctgaatttttatctcacctctgccatttctgaattgtgcgaccttgggccagtggcttcagctctctgggactcagtttcttcatctgtaaaatgggggcataataatggtaagttcttggacttccctggctgtcccattagtgattaagtctctgtgcttccactgcagggggcatgggttcgctccctggttgaggagctacgatcccacatgctgtgtgatgcggccaaaaaaaaaaaaaaaaagtaagttcttcaaaaggttattgtagggagtaaatggacataatgcacaaaacacacctacctcagagctgggcatgtggtcctcagttataaggacaagtgagattatggtttaatcctgtgcacatagtagatgctcagttaggggttaccactgtcgttgtggttgttactgtcgggtcagaatcatcaagttgacttgttgaaacatagattgctgggcctctctccaagtttctccttcagtctgggttgggacctaaaaatctcatttactaaaaaaaattttttggccacaccatgtgggatttagttccctaactagggatcgaacccactccccttgtggtggaagctcagagtcttaaccacgggactgccaaggaagttcctgaaaaatctcattgctaacaagttcccaggtgatgctgatactggtccagaccctacttggagaatcactgggttagagaaaaaagctggagagaaatgaagggttcttctgaacctgggatgtctccttaggtgtcttagatgcttgggacattgggtaccagattcggtacccgggtgtggtcttcaggcacacctatttccatcacaaggtctcagatcagatgagtctcagctgctgccctgctttgcactgggtttaatgtgaaggaccccatcaatccttttggaaaccatctgtataaatgataaatgagtcgacatgaataacacatcaacccataatatccttttgtgacatattggcctcagacagctctgcagattctgaggggctcaggcctagcatcttttaccaaagggaataggatgccacccctttcttgcgttgaagaaaggcagaaatatgtattaaaaccaggaggttcatttgaggacaggtctccactgggaagaagtaaattaaaagaaccatcaatgtaaaagggtaaaaagtagggaaattctaccgaggga

SEQ ID NO: 41817 - DNA, 1454 bp, Bovine  19866880880110
  misc_feature (1)..(1): n is a, c, g, or t
ntctgcactgttttgttttgtttcagtttagcccgtttcaaaactaggaagaagaggcaaaaggcagaaggtggtgctggctagccgttgttttttttttttttgataatgatctctcttacttccttctgagaaaacatttctacagacagctcagaagagatagttcaaatgcttttacttccagaaaccttaggtcttagcaaaaggtcctatgaaaagagaacacttgttcatatattactgttctgtcccttccttcacaagtttaagaaactattccagttgagagtagttaagtgttttaattttgaggaactaagatttgtcaaatgctgcaagcaggaagtcgggccagcaggcgaccgcagaaatgcacgtggtttgccccgaatttccatgacaacatggtggggtcactgcaggggagcaggcttcctcagttcagattgagaaacacaaactgaggggctggggtaggtcctgggagttgagaatgacaaagtcttgcagcccaagcctgtcttcatccttctgaagctctttgggtcaccagatcaactcagtctctcctgttggtaaagcttaagatagatggggctacctgctaggcattttgcccaggagcccttaagtcttgtagacttctgagtgcaatcacttctgttctccccacctttctttttttacttttcaggagtaaatttgttaaagatttttttatataggctatgtttttgaagtgttagttgctcggttgtgtttgactctctgcaaccccgtggacggtagcctgccaggcttctctgtccaaggaattctccaggcaagatactggagtgggttttcatttccttctccagggcatcttcctgatccagaaatcgaacccaggtctcacgcagtccagccagattctttaccatctcagccaccagggaagccctagaccatgtttataaaacctttattgaatttgttacaatactgcttctgttttatgttttggtgctttggccatgagacacgttccccatggatcttagttccccaactagagatcgaacctgcatcccctgctttggaagaaacagtcttaaccactggaccaccaataaagtcccccccttttttttttccatgatacttttgtggttactctcaactggctaaaaccctcctttttcttgtttggaaggaccagagtaaggtagcagtttttttttgttttgttttgttttcttttctttttggtagcagtttcttttgtcttgtgcataagatatatgacggcagctctttccagtgggcaagttggactttgccacttttgataggctgtgtaagagctgtgtttcaaacacagtgtacgcatgtctctaaagatgagggatttcaaagagcctacttctgtgctaaacatcataaggaatacagagaaatacagggcagca
